United States Patent Application Publication US 2014/0057251 A1 - sequence listing, part 153

SEQ ID NO: 298391 - DNA, 3202 bp, Cannabis indica
aaaataatttccaacaacaactccatgagtctcttgagcaagcttgtaagcactttttacagtgtataaaccagacaattccagggaccaactaagacagtcacgacctggtggattttcactgggattttcacgatcaagtcttgatcacattgctcaaaagatcagctagcacttcagtatcccaatctgtaccattcatgttcagaagattactagctttagccccaataaggctaggattagaggagataaccatcgggttcagtttattagggagccaaggttcacccaaaactgcaataatgtttttaccatcttcaatagtccaccgaaccccttttgatactaactgttgcgcctctaaaacactacgccaaacaaaattcggattgaatccaatggtacctaaaagaaaacaaccatgaggataatatttggttttaaaaatccttgccactaaagaatctggtttgaagagtagattccaaccttgtttcctcaaaaaagctagattaaaatttctcaagtcacaaaaatctattttgccctttgaattatgtttacaaagctacttccaagataaccaatgaatactattagtagagctagtagagaattgccaccaaaactttgacaataaactctccaactctctaatggtctccaaaggtaacaagaagatactcatggcataacttggtagagcttgtgctatcgtcttaactaaaattttcttcccagttcgagatagaaactttgtaccctagccttgaagcctcctcctcactttttcttttagatagcccaaagtagtagttttattacgagtcatagtactaggaagccccaaataaagactatcgtcagcagccacaatcatgcccaaaaaactacaaagtgtttttttagtgaaacagtagtattagaactaaagaatatggatgacttagaaaaattaatattttgacctgaagccaactcaaacttgtgaagaatttcttggatttgaaccacttcaattcttaaagctttatagtataagtagctatcataagcgaagagcgtatgtgaaattcttagggcaccatttgccactttacaaccatgaagcaaaccacattgtttgtatttttgaagaaacactgagcgggcctccgcacacaatgtaaagaggtatagagataagggattcccttagccgatacctctatatggaataattggaccaacttcataacttctatgaataatttggtaactagcagaagtaacacaattcagaataagtcgaattcacgcatctgcaaaccccaattgacaaagcatagcttcaagaaagtttctctcaatacggttgtaagctttgttcatgtccaattttagagccatgtagccatctttaccctttcttttcctcttcaagtagtgaagaatttcaaacgagaccaagacattatcagaaatcaaccttcctgggatgaaagcactttgattcttcgagataataatatccataatcgatttcattctattaaccataaccttagtgatgattttatacataacattacataaggctattggtcgaagatacgacatttgctctgaatttgtcagagcccattcttcttcttcttttaagatcgaggaacaagagcccatcatttgaaatgtccttatttggcgccactaacctctccatcgttgaccacccctatttgaagggaattttcattaattcccaacacaccatatccttatcctgacactaaactctccccattcaatcccacattactagtagcaatattactaggttgtaataaagattcttgattgtgaggaatcaatgggcgttgaccaacatccactgctgtcatcgaatatgatcgttgaccaccatgttactgctctccccttagtccgttgaagaaccaggtttcatagccaccctcgatctcaaccattttgaaccattagcatagtgatgtcttcttagtaaagcttttaactcaagatcatagcttttaacaatttgatcttttggcgtgtggaataatctttcacaaaatctctcagagtgttcaagaactccacatatgaagcaaaatgtgggtaaatcctcatacttaaaagtcacataacacatcggtccaccctgtatttccaacttcttcttctttttcagtggcacaacaacttgaagcttaactcgaatccttaaataatcacgccaaacgcccaaaaagttgttaggatccaatttgataagcttaccaacacctcttataattctttctgatataaaactaacttgcatattatgcaactggaaccaaagttcaagtttagtaaggggtacatgatgcagattttctcctttttaacatgttcaaagatccaaggggctcgattgaatgtccaagggctgccttcaataaccctttcgatatctacttcatggtaaaattagaagattaggatcctattccttaacataaagacctctccccagtcgccatatatagcatgaccatcttattttgcatagcttgaaaatttgtagatctgttagtcaagaaagaccccactaataaccagttatcatcaatctccaataatccatctactccttcatcaaaaatgaggccctcatcatcatcatcatttatcaagatggatacatattgtttatccatgtataatcgatgggtctgtccagagtccatagcaacgcaaagaaatagtactaaaaacagagaacactaaagaaacttgagaaaatcttcaaaaaaacaaaataccagcacgaaagaccaaagcaccaaactcccaaggtcaccaaataaccatgttaaaagacaactcatttgtctaataattatatacataataattaattattgatgataagaaaatagtatataaaaatcttattgtctatccaaatatatcattaattttatgtacagctagctagatatactataaaggtcaaaatcttattacagcacattttgtctaaaagaaaaaatgttagaatatattaaggtatgatttctaattaaataacgtaattataagaaaattggccatatagaaagaaaatatttccaagataatttttaagtacataaatgacatgcactataaaaaaatggctaattagcaattttttccccgaactttgacatgtacc

SEQ ID NO: 298392 - DNA, 1415 bp, Cannabis indica
aaactcaaaaataaataaataatatatacaattatatagtgatcctttttttctctttgaacacagaatttttctgagattcagatccaaacccgctttgtgttcttaatttccgccattgttgccaatttgaaattagcttaaaagaaaaatcaaagaacctgacaaaaatggcaacggtgtctcctttggccaaatacaagctcgtctttctcggtgatcaatccgtaggcaagaccagcatcattacacgcttcatgtacgacaaattcgataccacctatcaggtatatctccttctttccttccttttcattgcaattctattcgattcgaaatttctatttattttcgttgctttacgttgtgttcttgatattttcccttaacactatgtatagataatacaataatcttatacgtgatcttgatcttttatggtttcagttttgtttttcattccagactatataaaatttataaatttatatatgaatatatacttcacctaaaaatgtgaactacaattgtttttgaagaaatatattatgagattgtgaaatgaaataatttgttacacgtttctatgttgatcttactacaaagaaagtcagaattggtgataaaaggttatgagctgaattaatttaagaattgttttggtaaatgaaatgtattattaatcattattctccatatagtctttaaagtagcaaaggtcgtgtttaattttttgaattacctgattgcgaaaattttatagcaaattatgcaacattatactactctttcattttgtcctcctgtatattgaaattgctaacttaataatgtgttgcaatttaagctttatttaaattaagataaatgtttcgggtatgcaataatgttgtttacaggccacaataggcatcgactttttgtccaaaacaatgtatcttgaagatcggacagttcgtttgcagctttggtaagatcttgctaatgccgtattcactttaaataagattgcataacttcatgtgatttaatgcagcctgattgtatgaaatgattttgcattcaaactttatttatattatatatgtataaaatttattattggcaaatgattgctagtttagtcttttgtttcattttccctcctttcttctaattcaatcctgaattatcttatgatagaaagtttttctgttctggtttatttgatcaatatagaaatcttgattctcgatgttagatcaaacggtttaagcctgctcgtcagtgtgggctattattattagaaggctaattagtaatttttcgctctgaattttgacatttattaaatcgtgtcccctgaactttttttgccgttaaaaattccccttgaagttgaactattgagattgttaaatttaaggacttttgtc

SEQ ID NO: 298393 - DNA, 2867 bp, Cannabis indica
taaagaagatgaatgatatatatatatggagtatatatattatattgtttttattgaatattagcgtaatggagtttaaatactaagctacgtgttgggattagatattagacatcatgcagttaatgctgttattatatggattatgtattaacatcagccgagctttgcaaggtgctgccgcgagaactctattttgtttaaataaaataaataaaacacattattttttaaattaaatttaacacataagatgtcataaataaattaaaagtaatttcaaattcaaatttaaattttaagtaaaaaatcttattttaattgaacataattaaaataattttatttaaagataattaatataataaaataaataaaaagaaaatttatagtacatgtacaacaacatatatacgtgttaattccaattttcgttaaccaataaatgagtctaaaattaataaatatacttcaaaaagacattaataataataattaaacaaaaaggttatttttatgtgattttgaagttagttattcatagtctacgagttcatcttatgatcgggattttatgagtttataggtatttactgagattttcgaaaatagaatattaatgataagaactaaagaaataaataattaaaatagaaagagtaaaaagagacaagtagttttttacttgtgcgggcgttaattagtctaagtccacgagtcagtattatttagtagttctttacttgaaaaagcatttgagaatataaagaatttatgttgtcaagttgcttgagcaaagtttgcaagagaattcaacccttaatccataagattcgatgggtatttatattagtttgagaattatattcagtttcccttttccctctattagagagtttatggtaaataatacacttgggccatctcatgaagtccagcccacgaaggagacgatctgctgactaggcggatcggatttggcttgatttggtcaacattgtgtgctttaattatggacaattaatttatgaattaattgtgtaatgttcactataggaagtttcactatcaatcctgatacgatactttgttgtgatctggcagctggagtttccttatttatggacaagaataaaaaggaaaactagaagggtcttctaggaacttgctctctcgtccctccagtctaatgatatcagacatgcttttgggcacggctcgccgaaggcataaggttttatgattacggaactgagatatgttcatggaaggacttatccaaatggacttggcacactttacctttgttgagggacccactaatgggccttggatgctgacctggactccacatgtccactgtcgaaaacgtaaataacatttacctcccaagcttccagaatgttgcgtatgctggatgcttgcatcactccatccatatggacatgtggaggttgagggataaaatcatgaatttctgagtgccactcgatcttggaagatagcttccgcctatgatgatagtacatccacgtgtcgattgcgtgatgatggaagggcgcgaccatcgaggagtcacttttcaaaagttatattttgacggctgtttagtttttggcgtgaaaaaagggcatctcaatcattgatatgtgccttaattccggggaactttaagtgcaaggatatgcgtggattgtggaaccccctggccatcggatgaaagtagtgcttctagaattaggatcatggtccgtccatctcacgtggatcactccttttttatataaatactcttgatgaactccagttaccacttttcattcgtttcccaacttttcaacttttcaactctctcaaagcttctaactttcttaacgctctttgagaactagaaccgagtccagagctaactttccttctttaccttggaatgtgcagttgacacgcattcatctactattgaggattcaagcgcaagaacttccacatctttaacccccagtgatcgtgagctttacgccagaagaagaagatgcgattctggattttgacgtaaaaatagattcgttgatcgccctagcatcccttctttgtgaaaggtgcgatcgatttccccagttgaacccagtgtctatcagtttgacatctcgactttccacatcaggtatcatacttcttttatctctggatcatattttctgggttttgtgtattattttgcatgtttagtctgggatgttgttaacacatttttttagctaaatatatagccttttacgtaataaaaaattagaaaatttaataataataaatgaacacaagatattttacgtagttttgtagttaaaatctatatactccacgagtccttcttattcaggatatttatttagacacagagtacaattcttaataaatataaataatagtcttttctcttaagtttttcatctcttttttcctagattctgcctctatttataggtgtataggatgacagttatttttattggaatctattcatttacaattgttcatgaaacgtggacattccccacattctatttttatgcacatgggataatatctaataactacccaactactctttatctttatttataaacggttatgctgactaagaaggttgtttctcgctagatgtgagttatccttcctaccatctttataggaaaagatgttaagtataaatttacttttccttactgtattcttcatattgtaatgatactagcagggtggctactttgtcatgtaaagggcaagatggatgaatgtagttatttcttccatgcacaaatatgtgggtcaatgagttgcaagcttttactcccaagtatgtgggt

SEQ ID NO: 298394 - DNA, 4782 bp, Cannabis indica
cgaaaaaccgagtttctgccaattcgtcaaagtcgcgaccagagtcgtgaccacagaaaagggtcgcgacctggctcattggtggtcgcgaatactcacacctcttgagcagatttttctgatttttcgccagtttgtcccgtcttttcctcaattgactgaatttgaactttgataccccgggaacctgaaacaatgaaaatcaagcgtaaaaccgctccaaaagacgccaatagacgagaaaatgcttacttttcaaacccaaaacataggctaaatataacctaacaaaattcaggattacataattgtagatcatgtttccagccatccgcattattagattcccaaaacaaaagttgtaagaatcatcctctttgagaaaatttaacgagtgaatcaaagaaactaataatatgaataggagttcatgattactcaggattcaggccaatctactattgatcatccttataatttggattatgtctttatggtaaatgacatatttaataaagacaacttaattatatatcgtttatttcatatataatctctattatatacagtacctttacttagatgtcatactacatcaacaatctgaattaagattgcttgcactgaataacgggcattaataaaacatactagcaaccgttgattaaagatttgataactttaatatgttcttgactattatattcaaggctaagtgatcttgattctccgtacaatacaagtcataacctcatatatgattaaggaattttttgatatttatatataaattattcaatagtaaatatcaataattttacattcaagcatataaaaatattaaacttttatttatcaatagaaatgtctttataggcctttcagagcataaaccctaactcttcgctcatggtccttatcgataacaatatgagtatttcccttgagttcatggagaagagttgaacctgagaaatcagttcaactttcttcacacttgtgaccctgtagaagacttttttgaggggaatagtaactatagtgctttggaagatcgctcttacaacaactaatccaaggacgactctgtcgtcatatgggagaaatccctggaattgccttcacaacctcatggttaggaggttgcagggaaacccaagtcaacaaatatttttgattaacttgggaaatagaaagatctatgtgacaccctaaatgagagattattggtggaagcaaaagcttctagttgtgaccccgtccatcgagtagctgaagttccaattgggatgtaaaccaccacctgtggtatcaacaatgatgagtttgattccttagccgcactggtgaaaggaatcacaactcaaaagctatcaaagtttgaattggattgagagcaacgcccactgctctcagatcaaattaaatctttggagattcctccagctatcccaattttcgcccacttaacatggcattgccacataggaaaaactaaggccacgtgaaatatagctcatcaatgggtgaacaaactttccttgcatggcatgtcaatcatcaagggttcaaggcaatcaagcaagatcaagctaggaagaaatggccagccaaggaatcctggtcggacgacaccctagctagccaatgaggatctatatgctagccaggcgctaagaataaggctggccgaccagtatgtgcaaagagtatcaataggagtctaaataaatggtggggtccacacaaagcttcctgaacggttcacaacttaattttagttacgcgacaactccaacatcccacaaagatagggattcatcctcaaattatgtgcctattctttagggatattacttatccatttttgtaatttaaatatattattgaaagagaaattttccctattttggagggatattcacttgttttgttatgttgttatccctaaactatataaagggccttaggcaaggtagaaagagacctgaattctaagttccataagcactattgcttatctctctcatgtctcctcactcactcactcactgactagacacttattctatttttttcacaaagtctcataagtctcataagttctgaatttataacactcagttctcattactgtactattgaagagagccatactaagaattatgagattcaagcatgtaatttgtgtggtattatctcaagaattaatacaatgaaaaggggagtaggtcattacccactaaaaaggggactgaacctctatcaatcccggtgtcacttttattatttgttattattatttacacgttgtgattatcagcaataaataaggctctaatgtcaattgactgaattcttggtcaatattttggtgctttcattgagagctatatttgattttcatcctgatcaatcaccattgttctaactagaagaaccacttcctcatgtcttcctcaagatgccatcacaattgatcctgatgttcgtgttcctcccaccatggaagatcccactaatcagactaatgctacaaaccttgtaaactttacaaattgtattgattctaccagtcatgtaaactttgcaaaccctacaaatcctgccaatactgttaatcctattaatcctgctaaactagtgagtgctaacgatcaatctttgctgccaaaaacagatataccaacaactcctcaaacaaaaggccctattaacattgaacaacctccacaaaacacaattgaaactgctccacgatactatgcaggagaaatagggccaggaattggcaagccaactattggtgagccttacttggaccttggagatgatattgagctgaataggctcagagaagttgtaggccaggtcacttagataggacaagaagaaccacaagttgctggttgtgatgctttcacccagtagagatgcgaattcctaaggtggatggatgactaggtggccatcctccgggcccattaggcggagctgagccactgtaatagtgaggccagtgacttgataaggcagttcaatgagagtactgctggtagagatcaagatttaaaaagagatcctttgcaaggaaggctcatcgacatgtcaggaaggatctataggtaggtagacaatggtcagacagtccaactaggctcctcgaacacaaggatagacattcctttgcctgaagatggtaaaatctttctagacagaccacatggcaggattagcgagtccttaacaacaagagatgttgcaggacaacaagaaaactcaggagagagggcattaccaactcgccaaaccctagccagccaacatagtaactccctcacccagaacattcgagaacaagttgttctaaggcctagggaccctatttttgacaagatgagtcctaggataactgaaaatgcacaagacaatactaactcaaggagaaataattagaacaattttgttccacctccaaacaataatttaggttggtggaccagcaaagaaaggatgaccagccacagagggctggccagctaagagcatttgtccaaccatcaatctagccaagaaaggctggttgggaaagagcccaccaatatagatccatctgtgcaaacacaattggatcagagcagagacataatcaaaggcctattcgacccaaagctataagacctagagctagataggtcaaggggatcagtattcttagcatacattaatgcactacccctacctaagttcaagatgccaattttgaatatgtataccaaaaaagtagatcctttggcacacataaagtactttgagatgcaaacagatctctaaaaagtaactagagatgaacgatgtcagatcttcccagcaaccttatctaaaatagcctaacaatggtatttcaagttgccccaggaaggttcaactcttataatgtattctttcaagaattatatacacaattctcatcctcgagacatataccttcacagcttgaagaccttatcaaaataaaatagagaaaaggtgaacctctaaaagactacattcaaaggttcatggctgaggccactaaggttaaagccctaatagaagaaggtctctatatgaccatacttggaggtattttgtcactgagtgaattctggaaagatatcaagaggatcttgacaaacaacatgaaagagttcctcaagcaagcttattgcttcatatagttggaagaagatgtgtgggaagcccaagcagggagacaagttagtggcgggtagactcaaggtgtcgtgccacctcaagccctgtccaacatgcaggctagcacaagcaatacaaacaaggcctccaatagtaagaataatggaggtatatgcaccaacaacagctctgactaagatggtggcaaaaaagggaagttcaacactttcgttcacaaaaaaactaatgggagaaggaggagaaatacacatgcgtcaacctcctaatcaaaaatcctaaagtaatttacatggccaaccatgctactatcccatacaagaagcctcctcccatgaagaaggacatcaacaagagggacacttctaagttttgctgatttcacaatgatttcagccatgattccaatgagtgtatgcatttgaaaagagagactgaattcctaatcaagaaaaaaaatcctcatgtacaattatgtgcaaaatgaccaaactcaggcacaagttgcgtagaatagagaccaaactcaggcaaagacttaaatttttaccaaatatttcttgagtt

SEQ ID NO: 298395 - DNA, 6085 bp, Cannabis indica
aaaaaaaaaatttacagcttcgaaaatccatgccaaaacacaccaaatcatgtccaaagcttaatcaaacactcaaatcataaattaaaatcattactaattcatacaaagagttgaaacgcctgatatagctcaaatcatagcccataagcagaaatttcagatttaatcaacattccaaataaagcttaacatttgagtatgaattcaccataatcacccacaaaagagcaagaacacaagaacaaaactcaataataattcaagagctacatagattaataaaagaaccaatctaaactcaaaattcccatccaaaacacatcacaaagctacctacatcaatcctttaacacaatcaagcatgaattatcaagattatactaatttcatcaaacatgcaccacaagaacattcaaggcacaaaaatccaacttttttcctcttccatttcagcaacaaaactaaagaatcaaaattatagaaactacctaaagcttctagcaaagatcacactttagctccaccaaaatccaagcttgaactccaagtattctcaacaattaaacaaagtacaaagatagattgagagagaaaggggaatcggtttgagagaagaataaactagaaaataagacattcaataatgccaaaatcccctttgttgcataataaccgaattggtcagaagacctaaccctagggccatgttccacatgtaaaagcattttaagggaaattttgtcaatcacatcacaaatatactcaattaaatttttaaattaatcacacataattaaaatgccaataaatcatcctgaaatcgcattccggtcctgaacccagttcggcccgaaatactcagttgtgactataccgcgcaaacttgtcagaatacaccggaaaaaggacaaaacaagcatactatataataatatagtccataagcatgtaattcaattaattttatagttttctccttcttgggttaaaattactaaatttcccctagctcgcctacggagtcttagcatgtcatatatcatattaattcacatattataaattatatcataatataattccataattatacacaattaactagttagggtttgctaatccattttcttaatcctagggtattacacttttgatcagtatagtggcatgcttagagcagttgtcaatatctgcttgttgagccttcatgacttccatctctcaatccctccactctatgaaatgccatctttatttgtcaaaggcaagattgatagccactcaaacatcgtgatgggcatggtgtaggatgttaatgtggtcgtgcattaattgtaatgcatctcacaagttctgaagctcagtatatcctccaactagcctttgagtgtttgtggtggacgagacttcagtgccacgagtggtttgctcaaccaccgcactagtatttctagttttttgtacacttggagtgaacgcagcaagaggggaagtcattccatggcccactattggtggttgtgtattaacttgtctggggtagtccctggtagatctcttacgtttctagacgtctgcacgcttgcaattgtcaccatcagatggactggatcaatttgaactccctttcgaattttcacaaccatcttgtatcctgtaaaagacttaaaacaaaaacttctttcttgctccaaattaaagcaccaaaatattaactttgcttctatccaatgagagtgagtcttaattaaagcgattagataaaataaataatataaagcaaataactgtaaataaagaaaacactagaatttctataagtttggccccgtgatagtggtaatagcctactcccgtttaggttgacttatgagacaaagaaaaaagtattctctgtctaaagctcttacaatggatctttgagtaattctctattagatcactatttttgtcttgagtattctctctgattcaattcgtatcccccaatagtgaggtgagaccacattttataggggctcattacataggaatggcttcccttaatctataagaaagaaaatgggaaattaatatgtttccatgattataataggggaattaggcaagtcgaggctgattgcctttattctctgaagatatgaataatcccacgaaagtagggattagtttgtttcatgaaaggttggagatatccttgatcattgctgaaatttccaactcacatttcttggctggtgcatgcgagttaatcacacgatcaagctagtcggatgtcccttaatgactctatccgggcatcctactatgtatgtacaacttggaccttcatatcaatccttgtagactgctaggaataaaaccatccgcctaaggtggaaaattcaagacacgtgtcatccagctagatgtcacgtcatagtacaaaaaataggataatcttcctctcagattcttaactggtgataaaccgagcgaatgtcaatctttgaggagattctcttcccctgaagttgatggaataaatcatcaattatggctaatgggtacttgttcttgatcgtcaatttattcaattttgatattcaatacacatctgaagggatccatccctcttatttacatataaatctagggctccacaaagcaatacactggatcgggtaaaccccagattaagcatcccttaaagttgtaatttcaattctttcagttctaccaaagccattcgataagatgccttaaaaaaggctctgctccaagtgccaaattaataacaaaatcaattttaccctacggtggtaatctcggtaattcctctggaaacacatttaagaattcctttactatcttgacatcttcaagcctaaatgtttctgatctgttggagttaatcactacagctaggaatcccatacatccaatatgcaataaatctctagattttaacactaaaataatcgggagtcaagagccttgagcaaatcccataaacacaaatggttcctcattctttggttgaaatatttaccattttctgtttgtagtcaatactggctgcatacttagataagaaaaccatcccaagtgtaatatcaaacttagttaagtccaattccatcaaatcaacgctcaactccctattctcaatctaattggcataaacctaatccaccttttggagatgactaattctccacttggtaatagtgttccaaaccctatctcaacataatcgtagggtctacccatattaattactcttgatgccacatattagtctataactcaatagtcaaaaattagatagtacagggagtcattgagaaaaagctgacatgttaccacaaaaggactagctacaatatctgcttgagtaatggtattcactcggattggtgtgggtttatcctctttcatctgttcttatttctttgggtgagggcaatggttcttaaaaatgccccaccaaaacacacttgtagcacatctgttcgttgcactccccaaggtcatatttcttacaataaggacactaaggataactgtaacgaccttcaaagcagccctaacgaccacccctaccttggttcccttgttacctcttactctgactcgggccaccaggtgctagtggagtctttcttttttgatcaaaactaaaatcagcaccatccctaccaaaactagaagtaagaaaggtagtggtcccaccaatactaaaagtccctcggggctcttgaaaaaactctaatgcacccttggctcgaagatccttctctaccatctaagcataagtcgtagtgtcatcagtagtaattaccagatctttcttaatcttggcattaagcctaaccaagtacttctctttcttgctaaaatctgtgggtacaatactcgagtctaacttagcaagttgatcaaatttaatcgtatactcagctacttacatattctctccttgaaccagtttggtgaattcttttctcttggtactatgaaccacttctttgtagtacttaggattgaacagatcctggaattcctccttggtaattctagtatcatcccgagtaagggatactatctcccaccataccaaggcatccttctagaattgaaaagtgccacaagtcacctgatcattaccagtgacacccataaagttaataattttgtaatgtaagtcactttcatcacgccaggacattccaaaatgactggaggtgcttacttacaaaacctctcatctaaagcctccattcggttaccagcaataggatgttctgttgaaaacactagagcgggagcaactagcacttgctgaggaggcgcaacaggcaaaccctggtgcctcagcctctagatctctttgtcttattggtggattcaggcttgtatttctacaaacctttgttcccaatcctaaggagcttgtggttgattaacattaccatcgccatgagctcttctacgacctctaccttagccataaggacgagagggattctgacctacttggctgtctctagtctcaatcatattatcatgactcctcgtgtttcatcgagcatccattttattggactagcctacgaacccgtaagccaagtcggtcaaacaacaaaaatataaactaaataccacatacatggaattttaggcaatgcattatccaattaatacattattatcatgcttcctatcatgctttctaatcatataaattactaaacaagtaaagccttactgaaatgtgagtcgagcttgtctttgatgatgatattgtacatatcttgacagtctttgaaggacaacctgcagctttgataccaaattgcaacaccctacttgtttaggtatgctacattgatttctaaattattgtgccaacctttgctaattaaagaatttaacaaaaacgtgattaatttaaacttttaaaattaagataagatttactaaaatagttacatttttgcaaattccaggatcccgtatttagattgttaacattccaaagtacattatcttccaaaatgtctcacctagcaattataaaatatcagcccatgtcgtcccgaagaactaaatacaacaggcctaatcatcactatatgtacaatcaccagcaagatctggactcactgttgctcagtctttgcctttcttttacctacacatgaaaccatatctgtgagtcgataaatttagtaagaaaagcataaaacatataaacatatcacctacttgcaactaagcgcccatacacctacctacaagacttaatagatggatcaagaatgttcttaacaaaagtccatcatttataccacatgcaccgagtatctttctaatactagtgctagtagggttttctcgtacctcaagtaaaactgatcgttataccacatgcactctgtactcgttctgtactagtgttcgtaacgttgtgtcatattccttaacattatattgtataaatgcacatcatacctcaaccatactagtgttagtagtatataaatacataaactagcatgtataacacgtgcacatatcttatactaatattacctcattttcaaattcaaacttgaaaccaaaagttttcctgtcgatagatagcataggaataacctaaatatcgagaaaacaagaaatttttgattcttgaaaatacccccaatcgataaactgggttcccaaaatggtaaagtattttctgagatcctgcccgggaaaatgattcaccacttctggaaaaatggtggactatttttctgtagatttctcaaagcactttgattctcaacacaaatcaacccaaaagttcacaaaactctgtgaaatatctaataacactccaataaacataattctagcaataatagtaactaagactcagacatttagaaaacactattattgagcctagttttcgttcttgaacttaaacttgctcaacacctccaacatccataaaaaaacccgtctattagatcttaaacaaccccttaaactaagaaacaaaccctaaacaactttgggtaagacataaccaaattcaaaaattagcatg

SEQ ID NO: 298396 - DNA, 1810 bp, Cannabis indica
tatatataataaaaaaattaatttaaataatttttatgatttagcattttaaattatgaatattgttaacattttaattttacatgtaatttactttatatataagcgcattgtgagtaagcagtgaaaatgtagaaaaaaaaaaatgtcaccccacaagttgtggttaaaaggaaaagagaaatactaaaatgcaccgcttgttttaatttaataaatattatagaaaatagtactagacaccataagtgtctcataacaatactcattgaaaaaatactacataattaatttgtgtcacattaaacccaaaccacgtcacactttaatacaaaataatatggttaattaaccactaagttattaatttagatatgtgacatccacataatttttactaattaaaagaaatatcttacatgtatattatttggtttgcatgtgggtttagtcgtttattgtattaattattacgactataaatttcaatataatgtgagtcgtattatttaacacataacaaataacatttataataatattaagttaatatttataatcataatattaagtaagattgcatatatgatagagataatataaaatttaggtgcataggtttcatctaaaaactaattagcaatagaaaaagtaactcatccatcttatatattgtattttctttacatacattagcaatgtgagattagctctaatatcattcaataatttggataaggctttgtatgattttgttttttttaactttgtcggacaagttaatatatatcagtacgaggtattgaggcagaaagcattatattggcaataaagatcacatgtttcctatattaaggatggtgataaatgcactaagatttttttttcattgttgccaccatctggaataggcataatagtgtggagagtatcttgaatagaaatggggtctggattacggataagaaagccattgaaagggagttcacgactttcctgggagacatttttactaatccagtctagggtccgatggagagcttaaactatttaattttggatcgcatttcccctcttgatcaagttgaactagaattaattctacggcatgaggaaattagacaaacatttttctctatggaaagtttaaaagtcccgggaccagacggtgtgtctgttctgttttttaagcactattggaactcaatagttgcggatctttgtgaggctatagtggatttctttcaatcgggttctatgcataagggcttcaacgaaacgaatgttgtcttgattcctaaggttcccaattcaaagaaagtgccgcaattcaggcctatatctctgtgcaatgtggttcacaaggttatctcaaaaatcattacaaataggattaaactgattcttcccaggctaatttgtcccacataggcatcttttgttccagggcagaatattcaagataataatgtacgggttcaagagatcatccattcatttaagctcaagaaagggaaagaggatttctttgcgctaaaaattgatcttgttaaagcctatgataagctaagttggcaatttattgaccatgtactccaaagttttaaggctcctgacaagttttgtaattaggtccgtcagtgcatctcttcgacttccttcaatatttgccttaatagaggaactgttggcaagattgctcttaaatgtggcataaggcaaggggtcccctttccccttatcttaggggtatgtagaaagttatttaatccaattacaaccgaccgatctaattccaaccgatccaata

SEQ ID NO: 298397 - DNA, 2776 bp, Cannabis indica
ataaaaagaccatataatctgtaaataaaatcaaaaaaaccgtaaaaatatttaaaattccgtgaaaccgtatttttgtaatttttttgttatttttatatttttgtgaaataaaccctatgaaaatcatctcaaaaagttacaattatcagggccgtctttatggtagggccgtctttaagttttttattttattattactattattattgttagattagctcataaggagttaatttttttttttttgagaaatgccaaaagacaccagtgttgccaaacaccttcctacatgtcaatatcgctattggtctaattaagtattagatcccatatagtttaatataatagctttaaggaagtatcgctaaccaatcgcaagacgacatgctttaagggtgctaggcaccactggtgttcaatagcaatgctcttttttttgggttaaaaaaacgtttttaaaaattatttgaatttcattttatttttccaataagaggcccatttttaacttttgtcctagcaattagaggcggcccgtcctaataattataggtccccaacattaatcataacttataaaaataaagaatttcattgattgatttggagtggaacatcatttctttcaaagagagtttgaaggtggcttatttcttggcaagagccttttattttcccacaaactgtcattttatttctacaagatataaaaaccaatattaatgatcttaaataagacctaacttattttagaattgaaagcatctccaaatttaactttgaataaattgggctatagaatcctctctcatattatataatagtaacaatgtcaatcacaaaattaatgatcatcataccatacaagttaaactagaatacaaccacataagatagagtacatgatagaacttctttaaaaagtaattatcgaaggagtatcttttcttaacaataagtgtatggaatgtattttcctaattctaggaataaactaccaaaaacaatcaccattatcacgcaacaaagtgcttacatattaatcaatataagacaaattataattacaattgagtgtcttaatcacattatttgaattttgaatcatactatatatcatccaatggtacaaggcctcctccctcataaaacatgctcaaacaaacaaacaacgtcttgttccatcccatatatataatttctaaccactctcctaatgaccatcacaccaaattcacataacacaacaatattcatattcaattttaacaatatccaactcttatgacttaggcaacttagaatttatatttcaatattatgacaggaataataaaacttaattagcacataacatatccaaacaaattaaaagaaggtgaaatgatctcataacaaaaaaaatctataaaataactttaaatttgttaagtatacatgactcatcttaggtaaagatattattaaataaggttttcgtagataaagacataagcaggtccacgttgagcctaaaaagaactatataagtttcatcacaattgtaaccactagtaagagaagaaattgctctaccatcattccacttggctacaacttgttatatattgttttggattatatttagcccaccttgatattacatctttaatccgttacaaaataaaggtttagccctatataaatatcgactctataagtactgctatgaccatttacttgaaatattatttaatttatttattatcatttcggactataatcaaacaaagaaactcccaatttactacgtaaatgtcactaaatgatattaggagggcataccaactcaaatttgtagtggtttttcatttattgaatttttagatttcggtaaattataagaaataagtttagattattcattcatttacttagttttagctagaagtaattctaagagttacttttttttcttactatctaaaattgagaaaggaatgataataatataacagtataaatattatataatgttgaaattaagaatgtgggaataaaaaaggtgataactggaataggttggaagtgagcaaatgacagttggtaagaaatctcctttcccaatttggtggagatttctttgttgtttgagttcacctcccttagtcacaaactcatggtcatagcaccttcgtttcatatagttttgtcttgtggttgtggctgcctttaaggaccactccacattcatgatatacatatatcattattgaaccaaaataaacccacaaaatcttcatatgcaataccaaaaaaattaaaaataaaaacacaaactacaattctttcttctctttttagataaaatagaagaaaccttccctggttacaactcatcattttcattcattgcctatgattcatttttcaacactgttttatccctaatatatataattattgtctatccacatgctttttatgtagggactgtaaaagagatattggaagttgtaacataatataggaaatgtgcactaagttttaactcttacttaaagaaaattattctctaacaccatgttaatggttcaatattaattggataaattataaaattgagtagtcatgcacaatggacaatacctatacaaatttagtaaagaaatattacggttttgaattataagcattgttactaagcattaatggtgcctagtacatttgcgatatgtcgtgttgcgattgcctagcgatactctctaaaagctattatattaaattatatggg

SEQ ID NO: 298398 - DNA, 836 bp, Cannabis indica
aaacattttaacttttggaggaatattgagacttaaaagcttcttctaccatctcgagaagccatgagactgagtaggtctatcactttccaaacaacgagaaataaaccagcaacactcttaacagagtaaaaatctaatggatcatggtcctagatcaatttatcattagttggagaagagggccaaggtatagaaagcatggtagaggtttcattaggagaaaataaacgatgaaccaaatccccatcccaactgcccaaattagatctccataaatccattgtgcttcaaaccccaagtaaattaggagggaaaattaagaaaccaacatttaacgggatctaattatctttctaaatttttcctaatcaaataatttcttaccccacagaatgttcttccaaatataagaacctcttttagaagatttaatagttttaaaaggtttatttctataatactaacttttttaaaatcaaagttgccaaagagggatcatgataaagcctccaagcttttttagccaataatgcttgattgaaaagatgtagatctagaaaatctatactaccatcctctttgtgccaacataatttgttcaatgtacaccaatgagttttcatcttgacgtcatcacccccactaaaatcttacacacatgcgatgaacatttctaacaaaacgtttaggaagtttgaaaagagacatagtatatgttgaaatagattgaatgactgctttgttgggttttatgccctaaataaaactcatttcaatataatcagatttgcttattaatatagatcagaaataacatttaatgttgcatggtt

SEQ ID NO: 298399 - DNA, 6349 bp, Cannabis indica
aactaagcgggctttacaccatcatttcataagtttatttaaaaaatgttggaggaggcttcattatccaccatgcacctagaaatttaatgttccttatttatgcagttataaccagagggtcattgtgagagaacctgacctggttagcatctccatctgtaaaggagatggtaggctctccaagcatgagttgcttagagtctctttcttcgatggctaggatgtcgcttttggactcatgacgaagagtttgagcatagcgctccctacccttacttttttccactggtggtggcatcagttctccattctaggaagcttgtgtcttagcttggttattctacacgtaacggtgcaagtggggattgtttttccttatcaagaacttaatctcccttttcaaaagtagacactcttttgtgtcatggtcgaagtcattcggaaattggcagaacgtgtacatgtccctcttactgatgtccttcttgataggaggaggcttcttgtatgggacaattgcttaagtggccatgtagatggtctcaggggtctcagttaggagggtcaagtaagtgtacttattctcctttcctttttgcttttatggtgtggggaaagtattgttcggcccttttttcccaccgttcttgccagaattgtcgttgttacgcttgcctccattatttttgatggtggaggcctggccgacattgcctggactggtttgtaagttagacaggtctttgggtgtcatggcacctagagtctgcctgctattgacttgccctcctatatggtcttatcagataggttcctctagttttatgaagttgtcaacttattcaaagaactccttcatattgttggttgagatcctcctaatatctttcctgaattcactgaatggaacgatgccccccagtatggtcgtataacgaccttcttttgttaggccttagaccttagtggcctcagccataaacctttgaatgtaatccttcaaaggttcaccttgtctttgttttaccttgagaaggtcatctagttgtgattgtatctacctcgaggatgagaattgtgtttataagtctcgagagaattcattctaggaattgaacctccctagggccaacatgaaataccattgctgggctatctcagataaagttgccaggaagatatggcattgcacatccccaataaccttttagagatatatttccaactcaaagtactttatgtgctaggggatcttctctcctagtgtacatctttcattctagcatcttgaacttaaacaggggtaaggaattaatatatgtagagaatggagatcccctcaacctatctagttcagggtctgatggttttgggccagctacaccttttatcatatctctaattttatccaactgtgcttacacaaatggatctattatggtggacacttgttcgagtggcctttcttagccagtctgaagcccttgggcagccagaccttggtcagccataccctatcttagggtctatccatggacggccaacccatgactaggcaattggccttggctggccatccctagactaggtaactggccatggccggccagccccaaactgggtagtgtctggatgactgttcccctttgattgcccaaagcgacagcgtgttgataggaggttgatcctaccaatttctcgcgtttgttggatccacctgtttgaagttattgttcagtggtggaacaaagtaacttcaattctcactcctcgagttgacattatctattgtgttttccacttatcttagggcatagtctaacaaagataggccttagaatgacttggtctcgaatatttttgggaggaaaatcatacttttaaacagagaaaggctggccgattggtgctgttaccgagccaagaatgcctggtcctcctctaacaccacttggtgccaaggattgcctattcctgccataagattggtttcgcagaaattttccatcttggggcaagggaaagtttgttctcattcccaagggacttggtttggctcttttcctgttttctacttggttgtagactctgcctgatctatcaatgagccttacttgtaaaggatatcttattagatcttggcctatccccatagttctttcattcaactgccttatcaggtcaccacattcctagttacgacagtttagctctgcctcatgggcccagaggatggcctcccagtcatccatccaccttaggaattcatatctctgtttggtgaaagcatcgcaaccaatagcgcgtggttcttttgattggtcgacctggtctacgacttctctaaacctagccagttcgatgtcctctcccaggtccacatgagactcaccaatagttggctctctaattcttgggcatgcttcgcccacataatattaaggaatagtccttcttttactccatagaggttgctccgtgttaacacatccttctattcgaggtgctaccgattgatatgttctgggtggtaaaggctattcactaggattagccaggttagcaggggcaattggattagatgtattggctaagtttcttgggcttgccaagttggcaagatttgctgcatcagtcaagttcatggaaactccagtggtggtgggaacacgcacattacgatcaatcgtcatggggtcttggggaagacctaaggaagtaaaagttttagttgttcttgttacaaccatgatgattcattaggttgataaataatgctctcaatgaaagaaccaaaatattgatctcagatttggtcaactaacaacagagctttatttatgttagacaatcaccacgtgttattgatgtagccgaataatgaaataggcacagtgatttatagaggttcaacccctgtgattgccaggtaatgacctactctcctttttcttgtattgattcaagagataataccacaccaattacaagcttttaccttgtaatttctagcgtggctctctgagaaaattacaatagtgggaacaatgtaaggcagatctcgaacaagtgagaaaaggagacagactttttgtcaatgctaaaggtacacgagtgagacagagagagagagagagagagagctagggtttcgagattagaacttaggattttcatcttggcctaatgcactttctatagtttagagcttacaaaagatctacatttaaaatggactaatatctctcaaaaaggggagacatcatctgttatcatgtatttaaatatacaaaaatatagctgattaaatgctcccaaaaaataggtagatatttggggttaaattcctatttttgtgggttaatgaagtgtctttctagctggaaacgagctacgatccgtccagagtgaaaactgcagaaacaccaatcgaatgggcttctttttggtagtcattatgggttatggctagcctaccctttagggctagccgacacatgacatctattagtcggccagcggtgatctggccagacgcttcttgttggcaattttcctgtaaattcgttctgtttgagcatttggacccttggtcaattgataagttgtgcatggtgacttagctcattatggacaggttgtacaccacatggaatcaatcctgcctatgtagacatgctacgtcatgtggaaaaaaaattgggataaaaattttagttttactttacatttactaatagttttaattataaaattataaaacttcgtattatatttggattttgttatcattgtactgtatatataatttataaataaatattttattattattatcatcaaattatcagattgttatattcatgtttacatcgtgccttcaggcttattattttgtatcgtgattaatcccatatgtttcatctcatatatcattttaattgtagcattgtatcgtgtgcacaaatcccttttcttttatactaactcatgtattataaactcttgttataacacacatatatatatatatatatttcttattttgttgctatgtcaaagagcatgaactttgtgcatgtcatagttttgttgtcgtgccaaataacatgactcatatttattgtttttgttatagcatgcacatatattacttttttaatttattttctttaaaaaagtaatttatagtatcaaaaacaagttcaaaatatttaactgtatatgcatccctatattttttttatacgtatacaataaattatttaaatgaatagatatcacaaattattagaatggattagatttttattatgactctaatatagacaatcatataaaaagattagagttttaatttctcttaatgccaaaaaatagacggccttacaaaaaaaaaagacactctaactatatagttcttcctattcaatttctatatttgtaaaatatcttattgctcatctgctcaaataatatgttgaaacacaaaagtatatatataaagaaaaaagaattagtgagagttaatttggcgttgatataaacttaaattagactagctaaaaaataatagaacatgaggatataagtgttggataataagagaattttagagagaatatttaaatgaaataagttatattttaaatcccaatttgtataatttttgacttggtacaaactagtgggattatatctctatttataggactttatggactaatcgagaaatattactacatgactagcttctacatttttctacataattcccactactaacataagtgaaatataattctatcaaaattcaagagtactcaaataaataagaaaactctagacactttattagatataagaatagtctagaaattttagtaacatcaagaaaattttagaaattaactatattaaatcaagtataatattttaacacccctttaaacttaatttgtgactcgaataatactttgtagtttgattaatatttctctcttgagtggctttgtaaaaatattgttgcttcatcttgagatatgacatattctactcttacttcttttctactaatgcattctcttatgtaatgatagtgagtgtggatgtgtttatttctttcgtgaaagactggattccttgctagtacaattactaatttgctatcaacacaaatctcatttggctcctcttgtggcacgttcaaattcttcagcaactttcttagccaaatagcatgacaaacgcatgaagttgaagcaacgtattcggcttcacaagttagtgtaacgattagttgcttttttgacatccaagtatatgttgtgtttcccatgaagaacacaaatccagtggtgctctttctatattgtccaagtctgcactccaatcgctatcactatatccaactatctcataatagttagaggatgaacaaaatagcccataaatggtcttatctttgatgtaccgaagtaatttctttgtagttttcaaatgagttgttgttagagcttctataaagcaactaacgattacaatagcatagagaatatctggccttgtacaagttaggtagcgcaaacttccaagtacacttttgaaaagagttggatccaccattccttattcttcatgctttgacaatttttttctacattctactggtgtgctaactggattagaatcatctatcttgaacttcttaagtactttcttagcatagccttcttgagtgatgaaaatgtctccatgttcttgctttacctcaataccgaggtaataagacatgagcccaatatctatcatctcaaactcttttgccatatctttctttaatttctcaatcatacttgagttacttccagtgaagatcaagttatccatatacaatcatacaatcaagataccttcattattaatttttatatagagtgcatgcttctatggacacttggtgaaattcttgtcttgaaagcactcgtcaattcgagtagtccaagctcttggtgattgttttatgccatataaagccttttttgacttcaaaacttttcttttatgcccttttacatcatagcccaatggttgcttgatgtggagttcttcctcaaggaaaccatttaagaaaataaactttacattcatttggtggatctttcatctatttttactgctaaagaaattattagtctaacagtttcaagacaaccaactggagtaaataccttattatagttgatgccttccgtttcactatagccttttgcaaccaaacttgctttatatctcttcaccttgccttttgcattcttcttttccttgtacacccactttactccaa

SEQ ID NO: 298400 - DNA, 3274 bp, Cannabis indica
  modified_base (3162)..(3162): a, c, t, g, unknown or other
ttgcactattgattacatagaacactctataaactaaatatagatacgctatgaattatcaattatttcaattgaatcaggctaataagttccctgataagcttgtcatcttattctttatatgggctttccataagattagagttagatgagatgggccaaaattaaagacaaatgggcctaaaatccaagccatggccaaaatggacatagtggcccatggactttgatttctccatcttatttcaattaagtttaaataaataaattttctttttccaattttactattaatcttatctaattatttaaatatcgattttcatttaataattaacaaacaaaatcataatttaaatatatttatcaattagatccacaaagtgtcttaattaacaaataaatatgtatttctcttttcttctcaaatttttccaaacttaatgaaaattctcaagtaagacattctatgtttgaattctagttgacttattaaatcaattaaatgagtctataagacaatattattttagataatgtgggaaccatagacctatgaaattaagctctcaataagcaaatcatctaaaatttactaagtaaatttcctaacttattaattcctcccgactctactatatagatttgaaattgcactattacatagaatgctctatatacaaaatatagatacattatgaatgatccctaattgtttcaatctaaataatcaatgatcctctatagacaatttacatcgagtagacaaaactactgtgttacccttcgatgtatattttatccttaaaacacttagcttcttataaatgatatttcagtaaactaatataaataccgaaataagaactctttcatttatatcgtttagtcaagctctaagaaaactattatttcacttctaaataattatagaagttacatattatatatttatgattaaactccaactcatttacactaccaatttcctaagatgtaaatacgggctagtcctaaagataagctggtaacgaacaagtcatcaaagaacttgtatagtacaattaagttaaagtttaatcatcttaagattgagatcaatgacctaagatcaacttaatgacattgacttagaaaaaatataacggtaagtttatagtatcttttccactgttaatatcgttacagtctgatgtatagccgatacatctgatacaagtttacgtttttaatgccctgtaaaagatatttcacttataagagtgtaagcaaactacaatatcgttgattatcacatcaatgtagtgtactgataaattatggactaaatagtttgaagcatataataatagttattttttactgtatcgacaagacaacaatcatgagtaactacatgttcgagattaacatataattataaaaataacatgtaaaccaagtaacataaaaatatattatgatcttttattgattaattagtaaataagttaatattgaaatgagttttatttagggtataaaccccaacaccaagatgactatgatcaccactataaagtgatgttttataattggttagtaattctctatagtttttattaaaataaaatatatgagattcaatataaattgcatcaataacgatattacatgttatattaatatcacatcattattgacttgtcaagagagagatcttgtgttaataaatgtaataaatgtgttactaatatgttgtattaagtttctcttcttcatcttctttaattttaaaatataataatcagtacaaacaacaaattaatttggcaagacatatccaatctcgaatttaagacgaatgttttgtttatctatcaagtgtataactctattttcagatctagacttaaattgcacccctaaagaaccaagtagcaagttcaaatttcaatctttcaataataataataataatattttatttacaattaagtaatataataatattataattaatggccatgcatgacacaatattgtgttgaaaaatcaaggcatataaataatgcttctgtttttgttttttgtagtaaattctgataggacattggtagttcaagagtcaggcatttatttatttttctgaaaggaaaaagacttaaatctgtatgtatagttagtaaaatatatggttttaaatatttttatatatataatgtaatatataacatgttattttatttataaaggtgaagaaaataataatgacttggtagatatatgttgaattgtggttgatcaagtgtggtgtatcctttttttgcaacattttccaggtatagtgggtgtgtttttttttttttaattaaatttaaatactttacaggtgaatatattctaattgttattaatttctttgtctcaataatgcaagttgtttcttcaattaataatattaaatatataaaatattctataattttatgaatgtagtaatctgtcgtgatcacatgcaaaatattatgtacgttcttaattaattaaatacattaatattatttatcttttttatgagaataatgagatggttagattagatatatcatatatggtacattatatttatgtaaatgtttatatttatatgatctctctttaatgtttattcatattcaatttaattaacaagagaaagtggccctttagccagatgatttcttctgtcaaaaagtgtttttatttggacaaaagaatttcaaaaatataattattaaaaatataaaataattaataataaaagttaaattagtaaattgatcgaagacagaagaaaaaaaaaaaaaacttatatatatagttgttgtagtagtagtgtatagaagttagctacattggcttttttaagttggaataactaattaatattttatttttaatttaattttgttatgggaaaattataaaagaatataggcagtaggattattaagtatgcttaaaaaaataatatgctacattgtataatttttgtggtaacatatttttttttcgtaactttttttattttttaaaaaggtaaaagcctataataattactttttagatacaagtgcttctttttttgtttttgtttttgttttttgtttttgtttttgttttttgttttttgtttttttnttttttttctttgatcacatgcatggatgttattacatactagctaactatgtttattttatttttggtatagaagtcatgtagtatttttgtagagtgacaagtgagtaac

SEQ ID NO: 298401 - DNA, 2682 bp, Cannabis indica
acggtagcattctcttctacttttcattcaaaaacaaagaaataaaactcttataagcaagctctcataagaactgaaatgtagaaaagaaaactacatcgaatgctataagactagaacaaaacaaacaacatcacagaacaatgcaacaaagactatataagaccaatgactgcatatagatgcaattacagaacgacaaagcacttgaagagtatttttttttctattttggtaaacaatgaaaaaagagaagcaactagcaagtaaggaacttagtgatcactcatgagaaatggcaacaatttgttttccaacgttgcggccaagaaagaggccaacaagagctgcaggggcattctccaagccttgaacaacatcttccacatacacaattttaccttgtttaattgaaggtagaataaattcaagaaactttgggtagagatgatagtagttagtcactacaaatccttgtaatcgagcttgtttagtaataaggttcattaaattatgaacaccttcagggtactcaagattgtactgtgagatcattccacacacagcaattcgagcattgagtctcatattcaataacactgcatcaagcatctttcccccaacattctcaaagtaaatatctattccttccggaaagtacctgtcatgacaatattaagttttattctcttttcattacaagtttacaatgattaaaaactatcatcaacctttttaaagctgcatccaaatcagcctcttctttatagttgaaagcctcatcatatccaaacttgttcttcaacaaatcaacctttcaaacagtaacaagtaaagagagcacttagacagaattttatatatatgtattagaatttgggataatgtgaatgaggttggagtaatctatttatcttatatatcacaatttattttcacacattagcaatgtgggactaacactggaaactggcacacattggccgaaaggtcgtaaatgaaggttaaaggggagactaccatgttagaatttggagataaagtgaatggagttccatctcaaaaccaattagcaatgaagggagtagcccatttatcttatatatgagaatttatttccacacattagcaatatgagactaactctagtaatatgtagtactatatatagtcaacaatatatgcaattatactcactttttctttagttccagcactgcccacaacatagcaaccaagcagctttgcaaattgcccaacaagctggcccactgcaccagatgctgctgacacaaatacatattctcctttcttaggagaacagagctcatagaaaccagcataagcagtcataccaggcatacctatacatatattcaatgaaattattccccaaaaccaaattgattaatctcacagatagagaaatcttaccaagaataccagcatagtaagagaggggaacatcagtgtcatgaattttgaaaacagactttgttgcatttataacactatattgctcccatccagttattccccaaaccaaatcaccttctttgaacttagaatcccctgattccaacacttcagccaccccaaacccactgataggctacaaacaataaaaaatgggttgatatattaatactcaaatgaattaagaaatgtgacaaaagaaccacaatgggtgactcactcaccgaattgggcttgaaagattcagcataataagtggggtcgagcagcttcttcatacggtttcgcatataaggatcacaggaaagatagagattcttgactaagactccattggaaccttgaggaagcttgaggttgagagtagaagtggttgttacatacatgtctgattcttttgggtaaccagagacatagtctctcagtaacacttgcttgttcttcacttccgccatgagaactctcttcttctcttttttttttttctgaattaagattctctatatagtatatattatatataagtatattgttgatggtgaaatgaatcatgaatgacgtaaatttcgaagtgaaattttatggaatgtgagtgggaacacgtggcggaaggagatttgattgtgatttgtgaatgcaaagaaaggaatgaaattagatagagcatgctttcttttcggacggaaattgatttgtcaattgtatgcattgcatgcattcataccattttggaattattatttatttatttatttatattaaaaaatgaattactctctataataattattattatttgaaaatcattatttcttaaaatttcttaaatgttctctatctaatatcaaaaattatttgagttgagaatgtcataaccataccaaaaaaaaaaaacttgagaatgtcaaaaagtgattatgactgtatattacttgttcttacctgcaaagattatagtttaattctatattgaccttattaatttgtatttagtagtgtaattagtatttattttatagataagttaaatatttaaagttgatttaaaaaggtatttttttcttaattaatatgtagcaaatctaaaagatatattaataagatcaaatactctattttcatgctctttgatggtcttgtatgagcatattttctttaaaaaaaataatgttatattttgatataatatttttgattgattaaata

SEQ ID NO: 298402 - DNA, 2367 bp, Cannabis indica
aacataatgagtggtctcaaaccccagaaggaagaccttccattggggaaagatgattggatagaaagttatgagatttgagaagcggtttaaatactccactttggatttggtcatgggtgtgattatgaatgtgacatctccaatggtagcatcgtttaaggatgctaaaaatttacttatcaattaaaaatataatattttattttatctttcttccacattgtttttggcactgttacttctaattaagaacacttcaatgtataacactatttaaaaatgttataattataatttcacacattattatttaatatatatcctaatttttagctataataactttttagctttcattttttattaaaaaaataatgaataacattaatgctacaacataacatttcaatattttaccccataatatgtctaccttaccaaggttcttctaaaattttactactagagatgctctaataaaccaaggatacattgatatgtgtagacaagagtttgatgatttctccatacttattctgcatatatattttgacatgttgatgtaattttgagtttgatgttcctaacctatccaatccaaatttgcttcttcttcttctttttatttttttgaaaaggacattctttatttatattcaatatttttatcttcttccccatatgaggcaatttctctaaaacaaaaatagcttatttatttctaagacacgtgatgtagtgaatcattgataaatttaaaatttcattgtaatataatgatataatataatctatataatatgctatatataggttgtaatttgttattttgctcacgttataattttgttttgttttttttttttttttttattcaagcgtttatatattacatcatgttctacctgggactcgaacccaggacctccaacactcacacacccacctatgaccacttgagctagccccaagtggttaacgttataatttgttgttgaaaattgagtgcttatacttaggataggattcattataataataatatatattaacattagtataattaaatatggaattttatataatttaatttaatatttaatataaaattctgttggaataaataatagatttagtagcattattgttggaattagatatgttggctataagaatttgtgctggtgtaaaaaattctgagtaagaataagtgtcagtggccaattttgaaatagaggaaaaaggaaaggatgtctcatcaaatatgatttttcttgagatgtagaatctgcctgagacatcaagacatttgtatctcttatagtttaagttgtagcctaggaatgtacatgggaagacttacagtggagcttatgtttgttgtaaggtctaatattagggaagcatttgcaaccaaatgtctttagagtggtgtaatctcgtgtgataccaaagagcttttgtatgggtgacacattttgtaaaacaggtgtgggcaacctatcggataggtagacagatattctaaaggtttcatcctaatatttaagaggcatggatgcttgagcaagaagtgtgagaccattttcaacaacatgtctgtattttctttcaaccaatccattttgctcatgagtggtggggcaaggatgcctatgagtgatgccaaattgttttagataatcagtaaaggacctgaactcccctcccccaatcagtttgaagacatttaatctttttacctagttgtgatttagattcagttttgaattgcaaaaaggtttttaaggcatcaaacttgttttttagcatttatattcatgtgaacctagaatatgcatctataaaatggatgtaatacttgtaaccattaacagaatttgttttgacagggccccatagatcagcaacaactaattgtaaaggctcagtgtaaacagtggatgaggattttagaaatggaagcctgtgaattttgcctaagcagcatgcagagcaaacagacaagggatttttattgttgaatgttatattacaacattaaagtacagcgttgacaattttttcaaaggggtggctaactctattgtgccacaaatcataatctgagatttgagatttattacagtgagtacaactagtagaatttgattcagtgctaggtgacacagagactgttagcacacttggaacagcgacaagattgggtgattgcacatgaaattgagaaggcttaaaagtatagaggtcattctggtgtgtcccagtgagaatggtggcttaagtttcctgatctttcacaaagcatttatcaacatgaaaaagaaaaaaatacattgtatcatgagcaaaacgagagacact

SEQ ID NO: 298403 - DNA, 3293 bp, Cannabis indica
ttcatatttaggatgttaattcaacatacttgttaataaatctagatcctagtaaaatattcccaacagatgtccctgttattggttttggggttgttgtcaatgctcaatccttatgtggccgatcaactttgagctctgataaaggaaaagggaagattgtagcagtatccgagtcttttcagataggtagatccttggacattgctttaactcaaaaagtgccaaattatagaaatactacttgactaacgcctctgctttcactttctcctactaaacactttcaggaaaggactaaagttataggggtggacaaaggcaaagctaaacttgttgaagtggctaaaaaatacaagaaataaattgttgtctacattactcatgtcttctgtgacttactgttcttctaccatcatttctaatttacttatttctagtttctttatgttaagtctatatgttattcagttgtagttattgcgttagcaacttattgtgtgctgtactacaattattctttattcaaccttagcggcttcctataaattagtattgctctttaccttccttagttatcatccaatgtataaaaaactttgttcaatcaatctttttctttattcttgtgtcttttgttttactatcagttatatttatttatatcaataaagaagatgttatctgtttctaattatacccgaattgaatgcatgttccactatacatttacttacgattattattctttaaatgcagtaaaagcattataattttcaaataaaccttctaagaatacttataatttataatgtgttctacttaatacatgttataattttaaatcatattgatctacctcgttttttgtcagtataaggtatatgattcttaaattataaacacatgttttttcaaaaaataaaaaataaataaaaattttatgatcacaaaaagttttatgaataaataaaaaaaataaaaagtcttttccaatgaataactactttcatttcagttgtcctcaaaaactactaccatttcagttatatatccaaatctctaaaatgttaaacttgacagtttttttaaaatttaaaattcaaatattttaattactctgtcttatctgaactaattaatcggttaagttatcctacaactgacagttacccattctctctgatattcaaaaaatagataaaatctgatgttgaaaccttatctaagtattgtgcttgttgcagggctgctttcttctcctctgttctaaaattcattttccttcttgttctccatttttttctctattttttaatatgatcatacaagcctggaatggacgtggattaaatagtaagagcatgaaacgatttttagatttgcttctcaaagattgtcgtccaaatattttatttttcaaagaaacacgtttgaaggcagggtctactcctgttatttgtaagaatttttccttttctcatggctatgatgtgcctagtattggtttaagtggggtcttatgatattatgggactcgtcagttagtttccataattgatgccaaatagaattatattaattgttggctaacaatgtctactggcacttcttcattccacatttgggggctttatagtgaaccagccacttcaaatagacatttctcctgaacattgtttagacgattaagtgattttattacaggatcatggttatatatggaagatttcaatgaaattttggggctaagtgacaaaatgggtggtgtaacttgtcaggaatctcagatgaactattttcgtcaagctttagaagagagttccttgagccctttagactttacaggaactcgttttacttggaagtatcgcactaactcagaaacggttggattcagctttagttaacttggattggagagctaattttcctgcagcaaggtcatctcatctagactttttcggatcagatcatatagtgcttagtcttgagttaggattatgcccaacttcttctttgacttcatgtaacaaagggaagaggtttcgttatgaagccttatggaatgaagatcctaaatgtcaacatataatatctaactcatggttgcctgtatctgagttctctagcttagatactgtaatcacaaatatagcctcttgttctgaaaatttagattcttggtacttaaaaaagtatagtacattacctaaagatattcggtgtactaaacggaaattgtctacaggacaaaatgttgatcatgatctgtataatcaagaagaagtttctcagctcgaatcttatttgtcatatctcttcaagaaagaagaaatttcttggcaacaaagatcaagagtccaacggctacaggttggtgaccaaaacacaaagtatttttatcgtcatgctagtgctagatttcaaaacaaccttattcaaggtagctaaggctgacatttaattggactttatgcttaatgatctgctatacatttttttgcttaaaatgattttaaattaattatctaaggtgtctaaaggtagaactctaataatttaatgatctgctgtacttacatcattttgattttagtctctgttctatttttttcaagtataattatgtgttggtaactgcaactattgttctatatttggttgtccttttaaaaccagttgatatgttttgttttattttgtaatttttttttcactagttttcacatatatatacatctaagacattttttgactttaatatttgatcagtttagaatgcttttataattattaacacctaattatacatcaataagtaaaatcataaattattctctacttctctactactatgtttctttaatatttgatttcataatgctttctctgactaacataattatttttaaaagacttcgcataattaataattagccacacacccttatattattaatagttttatcatcatgacttaaaatatcttatcattattattcttctttttttttttggcaatattatcattattattctttaaaatcaagcagaataatacattaagttagaaaaaaagtccataaacaaatactacaatctcatattgaatttgcttaaaagaacctacaaataacttttgcagtgcgaacttcgcacaccacgtaaaatccatacaatcaaagcttttcataggtgtcgtttggtaatatttttgtttttttaattttttaatcacaaaataaaagtaaaatttttgtttttaaaaaatttatttttaaaaaacaaaa

SEQ ID NO: 298404 - DNA, 1836 bp, Cannabis indica
ctaatccaaattactaaagcggtcattacatattataatatatattattctagttaataacatatatttatcatattttaatttatattagattattaaataatatatcattaataccattaatatctcacttgagagaaaattaggagatgtactcatacatgggtcacataagttaggaaaaggtttcagcaaaaaaaaagttaggaaaaggtcaaaaacaataagtcaatattaacaatacccattctccatttaaggtaaaaaaaacattttccacgttagtgcctttaaaaattactgactgctgcgacaatgacaccattacgcatattgaacgttaacattttgtttctgattcatcgtgacaacctccactcatcttctttcacacgcgttaaccatccccaacaaacaacaactgctagctgatcagattattatatttattatatttatactttaaaatattttaggttgtcgtttggtatttttatttttaaaatttttaattattttaaaaaaaattttttaaaaagaaaaaatgtgttctataattatttttattttttatttttaaaaacaaaaaacaaagtataatctgtaaattttatttttatttttatttattgattttatttaagtcaggttcgggaccgggaccgatttcagggcaaggttgatcagggtctaggtcaagatctggggtccgggttagggacgggatcggggtcggggtttagggtttgggttcgagaccagggtacaatcgattttgggtctggggtcctgggtacgggtcggggtctagggccggggtgcggggtgcaagttcaggtccagggttgaggtccgagctccgagctccgaggtccaaggtccaaggtccaggtctggttcgaggtctgggtctgggtcggagtttgggatctaggtcgtgtttgaggttcgggttcggttcgaagtccgagttcatgtccagtctgaggttcggggtcaggttggggtctgggcccaaatcagagttcaggtctagggttcaggtcggggtctgggattcaggtctagggttcgggtcgggggtcgggggtttggggtttggggtcgagtttgaggctggggtcggggtctagtttagggttgggtttggggtccgggtctagtccaaattattgataaaaataattagatgaaaaacaaaccaaataatcaatcacctaattcttaaatcgtttgacataaaaattaaaataaaatcagatgaaaaagattgcacagttaaccttaagaatatctatattctgtttcatccaccgctcagaagacacaacagtagaaactattacagcaagttcaaccttgtagcttgagcactcaactattatgtgaggtacgtaactggactactaacaaccatttcagtcacaaaaattttgttatttccaaccatgaacagcggtttaatggcaatattgaagaaagaagaaccaataacgaaacaaacaaaataaaaccatgtcatatagacaagactaaaaaactcaaaaccatatcacacagacaaactaaaacactcaaaattatgttacaaaaacaaaattaaaacactcaaaagcatgtcacatagacaagactaattgcagtagaaaaaaatgattgatagtagcagataacaacccaagtcaagccgcaccaagcccaaaagaggtcagcgggcctggccagagaaataagataaccttcgatagctataaatttaaaaacgaaaaatcctagtgcatgtttggcatcataactaaaaaattgtttttttgtttttaaaaacagaaaattgtt

SEQ ID NO: 298405 - DNA, 2814 bp, Cannabis indica
ataaatattttggactccgacccttgacctttagaccaggctccggcctcgaccccaatcccagacacgaaccacgaccctgagcctagacctgattatagaatacattcttattttttaaaaatgcaaaattaaattttatttttatgattaaaaattttaaaaataaaaatgttatcaaaaacttcctaaatttttctatatttctaaaacattctatatcttaaataattgtgaaaaaaaaataaaattaaaatttttccaaatacaaaacatacatagtaatatgtattggcacactcttttagtaggtacactaattttcaattttatttatttaaaaaatagcttaatgaatcttctgtcaaaaaaaaaataaagccaccgcacaaatttcgataaatgaatatacggaatgaaaaggaaaagccaactgtccttttccgtattcccatgcagacagctatgtacgtcttagtacggatgctttaggtggtcttctaatgccacgtgtcgtttactgatttgctcatgaaaatctctcatcgtgatttgccggtggcggatttaaatgagtttcctatttttttattataatccaatgttttatagatatataaattatcctaaaaaagaagaataaaaggattttctaagaaaagaaaagggagaaaataatgaaatttggattaaattttattcaatcttaagacaaatgaaaagaagtaaataaaggcataaacatatctagaaatgaaaaatatgtagcaagtgtactaccgaccaaccaagcttagctggaaaccaaaactagagaaaaaattataagtggtttgaattaaacatatttaaaatgaaagaaagagaggagacagagagggagctagcttagctgtaacaagcagttttgagtaagagtcgaagaatatctcaatcttattattacttttattttgtttatttatttattggtctaaagttctaaccttaacaacgcggattctttactcaactcaactcatataattgcattatgcaccgacgctctatatctatatctcactttctaaattacattcctctctctctctctcctcttcaaaataaataaataaaaacgttataatatgataattattaataataacaataatattggaagaagaaatctgctgtagaatctagatggtcttcttaatttttggtaggttggggtcgtcgcctaccctgcatgccaaaatatctaattacttcacttcacttacttttttttagtgtttgacttgatcagtgtggccttgagtatgtaataaccaaacaaaactaaatcttttagaatattacacactcaacgatacatgacatattatttttataattcaaaattcaaaaaggtaaccagagaaaaagaatgccattttcttcgaaagagactattattcgtttattgtatatataatctcacattgtcatggatggtcaaagttcggacctttatcttgacagcattgaatgttcaatttaataaaattaatttgttgcataaataaataagtttaactctcaattataaatttgatttttgtagatacttactagttaagtattaagtaaattgttacgtgtcacgtgtcaattttaatttttttaaaaaaaaaaattaaatatactaataaaaaaataacacgtagataataacttaaacgttcagatgagggaaacactactagcattgaattctctattctgtatatatcttcctaatccgacaagaaactccattccactggagtatagaacgcaataacatctattattaactcaactttatatagctacaagaattgtgatctcactttatttattacatcaaaacttgtaattacctattaaatttattcttaacatctccactctataattgaggctactatcatgtgtgagtgtgactaatcactcttagtaagttagtatagtctcaatgtctcgtactctcgtacgttttaaggattttctcttggttagcccgcttggcttggctaaattggatcctcacctattcacacaaaattaggtgctccttaggcccaaaaccaagtctcaatatattgcatcttatacacacttataaaaagtgttcctatatcacacacttaaatattttacgtatcttgtaatcaaggtcggctcagagttaatttaagctactaaaaaaaataattttttgaactcattttataaaaataaatggtattttaaaaagtatgtataattattaaaaaaaaaaattatttgggctcctgataagaatgggctctagacacgggcctaccccgccttaacctaagatcggccctacctattcacatcctttatataaaagttccaacatataattatttaagattccatccaaacattggtgtaaaagtgtattaaaaatttatactttttctttctttctttaaaacatacttcacgtatggtgtaacaaatttgttcattattggagctcatattccttacaaaatgatgttctaaatatgagaaaaattattggagattatttttatatgacataaataaataatacaaaattaaaaatatggaattaaaaagtaatcaaagtttaaaatatgagagaaaaaaaagaccataaataaatttgataaaacttctaataacaaatatcgccaaaaagtcgccggagaagacagcagtaccggaaaagtcatcacaaaagtttttgttcactaaaaaaaagaccgcttttattgacaactttttagtcgcaacaaaaattttttgtgacta

SEQ ID NO: 298406 - DNA, 2440 bp, Cannabis indica
tctgatactagtatactttactattgcactggaaacgacattccacatatcattgtgtaagtaaactttatcactgattatcatgtcagtataaatctagtgtactaataaattatgggactaaatagtttgaaacatataatcacaattactttcttgtgatgacatcactgtaattgtgaataactatatattcgggatttaatagaacttctatattaaaactataatcatgaaaactacatgtaaacctaagtgatttttagtcttctattgatagtataaaaggttttatttatggcataaaattccaacaattacgtggccccgccttctcactttttgcctttttgtatttcacgtctaaattcctttgaaggtccacggtggaccaactttcatcggaacactgcctctttgctcccccgccctagttcactgaatcactagggcagtctttcctccctttgggtcttggtactttcgtacttgcttctttggtgtcacatgacctttctgggctaaaggacgtccaagcttagaggtgttaggtgttttctacaccagagaaggcctgtttgcctaattcatatttttctgagggggttcaggggcacgaaaatttttagggtcacctacttttgccctccccttgtcttgtacaggagtaaaggctccaggatcagtgtagttttccctagtttttccttcaacgtattctgtaacgccctgatactaacgcgcgccacattgattttctaattaaggtgcctcatttgctaatcaaaggggttttcctcaaaaattgtgcaaaaaataaatttttgatttaaactgttaaatttcattaatacatatatattcaactaagtcgggattttgtgtttaagcttttacaattataaaaattcttttacaaacttgttgcacagcgactacaaaattttgccccaagatgtcccaagaccgaactctccaggtcgtgccatcccaacatgtacaatcgtcatccaagctcaaagctcactcttgctcaattttttcctttcctttacctacacatggaagtagaatctgtgagccaatagactcagtaagaaaagtatataacaaactgtatattattgacttatgtcttggcgcccatacacctatccacaaggcttactaaatgattaagcatgttcttaacagttggtactattgaccatgatatcacccactactagcactatgatcacactgcgagaccgacaccacgttcgtactgctatgatagcattaatagcacgcgaaagtatgattggccatgatgtcactcttaaccagtatgaggcctgtatccgaactgacacaatggttgtgcggctatcatagcgccaattaatactttctggggtgaatatcactcttaactagtacgctgcctgtattgccgaaccgacacaatggttttgccgctatgatatcacccaaaacatatacaatcacaaacatagcatgcatacatagtacgtttgatgctagtcttaccttgtttccagactcatgcgtgtcgcttgacttgaataggaaatctcgtgatgcacgaaggccctatgtcacatttgtgtaaatggataaataattcagataaacttcctcaggaacctatacataaaagctagagataaccttatcgatacccagcttggtaatgtcctaaactctgagaaaattcaaagattaaaggttttggttgaccaaaaacccctaaccagcaaaccagtttctctagctctaccaggagaatcgattaaccggttctcctgcaaaaaaaccctaaaaattcaaaactcattcaattcaatcccaaattcaaccataacttccaaatcacctataataacattccaggaccatttccaacaaaaacagaaagaaaatgcctaaagtcacaccatgccatagttgagccaagtttgagttccaagaactcaaacttgctcaaatctaaaatcatctaatagcaatacttcaattaagcccaaaacaacaattacaatctacagaatgtagccctaatcgaatcagaaatcctaaattctcaccctaaacctaacaaaactttaacaatagcatgaatagagttttctagggttttaccttcaattaatacaccttgaatcctagttgaaacttcaggaagaatcgatgttgcagctggttctcctcaggttgagctggaccgaaagaagaagaggaggaggatgggtggttgtagactttatcttccattttctattctatgaatatcgtataatatcactattattattgttatttgtttaaaaggggaccaactatcttctaaagggaaggacacgttgttggaaatattttaccaggatctcgatttactaccatgtatgttccattcacatcctaatatgaattctaa

SEQ ID NO: 298407 - DNA, 2461 bp, Cannabis indica
ttttttttttttttttgctattagctgtactctcaattcatatctacattcttgagtgtagactcaatgactcatagtggtgttttggttggaaattgttgagggaatcaaatgcatgtaactactaaaaatatgtctcaaactagtgtgcaagttcgttttcaaatgataatctcactgaatcacttcatttgcatactacagcatgaatctttctaacacctaaccacacaaagaaagagactgaaacataaatagaattaacgcacctcagtttcctttagattttgcttggcctgggacaaagtttgctctacatctaaaaccttctctttttcattgttaatatcctcttgcagcttggctttttgtttttcccaaaccgaaagcctcttcaaacactttttctccttctttgtgagctccaaacaagcagtaactgattctgcagcacttaatttggaagcctccatctctgctcttatttctgcattctgagtctcaagacgtttcacatcagcatttgctcggtctacttgaccactagctttcctcagagcattctccatctctgaaagtctcttcattgttgtgtcctcaagagtttgttttcctttctttaatctctgagtctcctccctttccattcttaacagcttaagttctctgagatcattacttagctttcttgcagcttgcatagccttttggtgagcccactccttcctctccttcacttgtttctcaagatccttgacctgatgaagcagattaactatcagctcatccttctgatcctcagccactaactctgaatactcatcaagtttgagatcacggaatttacttaatactgagttaacagcttcctggtttttcgtattatgaggctcctcacactgcttggcaggaacttcagcacctgatccaaccaaagcattcccacttgccactgtattcaagcaagcttcggcttgtggttgacactgttttgagtttgcgcggaatccagctgcaaacaatgcaacattccttttcaacaacgacttcattgcaggagaaaggttaagcctttttggacactcaatttctctatgcaaagtggcatccccaccatgagaaaaaaagccatgaattggagactcagggcctccaccatttccgaaaccccaaccactatggaacctacaaagtgcgggtgtcacagcaccagctgaattgctaccattattaacattgtcagcagcaccagaagtaccagcagcagaagtagcagcaccaccaccattaccagaagacgaagtaagaaccggaatttccatagtactcgcacgacctacatgaagatcactcattagcaaacaccacattgcatctcctttactaaaatgaggcctaacctgttgcaacaaagacaccatacccgcaagagaatacttctccaactgcctcaaatcagcacaacgttgttcagattcatcagaagaattctcattactactaccacaactactattcaaataagccagcgagttatgtaatatattggtcaaaacatccatgcctccataacaatgcccattactcaaaatagctttatgcgcaatttcctcatcataacccaacgcaacaagcctagaaatagcttcattatacaaaaaatccaaattcttcaacaaaatttcctccaattgttcctctgtacagtacccccacccactatcatcattactagatatgtggctatcattaggaatgggaattttagggcttaggctggtagaatcaatcgaacccatattgttattattcttattattactcaatggtttaattagacccgattcaagtatcgatttcgaaatggattctttatctaataaacaacaaggatcagtttccagtttcacagatcttgacctccggttcgcacgaacatgcttctctctcacagtacaacccatgtatatcaatggcgaataccaagaaacacaattaagtaataaaaaaaaaaaaaacaataacaataatcaacaacaacaacagcaacaatgaaattgattgaagaagattcaatctgaagagaaggaaagaagaagaaaagaaactcacagagagaaatagatgatgatgatcggcgtttcgttgctgaaacttagagagagaaagagagaggagagagagagagaagtgaattgtgatgagttggtatttatatatatgggaactgggaggaagtaagtagtaagaggaggcgggtgttggtggtgatatttgtccacgtgtctacatctccctttggaccgtttccagtaattttattgggctgaatccctaactagcccaactttcggcccattgcttggttttgtcaacaataccatatttcatgggctatttacaaaacaaaaaaacggaattacactttataccctttttatattgtcttcttttattttta

SEQ ID NO: 298408 - DNA, 1430 bp, Cannabis indica
tcttttacaaattgattcgaaaaaatgaaagtccacttaaattttaacttgtacaatagatttttgtaaaagagataataattaaattatatcaccccattttatgatttgttataaagtaataaatttgattttatatcttataaaactaacctaagttatcataattgattatcccttagtaaagtagtaataatactaattaagatgcatgtgtgttattgagataagtagttctataaatgcaatttatgaatgatgatgatgatgatgatgatgttttagcacgtggtcagcatacaaagcaacacgtcattttccatgacaaacaaaaatggcggcgataaagaaacatatcaacaagtctttgtttctttcaaattccaagtcttaattttcaatctttggtcaatttctatacaaatatctataaaccgcacgtacacataactaaaatttgattagtagccaaagaaacaagttcgaacaacaacaacaatgctcataaaataatagtagctagactaaaaacctctcttatatactcaactataaaatctatactataaacttttcataaactatatatatttttctttaaaaaaaatattgttattgggcacaagtagtgttcaacaccttttattgtaattggataacgatattcctttaaaaattattacattaaattatatgagactcgatacttaattacaccaataataatatgtcacctaagaagctactagacacgagtagtaccttttaatatttctctaaaaaaaatataccataaaaatatatctcactttttttttttttttgtatttgtactccaatacataaaatgcaaattagctataaaaatcaatattatcattaatgctcattcaaaatataaaaaataattaattttgtttatattattttaatatattttaaatatattttattcaaagttaatgaatagtattaataacagacaaacatgtaattaaaaagaaaaatatttatattgtgggttaaaatttggcccaagttatattttgtgccaaatttagcacaatttttagcttgagccgaattcagcacacattttacatcccattgaagttaaattttaacaaaatattctaaaaaaatagcaaaaataaattttaacaaaatattttaaaaaataacaatacaccatatttataactctcaattgaagatactccaacactctttaatgtgtaaaatcattaatcactattagtgcaatgattattgagtctcatataattatatataataactttaaggttaatcaatcacaaagcgccgttacagcatcaaatatatataaaaaattgagtattgatattgaacactgctagcgatattaagttatataaaaactgatacttaattataacaataacaatata

SEQ ID NO: 298409 - DNA, 3095 bp, Cannabis indica
aaaataaaataaaactgaaataattattctaatttgtgttgatctaaaattaaataaataaattaaaaaaggcgtgagtgcgtgttcccctacgtctcccatggcgaagaagaagagggtcatccgaaagcctgcatctaagagcacggtggtcgtcagagccgatgaggaacttccttcaatccttgaagagagttcagatcagattgtcggtgaagaatttcatgattcaattgatattctagagaatgagatagggcaggaggttgaatcgagcaacacagttcgttccccgaaaacggttagctaggcagaggaggtcaagaaaagtgattatcaaactaatgcgagtgaattgtggagccaattcaagactaattaggtacgtactccatcaaccagactctcttctattgaaccgataaaagtaggtgaccaggttgttgctaaactggatttagatgaaattgaaattgaggcttcattctggaagaatgctattgtctgtattgttttcggtgttaatccaccaggctttgtgaaaagagtttagggaaatatgggagttgagaaagtagtctgtatgcactcaagctttaccttagtcaagtttagggatgaggttacgagagatattattctggaagcaagagttatccactttgataagaagcctgttattcagcgtccttggatagcagagatggatttagctcagttggtaaattttgttcctgtgtggatctgctttaatggattaggtcttcaatattggggaaaaaagaatcttagcgcattgattagtactataggtaaacctatcatgattgataaggtcacccgagaacgatcaatggtgaaatttgctcgagttcttgttaatatggagattcagaggagccaccaaaaaccatttcctttatcaatgaaaggaaacaacttgtggaacaacaagtggaatatgaatggatcccctctaaatgctcggcttatgggaatttagggcacattgtggccaactgtaacatggataggcctatggtatggaagaggaagcaatctggagataacccagtggaggaaaaaaggagctacaaacacagaatacagggacaaatatggagaaaaagctgccaggggatatcagtatttctgctgatgttgtatagggaaatcaagagcatggtaattcagttctggacaaacgagattgtgagaattcaggtaattcaaacacctggattactcctaaaagaagagggcaaaagatgaattcgagttcaaaagtgaatgctcctaaaacagttagcaacaatgggtatgtcgtactgcaaggagttgtagatgaggtatcccaactccaatatggtttttaatggaagtttgtaacattcttggttggaatgtaaggggaatgaataaaaaagaaaaacagattgctattcttgaggtgtgtagattgaataaagttggatttggtgctttgtttgagactaaggtgaagcatgagaaagctcatgatatcatggctaataattttctgaactgtagtttttattctagttcagttatctctagcaaaatcttgttgatttggcaggaaaaatttgtccagattgagattctagatgaggataagtagctggtacattgtagagttaaagtttgtggtcaaaagtgtacttttctggcaacaggagtcaatgacagcaactctatggaagatagaaaatgtctttggcaaaagcttgaaagttatggtcagatacaggagccgtggattatttttggcgatttcaacgccatgttttctttccatgatagaagtgggggcagatcggttctctccagagatattttggattctcaaacctggctttcttgcgatcaggtggaggaattcaaatgttagggtgcttattatacctggagtaataaacatgaggtgggtgaaagtattttttctaagcttgatagagttttcacgaatgataaatggctgaggttttttttcataatactgaagcttgttttaaatgggagacaatttcagatcacatcatgtgtttaattcggaatcatgaggtgaacaaagttggatacaagtcgtttagacatcgtaatcattgggcctcttatcctaactttagaaaggttgtttctacttactggattaagcctacagttggcagcagccttgacaggttagtgaagaagttgtttagaatcaaacacgctctaaagaagttcaacaagcatgaagttggtgatataaataaggagtacaagcagactagagaagagtattgcagattacagggagaagctgctgctaagccttatgatttaagcttgcaaattgttgctgatcataagcagcaggagtatcttattgcccataataggtatactcagtttattggtcagcaaagcaagctaagatggatgaagttcaatgatgagaactccagctattttcatgcggccatgaggaaaagaaaacttgaaaacagaataacaacctacttaaaggatgactctattgttgatgactttgaggaagttgtgaatcactttgtcagccactttgagaagttcatgggaagtaaaagctttgccacttccagcatagacgaagaatgtattagaaaggggaattgcctaagcttggaacagcaagtaaggcttattaggcctttctctacgggggatgttaagaaagctatatttagtatccactcttccaaaacccctagtctggatggatttggatctgttttcttcaaagacatgtgggatgagataggtaatgaagtttctagagctgttttggacttctttgccaatgggtacatgccaaaggatttgaatgaaactgtaatctctttaattcctaaggtgtcggatcctagcacggccaaacattatagaccaattgcatgtcgtaacaccgtctataaatgtatctcaaagatgatcttctttaatgctttcagaggttctcccgactcttatccaaggcaatggcaagtcccgaatagaaataatggtcagccggcatggattcaaaagtggattccatgaaaaagaataaa

SEQ ID NO: 298410 - DNA, 3711 bp, Cannabis indica
aagcaccgtatgtggttaaatattaatggttgaatggttatggccttgattattatcaagactttgattagatatttgttgagcctaggttatgacctagggttggaaacggttaataccgttacgagtaattactcttgaaaccgcggttaggtttcttacttatcgtttgcttcatcgggcaacgatagtgacatatacagctcgtggttaacgagtggtaaaggggtactttataaagtaccaagattgtgtgtctatgatattatgtaatgtgtaagcatgatgacatgagattaattgatgatcattttcagttattgtctatttcacttttcttgctgagtctctgtgactcacaggtgcttatggtgcaggtaaagggaagactaaagttgagcagccatgagtgcgaggtcgtagcagcaatgtacatatcagccgcagtgtatcggcccagtaatcaggatgctctattttgaaagtattttgggagtacaaagtttatgttgtaaaaacactattaaaccagtttgtgaatattttgaaaacagggggaccccatggttaataccacttatcttttatcatatagtttatatgttaaattgttaattatcaaaatttaattaaccacacttttggtataattatataatatctatataagaattttatcaaattgcacacacgtggcgtccttattggacaaggcattacagtcaaactggcccttaatctgttatgtttggaactctttgcttagttaatgtccacatcaacatattttaagttattcattacaagtgattagttttctgagaatatacctcaatcaacttggtatatatatataagtatataatatgtatatatatatatcatggtctaaattttgttaagtttaatacttttaattggagatagtttttcttggttttatctttcaactcttttcgatcttatctttcttgcaggttaattatttctcaaaaagttgttaatggcgaactcaattttcgattctcaccagcaatctgtttgtgctagctgaaggaagttcaactttgtctgtgtgaaatgatctgaaaggttttcagattgaagaagcttgttgaagagatttcaacaattaagaagaaatggatcttgctcattttggctaaggggatttagggtaaattttactgtaagggatttgacaaaattgtacgaactggatgttataattttgatattatatagcagatgttacttaccctagtttggagaacttaagcaatactcggttggaatgtgtttctaatgttaggggaagcttgtaaattgagtgtatttactgttgtttctttattctttttaagcttaaaattgttaattgaattaggatcggaattaacgtgaaactcattaattgagcttagtaactatgttagtaagaacttatattcggtatcatagcaggaaaatttaggttaactttattggatcttgtttgcttagttacattattcaaagatctggttatttcacttgcaagattacgattctcgatttttggtttactcagtcaccactaaccctctctgtgttttcacttctaagagttgtatattgtcttcgttagctgttattgtgcttgcatgatggatatgttgagagaaagcgcccaatgcttgaaggtgtcaattacccgttctggaaaactaaaatgcaagcattcttgagggtagtggatgaaatagtttggatggtcatcgaagatggttggacattcccaacgatgatgggtaatagtctcaccaaactgaaacatatgagctcgtgtacaccttattttgtggtataggttttgttgtaattttttattttaaatttatttataaattttgttaaataatataacatcaaaaatccacaaatcttctattgatgactgagctcaggtttaaggagtaaatcccgtccttatcgagatgatgatatttgaaccttgaatgatgagccaccaaccccgaaggtttacggttgcaagccatgaggctcaaaggggttaatcacgtgatttctcacatgttcatggaagtaatgcaaccccatgcatgtgaaagagagggagctaaaccccatgatttctccgtgaccagagtaagtggggtcgaccgaccttccaaggctcgaggtcaatgtcaatgttggaggagctaaaccattgtgggccacagagcctcctagctcaaaacgggtcacacgacccgacttctctccacaaatagagctcggctccgtacatcctccatcactgccgatttcacactggcatccaccctcgtacgtcgtcccttagtggtcgacggccaccacctacgaccatataggttggccccaccaatgtatatatgtaaccgtatatgtatgtatagatatattatctttttatatattttttattttaataattagattattaatttggaaaataaaataagataaaagatatgtacattattctttttattttaattgattaaaatattttttttttcaaaaattagttattattattttttaagtatatattttattttttaaataaaaggatgtttagatattttatttttcaaattataattttttatatacaaagatatatatactatataaaagtaatattttttaaaaagtggttagtaataatttttgaaaatatattaaaataatattttttaaaattttttgttataaatgtcctttaaattaattatttattttgaataaatatgataataatttataaatatattattatattattaattaatcattttcttaaaaacaagttataagttggtataacctattgtaaaattagtattatgatattattttaaactaaagtgaaagcaaaattatcttgattaatagtaaataaattaaaaatattttaattacttaactaatgtgatatattgtatacaataattaatttctaaaactaattaataatttattgcttgaaatattttaaaatatttttaatttaaataattaaacaaatatcaattatttaattattaaatcacaattaataatgacaatataaaaggggtttaaattacttaataaaattaattaataattaaaaaaggcatttccaattacaaggtggtggataaatggtgattggagatggtgtcaaattcctaaagctacatcaaggaacaataaagaagagttcttataggagagagattgttcttactgtagtttatttctgttttggtaatttcaacacgcaagtgtacgtgtcgtaacaagtagtagactcactaagagtaaggtcgatcccacagggattgtagttaaatactataaaattaaacttttacttctatttagttgaataaaattaagagagaaaatataattagaaaaaaaaaataggaaacaaataaataaataaaggaaattaacatttaataaaaactaaagttttcgatttcaattgtatctattgattatggtctaatgtgattatcttcctattatcaatttctataaaatagttggtttgctaaggtaatttatagtcctcttagatatatacagcttaattatatacaaattttctactctcgtgataaattaaacatgtatcagacatttaacacagaacccctataagttatctaaaccatataggtactctcg

SEQ ID NO: 298411 - DNA, 4993 bp, Cannabis indica
gttctgttttatgcttgaattttttatgttgctagaacagcaaataaagatgtcatttgtttattacccatttgtagacaatttttcagatgaataaaggttatgatatttttggtcaagaaaattagtgatgggcaaatgcttgttcttaatatatgatccaaatgcaagaatgctaaatataaaataggtttttattatatgtgtttgtgtaaaggtctcatatactagttacagctacccaacaccacatgaagtcttgtagcactttcaaaaaaaaactgcctcatcaatcaaatatcatatctgggcaaaattcaagcaatataacattatactactagagctgtaaccatactagtgtaacaagagtgtactcaaaaaaaaaaacaggaaaagaagtagcaaaaagattaggattgttatacttgtaccaacacaacctaaaatcctcaaatgcatctaactcatacaaggaaagcaaaattgtgcgtgagattactagtacacttttctctctgtttttgtagtttcaaacctcaaagggtagttccctgaatcttatcacgagccacattaatcacctctatcacatcatgttaacagtaactgtacactgaaaatatttatgagtctattttcttctgatcatattttttggcaagaacaagtctgggtggcgaaatcatagctctgctcatttagatgcatggtcccccaaatcttattggtggtgaatgggcttcacttcagcaaaatgccaaaagaccaatcgaaaagattattggtgaggccgtagatccagcttgtatgctgtatttccataggagaaatataaacatttccctcttgtgaaacatcaccaaattgctcagtatacccaagcatctcagtatcttcttgtaagaggtttaaggaggttgctttagcattcaacactgaaagatccttgaacatgtaaaacagattcacaggctcttctgcgacactggtgcaatgtgatctgccctttcgacagaaggatgaatcccacttttgcctctgcaagactagtacgaacttaggatctccgtctgtttgctgagaatatttcaaaggtcggggaaccttaaaactgacaatgtgcaagtcacatggtaaggacatagctaaaggggagaaagatcttgggggtggctgcactgatatatcttgtggtttcttggcaataaatgcatgtaaaggatagttcaagtgagaaccaatacggtgagaaagaagggagggacttaatggcagatggtttgaaattgggtttgaagtggaagaaatgttggattccacgagaatgtgaaagattacgttcattgcccggttgtccatcactccttgcccaagaccacgtccatcatctcttaccagacgacgatcaagcattatctctaaccaaccatctttaaggcttgccacacccaatgactgcctggaatggactgagaaccgcctgccattagatccttgcaagaaagcatgagcaggcattgggtagtaattcccctgcaatggaattttgtcataggtttctctccggctcatctggaagccatttaaatcagtataaaatattttcttgctatcgatatctgttttgtatcttgctattatctctttgtcattgaattcatcaccaagaagctctacatgatattccttctctatgagaaactcctgaatagtattttctccattatacaaacgggtgctatgggaaatggggcctctctcccattctgtgtgtggatgagagtacacttcttgcatcagatggccctcagagatcacgatcagtccaccagatttaactattggttgagcatcaccagtaggtttgaataggtaggctccacttccccaacttgagtacatcgatatttcctcaccaataacattttgagagccatttgtgtatgttactttctgcagcaaaccagtcttggcatcaaaagtgagggtttgatgtcgattatggatttggacagtgtcatctttggcttttgaacaagcataagaagctggacaagaaaatgagccagaattagaaatgaattttagttttgctggcttggctttttcacacctaactaaacctttagcaatgtaatatgtttgcaggcctagggcaggaatagaagctttccaatagacacgatgtttcccagtgaaaatcttgcttttgtcatgctgcaattcaggagatatttgactttcgatgcaagtccagtttgaatccaaacagcaacatcaggcttattaacaatcatcacaacttcttctcttgtttgctctgaaggattgaaaaagactactgattggtaagttccttcatgagcaattattgtcttatgaacaggctgaacatcatattttgatctcacctgtgcaggctcaaaaatagaagggttatggtcagatttttcatgtcgtatcttaaggagcacttcaattgccttagacatgaaaatctgcaggtcttgcaaagacatatgcatccgagtaccatagtccgtaaccacgtgatcctttgcagtaccagttaccccatcatgatgctgaaaaagagccaagtttcttcttgcagctgtcagtttgtaggagaatcccactggcaacttttcacattgtgccctctgacagtacccaagcaataaggccatcatcatatctgtggcacgaagtgtttcctccaatacccgatcgacagccttgaagaaaggtctcgacacataataaccactccaatagtccttctgcctatcagcataagtaaagaagtcacctgatagagaaggaaaacctccaacctgaatggatccaacctcaccaggacgggagtaatttattctatcagcctcctcacgtacagttcgaaagtagtcctccaaagttccaaactgtgcctccgcatttaaggatggattagaattgatatgatcaaataacaattggtaattcctaaactggttttcggcttcatcaagactgatgtagcggaaatcatctccaagagggacaagaagcgtatttgtccggtataggaccgatttcttcctatattgatctagtagtttaaatgctctttccttaacattctcctggtcggtttctactggatgttcaccccatggacagagttcgtacatagaaccacgcattcgagcaaaatcaaactgacaacaaatagcaggctctgggccacaggtatgtggaatatcataagaatagaagggcatcatgtggacaaaaatatcagtagtctcctctgcatcccaactctgacgccatatgtattccaaatttttatggcgtgcaagctccttcttcagctcgtagtgagtcctctgaataagcatattttcaaatcccattcgacgaagaagatatgccatggtaggcgagtaaccaaatggatctattgcccaagaatttttgggaacaactccaatggtgtcatttaaccacatattaccctctgtgatctgatacatcaattacacaagataaaacaaatattgaatcagtatttctaagtaatcacccattaaatacaaatacatgccaaaagaatcatgttctaaccctatgcaatcaatctaactgtgtttaaaatagagaagaacctactggaaaataagaaaacgcactgagactgacaaaacttgcaattaaattaccagaggccacaaagaaaaaaaaaacatatgccacatcaatgcatgaatggtacaatgaaacgatggaactttgacgcttacctactggaaacctaaaaaaaaaatactcaaagagtacctcaagataaccatcaagccataaatactttaaattctatgatttaatgaaatcaactcatcaactaaacaatcgcctatatactctgcagattatgatatgagtaaatatcattaacaataaataaatgcctttccttgtcacaatgcccatatttcttggagaagttcaagaaaaaagacaaatgcccgtggaaaatacagaattatgtcgatgtgaaatgtagtgaaatagaacaaaggaagctttaagtttacctgctcaattatggcatagtaatgtgaattggcctgcatcacaaaaaatttacaattataagcaaagattccataatagtatatcagtaatgcctagattctaaaatgattttatacacaaagagtaagatctcaataagtaagaacccaaattttgccaaactaaataatccaaacgaacataaccaactcttcactggctaaaccaaacactaacaaattgtatgcacagtatattacatggattcagatgtagaagaattttcactttccagcagccaagctacttatttagccaattttaaggacataagaaactaagaaagtagaaatataatactgtgatctaaaagatatgatgcaacagaaatattgagaactgttccattgagaagcaaggagtgtgttcttggtatatggaaaaacagcaacataactatttacaatgatatataaaaggaaactttgtgattaagctatggaaaaaaaaaaaacccatttgaagactacaatatagtttagaatgaaatgacttacctcatcattcatcacccatccaccaccaacaatttctagctgaccagtctttactagattaatgaaagattcctttttgctttctgacgaatctctccaccatctctccaaataagacatctcttcccatatgaactttcgtctagggtcctacacatacaagtccagacaatgcaactaaattcttaagaaacaagactagtaaatatagaaatatgaacccaaaatacttaattgtttttctacaatagaacatacatacagaatttgataaaaactcacatagaatataacctgtaacattaaccagttcatcaaaacaataaaacaaaaaacacccacttcaacatactctactttgattacaaaaa

SEQ ID NO: 298412 - DNA, 2906 bp, Cannabis indica
aaaaaaaaatactgtttaaattgtatagtgtatacagtgtttaaattttatagtgtgtacagtgttaagtttttacaattattatacaattgttttttagttgtttcaccgttgttcttagttgttctgttttgtgttccactgttgttttataaaaatacagtattttaaaaaaaaaaattgtatgacaatatatttttataaaagttaatccatgttccatgtaaaacaaattaattaagctagcacttttgatcatcagttccaacaactaaattaaggaaagaaaagagaaaaaagagagagagacgtacgtgacacaatgtataatgtatatagatttttaatcacattttttataagaaaataaatacataacaataatggtgtaagagttacaaatacacgtacatggtaataaacaacaagaaaattagaaacagtactataaacactttgttaataataattaaaatattataattattcaactagttgggcttggcacagtgttttctgatttcaccatcagatccagtaagaggttcgatatctcccatcttgatcattgccttaacaaagtcctcagcaaagctactaggcttcgaactgtagcgtttaacaacagaatcagtggatccaccattgaacaagatctgatcagagtgtaaaagacccttttggctcaacagatttttgaagtagagattatcaaactttgttggagttgtaacatcaagatctgctacattgttatctccagaaggagccttacgtggacacttgttttgcctttgtttggcaaatgaactatcaatgttgctctcattgtatattctgtctctgaaagttgtacatcttgctttaccaattgtgtgtgcccctgaaataaaatatatatcatatatttaagggtatacattcattgaaaagatctaattttattgtttttaaattgtgttattattaattaccagataaggcaaccatgtctttggcagagagacctttagctttgaatctattaatgaggttgcttagggtggaagtgggaggagggatgactccactattggcatcattaaagcttgcggtctttgagtctcttcttccaactttaactttccaatcaggtcctccaagctatacacatcacaatatagttaattattttttgaccaaattaacgacataaaatgtgtgctgcgttttgatgagtatatatatattgcttgcttacaattgcgacagagtcacgagcagcaatggctaagatatcagcacatgaaacgacaccagggcagactttctcaacctgggccttaatcttatccacaactccaaaacctctcactgagttgttattgggccgtgctgtcttctcacctctgaatgaagaagtgtcgtccagtagtattgacccatcacagccctataaatcaaaacttaattaattaatttattttttttagagaaatttacaaaaataatagaattttagttaatttttacaaaaatactatcagatagaaaatttttaaaaaatacagtgtttttataaaacaacagtagaatacaaaacagaataacaaaaaataatcgtattaacaatagtgaaaacttaacacaatacacagtatttttgaaaaaaaaatctgcctcacaaaataaaaattaaaaaattaaaaattttagtaaatgggtgtaattattttatatatatatatatataaaattattgaataaatatcaagtatatggtagtagtaaattgtaataaatttattcgttaaaaacactatagctattattgaaagttttgtccttttgtggaggttatagaataagttgattgagtctataggtagctagtgtagtgtccgtctatatagtttgtttgtgaaaatatgtttcaaccactatatatagagtgctcagtagcacaagatttgacttgcttggctcctacttcacgcaacaatatgccatgcatgcatgtgcatcttttatatgtcgtatatattcaagatcaatgtcaaaagtcaaggctttgacctatcctatgctgccacgtcacaaccatctcttgttttataactagcctataagaatatgattcagcacttgaccaaaattaccaaaactcatccgaataaaaactatatagccacctaggcacattattgtatctaaggggattatcttttacattaaataattaagagaaaaagtcatatttgttttcatcaattcaaatatttaattgatgatttatgttgaatcaatttcgttgcaaaacgaattaataatatctctttttattttattataaacttagtgtcgtaatatatataataatatttgggagatattttacattatttatatatatgttttctactgtgataaaaccaatcaatttagttactgttataacaagagacgtgagaaacttgtcggtggtacgtataatttatatattaaagtctatatatatacataaattagccacacattcaaaaataaaaaatgaaaagaaaatagttcgttactatatgtactgctgcctgagagatattatatcgtttatttattaatttactgattaagcttttgaccaaagttaccaaatacttaaactaggaactttgttacattttatgaggttgattatcataaattatatgcatatataatatcatgatgtgaatattcttcaaaaaacaaaagaaactaataaatgttaggaataaattctgaatagaagagttaattgttatctcaaaatttaactaaaaagaataaaataatatacgagctcctattaagtattattgtggacaatgtcccacatggaataaatggtagagaattgagccatatataagaacatggactactccact

SEQ ID NO: 298413 - DNA, 3542 bp, Cannabis indica
tttgagttcttgaactcaaagcttgctcaacaatggttggtttgtctttagaggtttgatgttgtgatttctggttaaattatgtctattgtggtgtaaatatgtgttctggaaggtttggcaagatttggggtagaattgaagcagattgaattttggtgttttgtgctactaaatggcccactgtttctacagaaacggtgaaccgtttccccaagcatgagcccaataaactgttcaccgtttggggatccaactcaccagttgggatgattttcaaggacctcgatttttgtattttctcaacatttagggtttttcattctatttatcgataaggaaacttcttattttaagttaaagtctcaaaagtgatcttgagtgtcacttatcaattttacgcgattgtgacttagggccactaatcgttgagcagtagtttccactcaggttggccaacacacttgattatggaattgaggtaagattagtataatatatgcacatatgtacatgttcagcatgcatgtttcaatagccatcaaattagtatatcagggtattagtagagtgtacatcgagttgtactgagataccgacaaatatatactaagcttttagaaagtacaaactaatgctaccaatgccagtacgcctagagtactgagtgcatgtggtattataattagttgtactttagtcaagaactttcgtgactcaattttagacttgtgagtaggtgtatgtgcacctagttataggttggttatatatttatgtcttatattttttttactgagtttgtcaacttacatatatgttttctttgtgtaggtaagggcaagttaaagattgaacaacaatgagtgtagagctagatgaagattatagatatccaaacggttagacctagagtgttcaggtctatggaacgacatgccttagattttattagtcgcgaagcgtcacattttggtttattttatttgttgtatttgaaaaatagattgggattctagattatgtgaacttatatatattagcaaggtttataattattttaaaagttctatttaattacttttgcaataaactatttaattagtaaaggttagtacaataattaagaaaattactataatgcgcctaaactagtaaggcgttacagaaagtggattttgagagggataaaaataagttattacaaccataaataaataaaattaaaaaaaaagttgtcacaaggataattttgtaaaataattagtttgaggcataagaaaaaaatatattgtttttttgttgataaatttcaattaggggtgtgcaaaaaagcatccaattcatttataaccgactgattcaataaaatcagatatccaatttgttgaatggaacatttgatccaatgggcaaccaaactgaaccgattcaatccaattatcttctaattatatttatataattttaaaatatatttatttatttaattttaaaaaatctattcattaatttcttaatatggattggaactgatccatccaataaataacttgattgaattggatccaaatccaatgaacacaaacttggtagttatgtgtgtatagatcccacaaatcgtacatatacgagcaatgtgggacaaaatacaccagtttttttttttttttttttgattaaatttcaaatatgcatagcatttatccgattactaaaattttataaagtagttaacacttgtatctatttgtgtaaaataatcccacaaataagttgtcagacacaataaacgatctaataaattccattttcactatcaacaatatcctttaaatctttaaatattccattccacaaaagattcacttatttgatattctgactacataatagcaactttcgatgaacgattttagcaaacagcacatgttcacaacttttatattttgatttttttatctctttgtactgaacttgtacttatttaaacaaagactagcaaatatacatatacaaaatcctcttacaagcaaaacaactggaaaatctaacattaaatcattgatgacagagttactgatttccagtaatagggctgtcccgagctctcttgatgtcatcccaacctctcacccatggctgtccaggttttgctcgagtttcaggagaagaatgtgcattaaggttgttcatgactttgtcacgtagagcattaaagacctaagcaaaaatgtatgagaattgaaaaataagggaagaaaaaagaaccaccgagtcatgaataaattttatccaaatcttacaggattaatttggagggcctcaggaggttgctcttgaccagttatccacttccagagatctggattttcctaaacaaaggagaaagagaagcataaaattagaaaggcaatgcaaataagttgatcaagtcatttcttaaatctcttgtttttgacaacagttctcactaaaaatgaagtcctactctcctaaacttgtgactatcccatgttagttcaaatgactttgtatattacaccaattaaatgaggcaagagctgaaaagaaagggttctaattagtaatttggttattagaatttagactaaatgtaatctttatttgatattcatgtcgaaaaatccctgtctatctttaaaaagccaattccattcaataaaacttatacgcaagcaacacaccatacataataaatcttcccaattgaattgctctcatacaatgccaaaatcaaattcaagggaccatgaaattgacatcaactggttctccatcatggaaggaggcagcttgaatggccccgtgtttggagttgaatctcacaggaagctaaacaattagaactaccaaaagaagtataacttcaaccgcatggaacatcctaagagattctactgtcaggtaaatgaaaataaattgatggattacaaactagatggccacagcacgacataagctgttgtgatcaatgtagatttagattacagttgtttcatccatgagtcaaagaagattaataaaccaacaaacctagcacgctaatttctttccattaaataattcaaaaggttctaatacaagctcaaatcccaaacaattgatttattcaaattcaattatccagggtaatgaaagacattcctctggaaatgcattcaattcatgaagctatatgtgtacatcacacgaaatgaaaaattaaggaataaagtttaccaggtcgaggacatggacgagagctttgattccattttcatccatggaactgatatgctcctctacccatttgcccaaaaccaaatccaattccagaaaccccctctgtttgctcctgtataccaatctattcgtttccccacaacccaattcgaggaaaacgaaaagtaaataaaaatagcttgttatttttcaaactgaaattccacaaaccaaatataacgaagaaaaaaaaaagaaagaaacctgttataaaggcgtttcttgttctcttcgttggagagatcgatatccaaaga

SEQ ID NO: 298414 - DNA, 2281 bp, Cannabis indica
cacagtaagaatattgtttttgtttattttacttttaccaaatagaaaccatttacttaagcattttcaatctctttaaagaatcagaatttatgtaaaatatatatatttatgtacatgtaacagtcaattcttgaaagatagaataaacttttaccagatatgcttaccaaataccaagtgctcatagggctgcaaatagggctgctcattgtcttgctagagagtcttgttttttgtcagattgtatttttaatcagcataatgtttctgctgagttcaattctattgtaatggctgaaagtgtttgaataaaactttacactttaactcaaaaaaaaaaaaaaaaaaaaataccaagtgctcatcaattgtgaatatcgaacacaaattacaatacaataaatacattatcacctaaaacttatatcttgagtgttttgttttactttctttgagtgttttgttttactttctttcttttttttaaaaaaaaaaaagaaagaaagaagaaaaacattgaagaacaaaaaaccaagaacaaataaatactcttcgtcaattaaactgaacttttcatttattattatgaagaaaaaaatccaaaacaaaggtcagtgttctttaatttatttgtatactttcatttaataaatacttatatttcaacagactttacctctatttagaaacaggacaagtttgttttccttttttttttcttttgaggaaacgaaacaaaaaacaacaggttttatgaaaaaattgatgctttctaagtaacaaaaatctcacgtgttgattggcacgtgctgacgcagccgccacttggctaaatgtcgtcttttaaacggtgtaccattgtcagcatggtcttgcgtgtacacgatctttttcgatttaagtaacggaacttttactttccactctcactaacctaatcaatcaccgttaaaattgtcaaaaagattcatcaaataaacggctacagattcatcaaccaatttttatacatgggacaattcgagcaccaaaatttctttcttccctttttgtccctatattaggggtaatgtgggacccaccaaatcaggtagaaggggtgatgtttggctacgttcctaagcccatgacattttgacggtcaggattgttttcggtttaatttacacatggcacaatctctaaaagccctaagccattcgggtgcagcgtgccataggaagtgcttttccatcgaattactttctcttctcttttttgcaaaaaagaattaaaaaaaatattatataaacaggctgctcctaatggatatgagtgggccccacagtaagatcgtactgtactctaaaagcgcgtacaattcagacattgacttctgcctcaaacagagacccgacccgacccatatatagtcttttttttttttttcatcttaattaagaattgaactcatatatagcaaagaataacttcgaaatgtctctaataagtttctttttttttttaaataataaaaaagtttaagaaagatacttcattattggttaataatattaataataataataatatataatagatgttggcaagtgacgaatgacattttttaaaagagcaccgttaaaaataaaattgtattattatgtgtgataaggcccactcgcggaggagaggggttgttggagacacttgagatggaatgtaggccattagtaagacatactgcgccaaagtaccacaatgaccatgacaatgagcttgggtggtgcttttcacgtattgtataaatagcgtgacccaaaacctacaatagtaatttccaccatgactcaatcacatctccattacaatattattttcctaattttttattttaatttattattacaaatattgataggtcacttttacaagaatttcatggggtcccggtttgacaatttctcaaagtcaatgctaaaggcaaagcaaaagggttgtgggttcccctagaacaaagtcgctctcttctctattctagtgcgcggtaggcttatatctacttgattattttgggaaaatttttagtttaatttttttcataacttgttacaattatttagagttatttataattttttataaaattttaaataatttatggtacttaaaataaaatttaaatattttattattcacaattttcttaaaattcacatattatctttaataaatacaatctatataattaataaaaaaaactaaagaaaaatgtaagtaaatagccttatttctaact

SEQ ID NO: 298415 - DNA, 2768 bp, Cannabis indica
tgtgttttgtaatttttttttttgtttaagttgggtttggggttgaggtccggatagggttgggttagagtcgggattcgaggttaggtgttggggccagggtttaggtcagagttcgggtttgagtccaaattcacagactagggagcatgcgtcatcgatgatgtcgatgattgttgaaaatagtgaagaagaaagaaaaaagttacgggttacttgcttgttgtttaatctccgtactttgatcaaagcatcgaagctctaagatggtgggttatgcttcagggtcaagttggggtctggtgtcgagaccagggcaagtgatcaagtccagttccaatgccaaggccgaggccaagttagggtttgtgtcaaattgcgaatcgtatatgaagtttagaagtaattttttttgtgtgtgatgtgtaaaaaataaaaaatctgtttatagaaaacattgtcaaaaattgagattgataatgtgattgattaaatgtttaggcttattgagaagaaattaggattgtacaaatatgaaaatcttgtcaaagttgatgtaaaactgaagaaaagctttgcgtaacaagttactcaatagatactatactgattgatcatgttacttttatgatcgattcttacatagtcaatctacttagttttaaagccaaagatgtgattgtgagtcattaaatcattgatctaataatgaaagataagtatagaatcaagaagtttaagcaagtgcatcatttcatggccacaattaatggtgttttgagacataaatacatacatataaatcattttgcctaaactaaatgggcattcaaatttcaaaacttgaacaaatttttatgaactttcaatactaatctacaagttagtgaaattctattgctagttctatgaatattcttcacctcttctgaatcttgctcttgataatttaaagcctcaacttcatttacaacctgaataagaccacaattaaatagaaacatatatgagaagaagccaaattcagaagaaaaacctattcaacttaggcaaagctaagtactgcgcttaccccattaaagctttgtaattcggagtcctttataccgtgcaagtagtctaaccataatagcaaaaagaagggtcagtcaaaatatgaatgttcactaaaacatacaatgacaagattcagtatatattcatcgtgttaccacctgaatatgccgagtctttgaatatcagtaagctgcaaggcatgaggaggaccgaaaaaggacggggattgtccaacgttttatcgtctttatggttttcttccatcaatcttgaatggggagtgaagtccataacagcaggtgagccaagagacagaatcgccacaaccgggaaataagctggcccgtcctggtgtggctgcacacaacacaacacacagccattagattttggacagccacttgggtgttcaagactaaatattttgaccacttctcattcttagacttaactagagaatggagaaatttgatataatttttctttcagaactaacaagtactgtttttatgggtccggtcttgcttttgtgcgtgttttagttttatgcttagactcttgtaccatggttttcctccaccacaaagtaagggatttcaataaatatcgggtagggcccgtctaagacaacggcctctatctctttttcaaaataaaaaggataactttttctaaggagatacaaacttagattggccggagaaactcaaggagactttccagccagccatcgattcatcaatatgcatcataaaattcaaatagctaacagaaaaagtacttgaaactcacaagaaactatgtatgaaatgacctaccatgattccttggttagggaggtattcgttgataagaacatgattgatcggtgcagggaataatcctgtttcttcacatattttcagtgtaacctttgctagccaaggtggcactgtggcagagtcagtttttcaaatcagaaaattctctttaaacaacagaggttacacatatcgagtttaactcaagaagcaaaatataatttacacatatcaaagagatgtaatgaacttaaaaagtaaaagtaaatcaattgtgtattcacagataaacttgaaaatcctgcctagaaattttagcagctaagcacctacataagtgtccccattacagtttcagctcgggacacaacggaaatatctgaggaattgaattgaaatgtatgtggcctgtagaagtatatggatgcaaataaaggcgccttaagttaatacataggaaatgtgttctaactttgatccatttgcctttgaatataaaatatggcacaagatttaggttgtgcttggttgaacacaacataataatcccctcaagagtaacttcacaatgagttgagcatgagatcttattatctatacttttgaacaaattatacagatttaaacaagatagagaagagaatagaatagggcaagggaaatgaggagtaataaacagagaatgaggaaaggaaacaagattaaaggatgaaaacctcattgatttcacagtaagtaataagtataatataacaactaaggaacagaaacacacaaacataaatttagagcattcgaaaaagagaatttataatcatttgctggttctctttagaggctcaaacagttatgttttctcatacaaatctgttgtctccagcaattggggatcccatttccgtaccaactcaa

SEQ ID NO: 298416 - DNA, 1314 bp, Cannabis indica
ctcaaacagttatgttttctcatacaaatctgttgtctccagcaattggggatcccatttccgtaccaactcaacatatgcttattggaacctatgtattaactagcgctaatcgcggagctatttgtacaaataggtataatttagtgatgcactccataaattcatatttccacttagaaaaagattaaaatgcactgcataacttcaaattcaacaagaaaaatcagttaatatatcataaccttatatgtctaatgattttgccacttacatggttgggctagaagacccttttcatgcacaataccacctgctaggaaggaagaaccatccatgaataacaaaatcaaaagaactcaaattaaagtaagatttaatataaacaaaccccaattctgtagccttctattcttcaaggacttccacttcgaatgaggagctccattgatcttaaataaataaagagaataacatgaaaacacaaatgacaaatatataatgattatatgtaagattaaagaaaggggaaaaggcattatcttacattgttcaaaagaagggtttgttgatcatgtgttatgaagtcaggtatgtacattagagttggtaaagacccaattttgaacttatcaaccttgttcttgctgctgctgctgctgttgttgttgtcttcttcttccatgtctgttttcactcactctgccaatccatcaattcaaaagaaaatgagagatattaaagtaaaatggtgatgtgggttgtttccaatttcattcgaatcaaataaagtctatggctttaatgcaattgagtgatgagaaaagaaaaagaagaagctgcaaattaaggactcaaataaaacctaacctaattgggtaccttctctcaatcagaaaatccaattacactttcaaatttgttttgtgataggcttaacgaaaacttttagtagtaaaataatcttgtttagtcccaaatccatagtagatttgcatgtagtgagattattttataaattttaatattttacatttggtaaattttaatttttttatcccataagagttagagaaaattggattgtacgtgtactttactttatttattttaatttttacttttattttcatattatttaaaatatatctactatttttatagatgattataccaattaaatacacttaaaagggagaacaggagtatattaaacaactcacccataaaagtgggtaaattttaatgaaataaaatatgaaagtatttttgattaatagataaaaaaagagatattcttcaacttatccctaa

SEQ ID NO: 298417 - DNA, 2125 bp, Cannabis indica
attttaaaaacaaaaagtaaaattttttaccgaacatgatttctgtttgaatttttaaatttttgattaaaaaaacaaaaaattatttttaaaatagttaccgaacagggcctaaataaataaataaaattgtttttatacttcccacttgaaatacaggttctatacatataaatacaggttcttcaagaaggttatttatgattcatcttcaactaaagtgatcttacatactattttagtaaatgatctcaacaagttagttatggttgaaatatatagggtggcacaatctcataaaatggtgtgccagtaaatagtgtaatagataggactacagtaatgtttagatcaaagatatgagctagtaatagtaaacacaatgacatttatctaaattcttacagtaatatacgaggccatacatcacatgcaatttcacctattacccgattctgtctcatatttgttattatataccagaaaaagggtcaattatattggaagaaagtaatgaagaaagattactagattccaacattttcaactaccccaaaacaagacataagcatacatatttacacctaataacaagctggataaaacaaacattctttcctactttcttctctcactttgttttagttagcttctaagcatgttttcatgattgagaataagatcaataaaataatgatcaacaatttcacactaaagataaaaatacccccatctctattttaattgaaataatcatgtgaaaagcacactttctgctctacaatttcttttaaaaaataaaataaaattgacgaagggtaatgcataagaattcttatgtaagagtattagtagatccatcaatgaaagaaggtatttttaatagtgggcattatcaaaagtggtgttggttgtgagaaagtgatttcttcaaacagccaactagcttgaagttttcccttaatgtcaaataataataataataacaataataacaataacaacaataataataataaaattaaaaattgcttcttctaaacaccaaagtggatagtcatcctattgtgtacttgtcaacaatcatgaagatgtgtgatcaattaagttgacgttattgctttgttattaaaaattttatgtgatatgatttgaatcttaaatgtacaagggggcatctatctctactactagatgaattacaataatattataatttaacttttatatattgttacaccaaactctccatatgggccaccttttattgagccaatttatttaacattttacatcaaatttaactcttctactactggcattgtaaaaaaaaaaagtagaatattgtcttacatattggctgcaagtaaaattaactgctgaataaataatacaagtataggggtgattctttgttctcaaccagttgtgtcatttaacagtacaatttttttttgtacttagttacaacattgtccaaaaagaaagtgaagaatgagacaaattccaaaatttgatgcctgacttcagctatataagaatatattaaaatttaaaacataatccaaacattcaaagtactgtgtgcatgtatacctctaggcaatatggttaacgttttgatcaagttctaaatagtcttttaaatataagagtgttgacttattggtttggtttaatttttatctttttcgaaccaaacatgtagtaatagggttatttttaaatataagttgacgttattgctttgttattataaatttgaaccaagagcacccatggccatggttaggggtggccatagttgtgggtgtttattggaccacatctaatgtttttaggcctatccagatctgatccaattatatattggatgttagattttaccatccgatctgatccaattaattttagtcatccaatcgatccaacatccattggatgttggattgaatcggttctatccattgaatgtattatatatatatttattggtttacttttatttatctaatattttagacctagtcttttttggatcggatcggatagcatccatccaatattttaggtccaatatgtattagattggactggatccttccaattcaagaaaaaaagagta

SEQ ID NO: 298418 - DNA, 2484 bp, Cannabis indica
aagaagattctaacagaagagagttagttagtacaacggttctgatcgaatttatatactaaagataataaaccagactaactaaccaaccagcaaagtacaactggcacaacctaacaaacttgcagaaagctgacatgacactaaaatgatattagtgaaaacagatgcaactaactacagaacagatgttagagacaacaaatactgaataaaagcaatatctaatttgccacacagaacatgacacttacagatactgtaacataccatataattagatttgaagttgtaagatgctcaaggactctggatcggcggaacaattgggatataaattagtacggacaaaaggatggtcttttggacatcttattatatctcaacattgagaattggtcatatatggttctttcttgtcattttgagccaggagggttgaactttaaagacttaaaatttactcaaaaagcaaaataaaataaactgtcaagttgtcgtgaaaagctccatgcattgaagaaagagactactggttgatatatattatataagactaatatattgtaagcgcgtacgtatatccaagagctattactagtaaaaattaaaagctggaaaagaccataatgctaaaataattattggaagccttaattacctttcagtgttgcactacttatttatatgtgtacatgtatataccgacttgtaaatatatataaactatataataggattttatgttgtgttttggtgtaattaaattcatagaaaatatataataaatgcacaaaaatatttgtcaagattaacataattatgatgaatgataaatttttttttttttttaatcaaatacaataaatatatatatctattcgactcatatatttgtgcattaattttagttacattttaatatatgtttttgtatgttgtatacattgactgttatgtagttaacacatatttaaactataatatacatgataatatttaggttcctaagcgtacttgacgggcctctaaagtaaacacatttctaaatccttaagttatgttcatgatctccaatatagtttaataatatataactcaattgacttacataggaggaaacaaaaattaacactcaaattaaacctccccaagtcgtgtacgtcggccttattattaattcaaactctaatgtttctctcctagattacattcttgagcgtatatagccctgatatattccaacatttttgtctacctttcattttgctttcttaaagctaatatgtacctcttctagttcactcaggcttttttcttttttggcctttatatagagagtagtttctctctccaaacagtattcttatatagttcatataattggtaagcatatagtttaggtagttgactttttctactcaacgaaaaccatgtcaaactacttaaatcactgatatatgtcaagcttttgtaaattgagttgcagagattaaagttacatgggctttgcaaacagtgctaatcgaccaacattaaagcagaagcacacacaagtattatacaagtaagtagattagattatataatttttaatatatatttgtgtacatgtactacactgcgctttatcgttataaacacaataacatggaaaacggtatacagtcatgcagtacacacatatattatagatatataataaattgttatttaaaaataatcattctgagatgagttatgcatacttactcctcgaaaagttctatatatacgtatatttataagcatgacatgcatgccaatttttattatggctacgtacgtaataatatttaacattttatatatataaatatataactcgttttctaacagaccaaaaatttattccaggcggataagtaattaagaattaaataaggagaagaaattaaaatgaggagttggcagccatatatgaagtcttcggcactatgtgcttctttatttctcttcctgatcttccttttagttagtacgtttgttccgattcgattctccaacaccactgtaagaactgatctactatatatatacattccttaatcgttatattatatgaataataataatataaattttttattttacgattattttgttcgcctgtcgtccatgtaaaacgtttagagaattgctaaaaagtctttcccggcacatgaaaatatacaagtttcgagcacttgtgttgaaaagtctttctcgatctacgttcatggcgtctacggtctactagatcataatattattttttttctttttgtcaattaataatacaacttttagactattttaataggtcaataatcgtactcgtaataaaacatgcagtatattgtggtttaaattaaacgtcacgtcttgctacaaaataataaataagaaataaacgttataaactttataagtcatatatcaactatattttttattttttatttt

SEQ ID NO: 298419 - DNA, 6909 bp, Cannabis indica
tagctcctctctctctctctatctattggagactagggtttttctgaccaccaggtacacaagcttcttcccaattttaggttttctttctttcaaattacattccacctttatctaatcttataatgacattttttatgaatttttttttctttacagtttcctccattaaaatctcaatagggaaatcttgttgtttattggtttgaataatttaagcattgtattgtgttcaggaatcaaaagcttcaaactttgcagttatgggtgaaagtggtaagcgaggtcgttcacagagagaccactatgagagtgaaaacaagaaccaaagaagacgtgggaatgagaaagacgaaaggggcaatgatgaattgatcgtttacaggattctatgccctgatggtgtcattggaagtgtcattggtaagagtggtaaagtcattaattcgataaggcaagaaagtagagcaaagatcaaggtggttgaccctttcccgggttcccattatcgggttttgaccatttattcctatgttaaggagaaggaagatgtcgagcttgaagacgagtttaatgaaaggcggcctctctgtgctgctcaggatgcccttcttagagttcaagccgccattgcgaatgcagtgtcttcagttggagattctgagaagaaaaggagagatagagataaggataaggataaggataaggataaagaagaatgccaagttcttgtccctgctagccaatctgctaatataattggtaaggctggggcaacaattaagaagcttagaagcaagactaggacgagcattaaggttaaccccaaggatggtactgacccagcacattcatgtgctatggaatttgacaattttgttcaggtttgtttttgtttgtccttttgctttactgggtatttgtatttgaaatgtagctttattgtgtatgttaaatttgaagaaaatgaaaatgatttggaagagtactaagccaagtttgaggacatggagttctagttgaccaattgtttaggctcaaaaattaaagtcaagaatgcttgaaacattaagtacaatatattattatccagatttgtcagtgaatttctttctagtatccgttctgtatgtaaactttgtttctttatgaacagataactggtgaatcagatgcagtgagaaaagcattgtttgcaatttctgcaattatgtataaatttcctcctaaggaagatataccacttgagacaaatgtaccggaagctccaccgagcataattattccatcagatgtcccaatttatccaccaagtgggctatacccaagtgcagactctattttgccttctagacagattccttcaatcttaggtgctacacatttacaggatattcagggttatgctgacactggaaatacatggtctctttattcatctgctcttcctgtagtgcctagttatagtgccgccactcgttctgaggagttaactattagggtgttgtgtccttctgacaagattgggcgtgtgattggcaagggtggtggtactattaaaagtataaggcaggctagtggtgctcgtgttgaggttgatgacaccaaggatgatcgtcatgagtgtatcatcactatcacatcaactgaggtattgcctcctgtcatgttatgttaatctgtttggcatttaagtgcacttttttagtaatatgtagatatctcttgtacatggtatgtgcaataggttggcagggccagggatctgcggcttttttgcaatcccctccctctctccttatctagttatgctgtcttatagaaacctcttgtacataggtataccatatgtgcaaaaggtgggcagagacggggattcttttactgtcttaaaaatcccgttgcagtttcctcactcaattgttttacacacacacacatatatacacgtacatataagaagctgaaccggtagttaccattttatgcagttacttatttcttctctgtagtctatatgtttgaaatatgtcacagaacatgttgcttagtaacattttgaacctttttattgtgtgaaataaagcaaaatataaaatagggaaatatggagacatatgcctatttgaaaacttctcttctttcctttaaaatatcagttgttaagatattaataaggtgtacaactctttaacataaaaattagctaataacaatgcttggaagtcatggatgttaatgcggtgccactagcctatttgatcgatctattgttttgcaaatcaatgattgcatgttttctccaattctggttacactctgttctattatattttgtggatcattccaattctggttatacatttatataaatgtatatatatagttttctttaagtgcaaatggttatattgtatacatctctactatgtgttgataatatttgttgtttgtcacatggtagtcagaagatgacatgaagtctatggcagttgaagctgttttattgcttcaaggaaaggtaaatgatgaagatgatgacacagcgaacatgcgactgcttgttccatctaaagttattggttgtatcattggaaaaagtggttccatcattaatgaaattcgtaagaggacaaaagctgaagttcgtatctcaaaaagtgagaagccaaggtgtgctgatatcaacgatgagcttgttgaggtttatttcgaaaactttttaaagaacatggataatgataaaatcctttgattatttgacgtttacttttttttttaaatcagcattattatagtaatcattttaattttaattttgttcttcatacagatgtcgggagaagttggtaatgtaaaagatgcacttgttcagattgttttacggctccgagatgatgtattaaaagacagaaatacttctcgtaatccttcttctggtaatgaagcattatactcaagtggcactagcctgtcaatgtcatcaatgttgccttctgttcccccagttgctcctttgagtagttatgatcagaggactgagagtggaagtggcttgggcttgatctcatcaagcggcctctatggatatggatctttaccggtatgtatctatttgtacagttatttctgttcaaaatgtctccactactatcactagtactataataacagtttttagctgtagttttgacgcataatcattaatgccgttgattgtaggttatcttgacattaatctaagattttgattattttgcatcagcagattgatcgtgttagtagtttggttaacttagctagtgattctattggttatgtccttctagttttttagaatctcttttagaccttagagtgagtcaggcttgaatttttcctctttccgggtacttacacaattacatttaactttaattagtaacctcttgttctgtcaattaagaaatgagtgtttttttgggaaattcttttaattaattaataatgatgattgccttcaaattttgttgatttaaggtgaggtgataaatcttaattctctggtacttaaggttcatattttggccaatattgtttgattggcggcatgccttatttactgttggattattctaaggaaacatctgtttgctcccatctaattttgtctggcctttttcatttatcaatttttcaataatagatgggagaaaatggctacggtggatcaatgtcgtcctattcatccaagatgtatggagggtgagtattttaatttatgagatttggttgaagtttatatcctttgactttctcacaccatgcacgtatgcaggttgacacccccttcaacacttgagatgttgatacctgctagtgcagtgggtaaggtcatgggaagaggaggagcaaatttagccaacattaagaaggtgtgttcatcccttaatattctctcttctttctccttgtatttttacaattgacattcattgtcttgggtttgattaatatagttatattcctacttcaatgagtagtcacaaatgttcaaaagagtgtagttttaggtcataaatcacacttgtgtttttgtctaaacttgatgcatgaatgagaaatctggactccatttctaacttggtaattagacagattttagtaccaatatttcatacacatgaacaaaattaagttacaggtcaagaagtcttacacttaagagttgagaagaatttattaaaattgcttgaacgagtacatataactaatctatacttatttcattcatcttcagatttctggagcagcagttgaaatttctgagtccaaatcctctcggggagatcgaattgctcttatttctggaacagctgatcaaaagcacacagcggagagcttgattcaggcatttatgatgtccacttaacttctaaggatacctcttggtgtttgaaggtgaatggttatatattggttggttctcattttcgtttcctgtatctatctcctataggtttcggtttcaggtgagctaatctttaggtgtatttaccagtaaccatcaagattgtgaaggaggatcgatgcttttaaggggtgtatagggtttctttctttcttttatcgctgtctgcaacatcgccaaactttttaggaacctgataggttctttctttccgtcagtatatggttttaagaccttttgttgtctagtgtaggccccatctgatttccaatgctagcatactctgaatttgatgttctcgccggaaaacttattcactagtgatcataatttatcaatcttattatatgtgtgctattttctcttgccatttccaacctttagctttcagcttcttgctagaagcatcttctctgttaatggtgcaagtgttatgtgattgattacaatctcttcttttgagattcttcttgatattacaatttcagtgcagctccgaatgacggaaacttattctatacaacgagatttcctatcatggaacatctggtttctgtctgtgcttgcttctttattctgtgtcctctatcttcattcttgtgtgaaaaatttcatcactgaattaaatcatggaatcatcctaaaaattatttatctgatctttttggatcccttttgcgacatgtattgctgtaaacttcagatcacttctctacctgaattttgcatatctgtttatgaaaatgtatattgggggtggccccaaaaatttatcttctcgctactccgatcttcatcttagtttagttgactagtaaagaacactatagtggctttactcgttagtgataaatgagtgttcattcagcggcaaaatcatattgcgacatctattcgttttatgagcttaactgctttgcatattctgtttgtgaaaatgtaaacagggatggcccccaaaatttatcttctcgctactcgattatcatctcattcttactttagttgaataagaaagaacattattctgagttcagaatcgctttactcgttagtgataactgagtagtgttcattcagcagcaaaatcatatctcgatatctgttcggtgcttacgcaaccaaactatgagctaacatgttttgcattattagtgcattccttggagttatataatttcattggtatcaattgagtggtagaaagaatttatcacaataaagtcaccaaactcaccatgcttcttccagagccgcctactcattttctttcgatacgaaatttactttatataatccagtacttggttgcctatatgttgaaacttataattttgaccttggctaggttctttacactctagattaattaggcagttggttataatttagttacagctaattaaatcatttagattgtagtctattcttctttctcgtcgtcttaatcgggcaaaggtgggactgggatctgatccttaggaagttacagtggctagagactcttaccatctaaaattaacttatacctttttagctttgttttatctgaatagcaaatcttgcttgtttatacttttgctctacctttctcgatcgatttagaacttgcctccttagttttcttccgtttctagataatgttcataccatttctcccgttgatactatgtactttcatccattttaagccattctagtagaaatactaattaacaggattacgtttagactcgagagctcggggtcgagctattagcctttatgtaccgatcacttagcataggtatcgattgtttggttaacgaattcatttggcaagttgtaatcgaaaaggtaaaatttagtcttttcggtggggattttgttatagtgaaatctcctccaagtaaagtagcagcacatatttttttggtcatgtacttgtatttaaattttgtaattagtgttaaaactatttctaacaacaaatgtctaaattgatggtttgtattgtaatagcaaagtatgcaaacttggtgaatgtttcattatttacaaagccaaaataatagagttggtgtatctaagtgatgaggttatttttctgtgtttttaataaatggggattaggaatgggatcatactaaaggttaaaaatgttaataggtgcaaggattttatgatttttttaaatttttacgtgtaaaaggttttttttaatatatatattataatgatattttatagaatatatataaaagtaactgaaatttacataaaaaataatatacacataacaaaataataaaaatatattaattttatgtaaataaatttttaaaaattatatgtatagcaattgtggtggctatgaattgaattgtctcatcaggatttaaaattagagtttttacaccatatactaaattttttattttttactttttattgtgggtaaatttttttaaaaatactgt

SEQ ID NO: 298420 - DNA, 790 bp, Cannabis indica
acccggtgtttccccttacggatcacgggactactgactgtcacatatttattcttctaataatagtctaaaaaatttatttatttttctttaagactcacatcaactcaaggtcgactctgctctacacattcattataaaacttaatattcaccatttcatttatggcccttcatatttactacatcttcaattcatttagtaggtagtatatttagattttactgtattgtatagtattatattaaattgtattgtcaaagccgaccctatgatttatttggttctttataagaaaaaggtgatattttcaaaaattactaaaaaaatacaagtattttaatattttttttttgttttgggctcctgagctagatatgttttaggccagtcttagttcgtctcaacccaagcttggcctgtgtattgtatatacttttatataatactactttaaaatttgatttatattttaatattgtatatttatatacatatacaattacaagtcaatattaaatatgtataatacaatttaatatcataatatataatacagtattgtgtaatacattgtaccaaacactacttaatatttattattttatgtagattttataaatatagaagatagtgtataatatctctctttttatatatataggtgtgtaaattataaatatatattttataaatttgtgagaaatttaaaataatttaccataagaaatttagctcttatatataggaataaatctctgtaattccaacttcaagatcacacttaaa

SEQ ID NO: 298421 - DNA, 3189 bp, Cannabis indica
tctcccaagataggttagttagagagaatattcttttatgttaaaccaagaaatgcccttagatagacacttataatatataaagatatgaaaaatctcttaaataaaataaaaaatatgaaacacacttttgtagttatagaacacaattcccgcccccatagcaaaaagattgtagtactaagttgaatttgaaggtttgaataatttcagcccaatatctgatgataacatggcatatgatcaaggtcctgcaatctgcattgtaacttcctcatacgtggaaaaaatttaagaggcaaagaagaaacaaaaaaggaaagttacgatcaatacaagtaggaaaagtaattcagtacataaaagtattctcgttattatgatatctgttaaagaattccaagcaatgtttacaaaaactttgatactaataaacagttgaaccaattaaccaagtcattcttgatctaaacacactgattctgagtcccctacatctacatcaccagctgcactactttcttctcttgttatagtaaaggatgaggcagaagagccaacagtttctggcaaagataaagcctttctcttgcttctgccacgcctccattttctcagcatttctgaaacatcttctccttcatcaccactcatctgtggatgatccataggtggttcacctgccaatgttcctctttcaccaaggtcgcccgagattgcagccgaaaatgggaagaagactgatttacaacaagaaaacatagcaatcaaaataataatgtaagtgtacagagatgaccacacatagaatgtccatttccaacttcgaacgaattctttcgtccatggaagctttgatttcatcacaatttcagattcatacaactgtgggagaaaatgggttccagctcttggactcattattactcttatagctcctgttcttggatatccctccttgtattttagtatttcaatggttagtttctgtgtttcaccagctattccaagtactagtggtatgctcataataaaagttcttgctaatcggactggtaggcttctgaaacgtaacatacaaggcagacttgattttcccattacgtgaccatcggtggataaaacctctccactcaactgaaaaaataatacatatttagcctcttttataaagagtaaattaaagatgctgtattttgcaaaatttaaatgtatttcttaaaaaaaactgctaaaaaccactagtagtgcttatcgctatctatccaaaatctcacattgcgtcgaattatctggctcgcaaaatttaatttcaaaataattatgaattatagctggtcatttacaaggtgcccattgtgctaaacatcaggtgtcataatggtataaaataatagcgaaaaaaaacaggctgttacagaattagcgtaaagggtgttattttgtactattttcatatgaaaattaaactttattttgtaccgaacagatccaaaacttttttgattttgtctccgtatcttctacaatgcccctatcaaaggaatgcactcatgcaccttaagaaacttttagtccgatttaatttataactattcaagatatcggtgttccaatctaaaataagatagtcacacttttttaagtgttacattttttccaatttcttaaaattttggccttcacagtacacaaacaaattcacaaatagtttcggtacacaaatacaccaatatttgagatttttcttttgaataatattttagatattttacgatgtaataaccaagttcaaagaactaaattcataagaaaattaaaaataaaaagtaaaaagaaaaactcatcattcttcggttgataaaaacatcaaaattcttaataaatggtacacaaacaaattgagaaatagggacacaaaacaaaactgtggatacctgaaatacaccaacctccctattgaaaccagattcaggcatcagaagtacaacagagacggagaatgtatgatccattggaacgcccataactggtttcttcttctcacccatttcaaacccttgccaattcccgaacgagaacattgctcttgggtgaggttcggtaaaatcaaaatgcaacctttctttcaaaatcacaggctcttccacccaaaatcggaccaacccaacacccaaaacgacagcaaaaatcataacaagaagcagaaccatgcagacgtaggcggccccgacaatcccaaaccccaatcgcttcagcaatgcgatggtcccatgggtgaggacagttggggctttctgaaccgccgtctcgatagagacagttgtcttctctgcgcggcggtacgagtcggagacaagggacataaggaaaatcacaggtgagaagagaaacgacaatgagttgtggatcaactcggcttggagaagcactagctttgtgaaccagtctggttcgggaatgggtttgtaatagaagtacttcttatcttgttcttccattatggtggttgtggttatggcggctatggtgggtcggtggtgaatgacgtgaccatggtttttatcagaagagagagaggcagaggtctcaagctccaggtgggcattgtgcatggaagagaaggggaagaacaagacgtggtacgagaacagagtgaatagatgacaagtgttaccgaaagagataagtgtctcacgattgtcgtttactttgctaggaaaacaacgaaatcttagtggggtaataaataaattaaggaatatttacgggaaaatcgctattttatgttttcaacacttaatgaacctattatcttttactttttacacttttctctaaaaaatttagccaagtatcaccgtgaactattgacatatatacggagagttttagataaaaatgttaagaacaaaacgataagccttcaaaattttaattcatgtatgaaaaaataattgtcaaccaagctatagctcaattgttcatgtcgtggaaagcttagtggcgtttatgagttcccttgatttgttcgaaaataatgcaactgctaatttttttgtgtctttaattttgtatttgtgaggggagattatttttttttttaataaaagcgaatttagattaaaactaaaaagactatttttaaaaatatggaaaaaattattaaggttatgataaatatggcat

SEQ ID NO: 298422 - DNA, 3543 bp, Cannabis indica
tgcgtgagatactacttgattgcgtatacttgcgtaataaacataaaattcgtaataataatcatataaatacaaaactcttccacgacatatctaatttaatactataaaaccaacaatatgatattttcatttctctacatgcatggcataatcatttcagtacatgtatgatattatcaactctttacatgtatgatataatgagaaattatttgtattttaaaattattaaaacaaaatgtcaaaattatgctccgtcaaatccatattacttgaaaaataaattaattactgtttaatagccttatttcattactgtaagtccaacttgagtatatgtgccgagtattactagaaatagatttcattttactttgggatggttaaacttgatgcacagatctttgtaccaaaattatgtaatataaaaatagtaacattacaattatatccctttaaaataatattattaaatgttaaacattttgacgccactatgcccagttaccaaacccggttacaacaggtcaaattccatctggcattagtaatttgtactgtatgttaaataaaaataattttttttttgatgaactagctgagaaattcattactaaacttaattttgaacaacctgtatgcaccttcaaataagaaggccaaattatctatacacaacaaaaataaactacacaactatgctaacttttcaaaccattctttatcactcctttaaattttccttggcatcacacaagatattcggtttttcacaagtcatttagcttgctgctgtaaatgctgaactttaacttcatttgagttccaaattttatcatttcggctgaaccatagttggtataccaatgctgccactgccgaagcaaagacttgcttcttgaaattactttgcttggatctttcaatccacctcagcaggccatgtaaggttgctggtttttgcatgccaattcagccactgcttcagctgggaaagaaacaaactcaaaacaagacattcaaagaataaatgatcctttctttcacctgcattgttgcagagaatgcacaaaggactgtctattatttcgaacttgaataacctgtctcttgttttaaatctatccaagatagccaaccaaagcacaaaactatcttttgaaatgttaagtttacaacattgccctttccagagaaagcacctacaaattcttccaatttcagaagttattctctttgggagaatcaaaatttggctcaaatatgtgtgaattgtaaggagcactgagtaaataagaacaactcggcctgtaaaagagaggtttctatagctccaggtcttaattctagcagtcattttctggataagacttgtacattttgaggcagaaattttcttggcacaaataggtatactaagatacctaaagggtgttgtatgcctactgaaaccagacctgtctagtactctttgaatctcactttcctgcatcccactgcaatatatagcaaatttagttttattcggttgcaaactagatgtattagagaagagcttcagcccctgtagcatgtagtaaatgctcttaaaatctcccttacagaaaagtaaaacatcatcagaaaaactgagatgatttagcttcagttcagcacatctttcatggaaatagaagtcttttttttgcccaactttcttcaaaattctgcttagatactcaattcccgacacaaataacagaggtgacataggatcaccttgtcacaaccccctctttgattcaaagaaaccatgagtggatccattgaacataagagaaaatcttagagttgtaatgcagttcataaccagcctaatgaacttagttagaaagttagaagcattcagcaataaatcccactccaatgtgtcataacctttttgcaaatcaagctttatcatgcaattaggctttgtagattttctaccataatgtctaattaaatcttgacatatcattatgttacgagctatatatctacctctaataaaaccaccatgattttcagagacaatacgaggaagaattattttgagcctagaacatataagctttgtggcaatcttgtataaaacattataacaagctatatgatgataatcactcacagtattagggcatttgattttgggaataagagtgaagactgttcagttgatctccttcagcagctgtccatagtgtaagaaagatgtgacaacttcatatatgtctattccaacaagctcccaattatcttgaaagaagtagctactgtatccatcaggacctggcgatttgataccagggatgctaaaaacagcagccttaacctcttcaaggaaaattctgtttccaacaaagcaacatgctggtttgaaagaactggcccttgtcgaacaacctccattaaaacctgttgtcttctttctacccgagttcctagaaattttgtataaaaatctaggaaagcattcgtcactacattagggtcataaattctatccccatcattattagcaatagagaaaatggtattttgagttctcctctgcctaatagatgagtgaaacagctctgtattcatatctcaatcgcaaatccaatatacttttgccttctgatgcatgaaagaacattatgcttcatgcattgaaacatactccttccttgcttctaatttcatggcttgaaagtccacattcaacagatcattatgcattttcttctgagcttcatccagcttttccctggcttgcacttctgcaatctaaatgtcttggaaacattccttgttaattgcttttaaaacactttttagagccttgagttttgttactacatgaaacatcttagtgcctcttacttcttgctgccacacttattttactttctggttatattgaggatgttgtctccacatccgaaagtacttgaagggcttcttcccaccagaaaactcaggatatacacttaaaatagcaggtgtatgatcaaagatgccctcattgaggaatatagcctcagcattcgaaaatctatctaaccgtgcttgatttgccaagattcgatcaatctttgaaaaaattcgattggggccttgttgtttattgctccatgtgaaaaaattaccactgaattttacatcttcaaggtgacaatcagtcacacaattctgaaattcaaaaggaaaaaatctagctttatctccaattctttcaacccttgccaaaatttcattaaaatcccctaatacaagccaaggttccactgtattatgttggacttattttaccaggatctaggtttactaacaagtatgttattaacatcctaaatatgaacttctaaaatgatatgaaataaacacatataaagtatcggaaccttacagtggttgcagtggaatataatgtctccttccactcagatctctaacccttgtatcctttctgtagcagggtatcaccaagatctgaatccgaatctccttctcttgaaactggattcttcacagcct

SEQ ID NO: 298423 - DNA, 2464 bp, Cannabis indica
aaaataaaatttttaaaaacaaatattttaccttcattatgtgattaaaaaactagaaaataatcccatcgaaaaaaattagaaaataaaagtgttaccaaacgacacctagtgtattgtcattatttgaaatattttgttaaaatttaatttcaataatgatgtaaatttggtaaaattaaaattgtacttaacttaacataaaagatagcatagactaaattttaattcataagaaataatacattttttaattacctctttattacttattaatactattcattaatgaaaaaagtttttatatttataagattttaaaataatataaataaaattaattgttttgtatattttcaatgaacattaatagtagtatttacttttacaggtaatttgaaagtatttgtttgagaaatgctaaagggcacctaaaaggcaccagtggtgcctaacaccctcctatgtgttagtatcgctattggtcaaactaagtatcgggtctcatatagtttaatataatggcctttaggaagtatcactaaccaatcgcaacgcgacatgtcgagaaggtgctaagcaccactggtgcctaatagcaatgctcgtatttgtttgattgattatataaagaacagtgttattaggtggtgtggtgcctagcaccttctaggcatgtcgcgttgcgattggctaacgatatttcttaaaagctattatatttaattatataggacgggatacttagttggaccaatagcgatattgacacataagaggatgctagttgttccgtttaaatttctcttatttaaattgtttgattgattaatgtatttgtttaaattctatatatgctatattttaattatgaagcttcttttatttgttgaattaaattaatcaaaagtagcaattaatactcctagttattttcacacactttaattaataagagatcgagtgcattataccccttcaatttcacaaatttcagcactatgcatgagcattctcacatacgcatcaactttctttgaaacttctttctcggtggctttgtcgctcgtcgcaaaatgatctgaataagctttcgtatgataacccactacgccaaacataattatataactacaaattaaaaaaattaaaaaagataaataaataaataacttgcataattattttttaaccacacttactcgggtgatgtaaagtgtgcaagattccaagcactacaagcgtattccccggtcgaagaatatcacctctcactcgcacattatgaacagttctttgaagctcacactcggatcgatccttggtggcatcataaataataagaacgttagatggcgaaagaggactcaccgtttccattattaattgaaaattaatcaacaaaagtctcaactgggtatggacactcttagtcttaagtctatagggtattttggttattttggtcaaagggtatttaaatataaaatcaaccctgtacgataaagaactatggtgatattggcacagctataaatataatacttcatatagtactaattggttcttaaatggtataataatgtagtagtttttagtgaacttcatcatcatttatgatcatcaagtctttcatctcattgtaagccgtagagatatgccatggatattcgatgttgtctcaaatattttagaaataataagcatggttgccgtcttcattattaactgggacaagaagtacattttcatatgcttcgagacaacaacgtgggttatcatcattttaatgaataatatacctataattttattattttatgttttatggcttattgatttgtcccattctaattttctttctcaagtatgtgttgacataacatgcatatatatatatatataatttaaacaaatatcttaattaatcaataaacaaataaattaatcaatcaaacaatatgctatatcaaacaacatgacattacctcaccttgactctcattataatattgtccgttttgggcttaagccctcataattttgtttttaagcacctttccaaaaagcctcatactactggattaggttcatgataactcatgtttatttttccaatgtggaacttgggttgataccccaacaatcctcccctcaaaccaaggaccacatactcgtggtctcccctccaacgaaaccaccttatgccgccgctatcaccaacgaaactcgttgcctgaccattacctttgtgaggaggactttcgacacaggacctaacaccgatctccatcttgtaccgtcgtaatctcatcaacgggacacaccacctgactacctcaatatcagatagactttcgatacaaggcaccatatatatcttctatcgcgagatcatcacattgaaggcttctcctacacatcgcaaatatagcccactatcccagcgctcttaaacttttgg

SEQ ID NO: 298424 - DNA, 2700 bp, Cannabis indica
tgcatcttgtttttcggtagcccatcacgaaagaattccacagttaagcgtgcttgacctgcctgtcacaatcaccccttttacggaccctgtgttttgcaaaaattatcaactagactatctattttgtaaaataataaactggatcctatattttctaaaatagtacaaaataatgtactctgagcttaattttcgataatatttttctaatacaacaaacttgaaaataatttatagtactaacatatacagaatataaaaaatacgcaattgtgtcataaaaattctagaacgacttattattaatttttattttgataaaaaaatcagttcaaggtactattttgaaccattttacaaaatacagggttcaatttattatttaaaaaacaaattgtccaaaattaataatttttgcaaaacacaagatttaaaataatatttatcatatatttttttccttagaaaataatttattataattttcatcataaaagactaaaaaataaatacttcatgtattttcattactcagtagaaaaaagaaatggaattataagaaaagaatgaaaaatatgagctataagaaatttcatacatataattagttgaggatgtcggttaagttaatgataatgagatttgatattatatatgttgaatggaattagttttacatgagacaaaaaacggtgtcgtataggaaagatgttgaatactttcaacaaacaacactaacataacataatgaatgtatggttgtataattttgttgtgttccatacattttcaaccacaaatcaaatctcactattacaagtctaatactcactcactcatacccaccaccttctctgttgtccactttatcacaatcacacattcttactttctctttctctctcgagattctaaccaccaattaaatataatcaaattaatccaattacatttacatccttaattttatatcaatattacaattatacccttcaaattacacacataccaataacaagagcatttctattgggcactaggcacattagtgttagcacattccatagataccaccttacaattagtcactaatatttgttagaaattattttcttaagttataccaatagcaatatatcactcaggaggatgttaagcaccgatagtgccttttaacaattctttaataattatatgaagagcattgctattaggcattagtggtgcctaacacattctataagtggtgctccatgattggttagcgatattacctaaaagttattttcttaagtatatgggacccgatatttaattacaccaatagtagtataacaccgaagataatgctatttaccagtaatacattttagcaattctctaatatatatgctaaaagacatcagtggtctagcaccttgcaaatgtgtcatatcgctaacataatttaattcaataattatcataaaatatcgctaactaattataaaatatcatctgcaggtggtgttagacactactgtgtcttataacaagaagtgtgccttataataatgttcatactaataataatacaaataattagaaaagtctataaatatactatctaaaatagtgtttcggcatactccttatttattttgggttttttaatctaattttttatatgatcgtgtgcgatgtagttattcaggacatttataaatttttaaaaaaaattaaataatttacagtatcaaaaataaagttcaaataatttgttgtgttttctcttatacgagtggtaagtaattgtttgagctttgaactttattttcaacactgtaatttgttcatgattttttaaaaatttacaagtgatcttaaataactataacatacacgatcataaagagaaaaaataaactaaataggcctcttgaatatcaaaatagatagaagatctagcgattttttttagggagatagtttttgtaagaattttctattaaagaatcataatgcccgaaatcaaacaagctaaggccataaacatgaaggtaagctaaggccattgtatatctcatatactgaatttacttattttgctagtagttgtgtaatttggtggtcaggaaatcttatttgtatcaatgatcttttaatagctgatgttatttttgaataaattctttcatgtatattttttaagtatttatcacttttagtgtttagtggttgagattttaaagagtattgacattaaatagaaattaaaaagtcaatgcaccaacttaaataagagtgtgaacattataaaaaattaatgtaaatgtgaatcccaaaatcaagtcctcatacttatataccatgtgaatacacaccatccttaattaaaaacaaatctaagatccaaatacattctttatgttctcatttttaaaacaatatcaagtacaaaatagaacatgtaatgtaaccactaactaacttataataaaaacttaaaatacacaatttaatatacttcttaattaaacaaaaacaaactacgtacataggaaatgaattgattaaagtctaataaatattcatgatgcaaggacacaattgtaattaacataaatccacacccccttgtatgtatttagggaaattttatttacaccccaaaaatttttaagtacacaatttttattttatataaaatttttattt

SEQ ID NO: 298425 - DNA, 2714 bp, Cannabis indica
atatcatatttaaagaattttgagaaaaaaatagggaagttgctgtacggtgctgtaaattttgatgtaaaataaagttaattttaatgatgtactttgaaagatagagtaaataagttgttagagtgctctaagtgctcactaaaaaaatctaataataacaacctaagaccatctccaacaggagatgtaaaagttgatctatatttagtacaaataataattttgtgatattttggtatcattttttactattatgctctaatgcataattgtaaatcttgatacaaaatttaatatgtcatttaatgcttatctaataatttattacaaatgtaaaataataataaacatacaaaaataaaaataaaaattaataataaaatgataataatattgaaagttttttaatgaaaatgaacatacttcctaaatttaataataaaatattagaaatagtataatagtaaatataaatcattatgtgagatatttgcatcacaatttggcacaccattagagtaaatttttgataaagtgagttacattttgcatttgcatcacttatttagagatgctctaactctacaatatttattgcttttttatttttatttttaaattaataataatataacatattaataataactcataaatcatatacaagtgacaaaataataatccataaatcataaatcatcgacattagatgtagcaacgattactagataagatacgataataacaaaagttttgaaatcatatacaattattttcttacatttctattttgtgtgagatcttctatttttaatattttttctagatttctttaaatttattattttgtttaatattttatttataagttctaaaaatattttatataatagaatgattcatttatggatatcttatcatattttttgtactatgatgtggcatctagctagatgacacgtgtcttacattcctcaatttggcggatggttttactcctagcagcccacaaggattgatatgaaggtccgagtacaaacataacagggtgtccgaacagagtcatcaagggacatctgactagctcgatcgtgtgatcaactcacatgcactggctaggaaatgtgagttggccattttagcaatgatcaatgatatctccaaacttgcatgacacgaagtaatccctactttgtgggattgattcgtacctttagaaaataaagacaatcagcctggacttatataatttctctattgtaattatagaaacatattaatttcctattttatttcttatagattaagggaaatcattctttgtaattagtccctataaaataggggtttcgtctcactattgagggacacgaatttaatcagagataacactcaagagaaaaattgtgatctaaaagaaaattactcagagatcttttgtaagaacttttgagagagaatactttgttctttgtctcattagtcaatacaactaaaaaaagagtaggctattaccactgtcatggggtcgaacctctaaaaactctgaagttttctatacttattgttctttacttcatattgtttattttatctcatctttttaattaagactcactgtcattagctaaaaacgaggtcaacaacatgaaagtgagtaattaactcattgtttaatttattttacgaaacaaacatattatggaggtaggggtgttcatccaatccatttcgcactattttgctcatagtgcatctgatccgcactaagtgtgaattttatattttgaatctaatctaatccacataatagcttaaatcaaatccaatccattctgcaaaaatagttactttttaatattaagttatttaatatttattagaaagtatttttttaactaacaataaaataaaataaattattattctttaatgtctctgttattcgcatttcagcaagtatgacacatggatattaattaaagaaggaaaaagagtcattaggccacccaaacacttcacctagcactctgggaggatgaaggcatagacttcgtgggaaaggtctccgtgacgggagtctcctcgaatgttgtcgccgcaaaaagtatccaggagctaaagcttcgttccactccagcagaggagaccatttgcttccaagaagaatatggatcttctcaaatcagggtgcaccagttcggggtacgactttggcctgcagaagctcaacccacgtgtgtctggctatagacctagtgactggggtactttgtcaacggtgtcagaggttgtctcccacgccacgccaccatccagagcatccatgtccttgtgtactgggctagataatccaattgctatgaatgagggaagttcaaataagaatggccctgaggtgacacgcgtctgaaacccagctagtacagccagtacgatctgacatccataaaaactacatgggaaatattgttgggattttatgccctaaataaaacccatttcaatgtaatctgatttgttatcaatagaagattagaaatcatttatgtttacatgtagttttcatgtttatggtttaatgtgtacaaaatctgttaaatccagaacatatagttattcacaattacagtgtcaagacagtggaaggtaattgtgattatatgcttcaaaagataatgtgtaacaccctaactaatttaggcgtatta

SEQ ID NO: 298426 - DNA, 1474 bp, Cannabis indica
attttttaacgggagatcaaacctaatcgttaaatttaacagaatcatattctgttaaaccaagaaatgccgttagatagacacttttaatatataaagatatatatatatatatgaaattatctcatttttaaaacataaatagaaaaatcgatattttaataagggatttaaccatggttttaagttaatgattagataatttcttttctcgattttaatttgagtaaaaatttaggaattatattccttgttgaatcggaggaactcaaattcacacttgaattcaatgaactacttagcttgaattctttataattaggtatcctatgatgagtaggcctagcaaaatttcttaatttcacaataaaaaaaatatgaggaactctagtttgagcacatatatgaagattttttttttctagactagttactattactaaatttttataaaaaaatatttagttttgtgtcatattatttagttttgatttttgtattcttcaactgatcctcatgttgtagtaaattaggatctttattagagaaattgctaatttgctgtccaattttcttatagcatatccaatttatgtgttcgtcaaacaacttataattgcatataaattatcatataataaactagtttgagtcccaggcttatgtattgtgtaatatataaacgcttgaatcaaaaaaaaaaactagtttgattgggataattttcatcttctctataatgtattacaccctgacttttttcaataaatactcataataataatattaataatgtcaaccttttttattcattagtaaaacaaagaacttattcatgttggtatagatagtagaatgaaaagcaacattaggctgctacactacacgaatgacttgcttgccaatatttttaccagaaaatatgccaacaagagccgatggagcattttccaacccttcttttatgtcttcaacatacacaagttttccatccttgtagagagtagtaacatgttcaaggaaagttgggaataagtgtaagtaatcactttggataaatccttgtatcttgagacgctttactattacattgttgaggtggtaaaatgattgaggatcactaagatttttcaatgacaatattccacatgcagcaattctaccgaaatttctcatgtttcggagtgctgcatcaagcatttctcctcccacattgtcgaagtagatatcgatgcctcgtggaaagtacctataaatgataagtgaattataaaagcgtcaacttatacaaatttcttgtgtcgagcattttttatataaaagtattaagtagtttgtcttctgatattttataagaaattatcaaaaaaaaaaaatatattgtttttaaagaaagattatttcatacctcaaactatatctacaatacagagaaaagtattaagttagtgaatgatattgatagtcacattta

SEQ ID NO: 298427 - DNA, 4568 bp, Cannabis indica
aaaaaaaatttaaaataacctaggggaattttggtaatttcactaatccatcaacccaacattctaaaaaaattctaacccaatccggaatattctcaaaataattcttccataaatgtcgtgacatttctaaccaaaatccccgggccctattttattttaaaaaaataatggtatccttgatacgcacatatctcaatataatctccgtaattcataaattacgctttatatgtcattaaataaactctcggtacttaccctaagtcagatcataatcttacttcgttaccaaaataattccatatttaataaaatatgtctactcaaatattatttgttttccgggatattacatggagactctttagatgaggatgctctgtctttacttgtttgggagggtgctcctgctaaagtttagggtaggaattatttatccagttttgtttctcttttcacttgtttaaatatttactaagtattttattctattcagttatgtcaaacaggatgaaaggcatgttgaagaggaaggtcggtgatagttttgactagaagtcacctattaagaagccaaggttaagagatactcctccagttagcattgttccaagctcccagaatactcgtcctaatactaaagaagctagtagtgccaacttctaggacagaaggagtagttgttgtaaatattttagaccatctgccttcaaccataaagtctgctaaggcttgcttgcctgtcgtcctatcaaagagttataaatcttttaagggctcaattggggctgatgtcgcccatgctgagtggcttaacctgcctaagccaactgccacttcaattttcatgcagcccaagaccaaaaatgataaggaaaagctcaatttttatcaagactgtttgatggccgaggtaaatgagcagctctctggttttgaggatatggcagtggaacttctagttggtggggtcctaaaataaatcaccagggtgagtctatattttaaagctttcactcaaattatgttttccaaacaatttgaattgttttattgtttctttttgcaatctaatctaaagttggcttatgcctactcccgagcttagctaacaactctcaaaactagcatgaccaccaatgatctaaggaaggccttggaagaggccaaaagtgatgtcgcacagaagggaaaataacttggcaaggtgaacaagcaactcgttgctgcgaacaagtctattaatgacttatagtagcaaataaaagatatgtcgtccactgccaagcttgaagtagatttttagtaggaactcattgatgagagggaaggactctgaatacttcttcaaggccaagaggtcaaggttacagagttgaccgaagcgcttaagcaaaaagaggaatccttcttgaaagagaaaattgctcttgaggaggcattggctgctggtgggaggctcatgccaaatatgctgagtatcatgaaacaactgttgtggaggtgttttatgaattttgaaaggctaaccccgaggctaactttggttatcttgaagtagatgtacacaaagacatgctcaagtattgcaatatgaggagggttgaggatgaggtgaaaaaaatctgtccagaatgctgacaaggagaccaagaattctaatccttcctcagccatctagaatcagtatcaagagcatgggactcctatggaatgaacataaaacccttttattgttctcttcagcctacgggccttttatttaagaccacgtggccgaccaagcatcttttaaacttggcttatttttatttatatttttttaagacaaacagctggttgggtagccttctaagcccggactcattctgcttctttgtctttaatataaatatttttggctttttaattttgttcttgaattttgccatattttttccgtgctatctaacaatacttgtgtgggtgtaggtgcccccaagtgaccaagcaaacttttgactcttggtcacttgcaattcaacaagcttcttatttgtgtgttcggattttgggtatgggcatacctttttgcacgcgtgtcaggtagttttataacttgccattatttgcaaataaaaatataaaattgacacaatttaaacgataattattctctttattcatttattggtcggtatgtgtctttacttaaaagtaacttacatttattgaatgataaaagttattacatgatctactcgaatcttagctaataaatatagaaaaaacttttgaacggtatattccgcccaaaagacattattaaagagaaatcattgttaagatgaactgtgctttagaggtggtcatcaaaccttagcataaggccatcacttacgagtaatatttgagcatcgtgcaattgtgtggtcctcggaccttttgcatttactaaaagtatttccttagatgtattccattccaataccatgatactagaactaatttcatgttttcatcataccgaccaagcttgtatgctctagattttgtaactttagttacttggtatgagccttcccaattatgtctaaacacaccgggtgcactacctttagtgttatgaaacactcttctgagaaccatatcccccataaagaattttcttacttttatttgcttactgaagtatcgggctactttttgttgatgagcttgtagctttaaatttgctaagtccctttttcttcaattttatcaagtgattcttctaggaggatgtgattggtctcttgattgtacatcagtcttctatgggacggaggtgctagttttatggtactaaatcaagtacgcagtggaagaattttatatctgattattattgtaccatagtcctaagtatctccagatgtatatacattaaattaaaatataaatatcatgaaaaaaataaatacctcttgaggcctatcaggatattcttgatttttttcataagttgtatcctttcagatagattagaaactcacaccgtaatcttccaaattaatccactacatacaagaaatagtgcgggctagtaggataaagtgtatatgaagttgttgtataaatctcaacacatgagcaaaaacaatctcttatgtgataaagagaaaaacatttttggtaaaaactctttttaggctttcaaaaaagtttacaaaatctatataccaaactttgttatacgttatatttaaataaacctaataaattttttatttaattaattatattaaaataaatttactaaatcatatttaattatttgaataaataatataataaaatttagttatatatttttacatcaaataaccaattgagggaatctctcaactacttgagagaatatttcaactacttttcaaatttgaatatttgtccattgaattgaataatccaaaagataaaactaatagggacttcacatagcattggcgcatgcactgtgtctggacatagtgcacttagcgtcttctttgtctcatttaagacaaggaatgtgctttttttccaaacagttattgtctcaacaacttttatgttttttcttatttaattaattttaaaaaataaattctttattacaaaaataaataattattattttgctaatttaaaatagatttttctgaactttctctatacaacatttatcctaccccttgacactgtttcacaatggcaatcataggaccatggacctaagatccaacaaactagatttatttattgagtctcatcaattaaaaaatctttatttattaatttcatgattactgcattataaatatagaattaaactcatagtaattatagaattatatttgctgaattttactgcaatgtctattgatataatcaattgtaatgattatccctccttgtattggttcataaatagttttggtaaaattactagtttatccttctaattacttctttatcctttaataccatcaattcactagtagaagtataatttaaatcccatcgaaaatttacgcataactttccaattccagaattaacacataaagggaattaacatccgatttgttaggaaagccaagattccatagttatagaccatttttccagccattcacattattaaattctcaaaacagaagttgtaagaatcatcttcattgaaaaactttaacgagtgaatcaaagaaactaattacataaataggaattcatgataacttgagatttatgtcgatctactattgatcatctttataatatgaagtaggtctttatagtaaatggtaagtttgacaaagacaattttattcatatcagtccctgtcatatataaactctattatatacaacacattcactaagatgtcatactacatcagtaatttgaatcaagactacttgcactgaagaatgggcatcggtgtgtactagcaacgattgattaaagattcccaaactttaatatgattttgaatattttattcatggctaagtgatcttaattcttcgtacaactacaaatcacaacctcatatatgaat

SEQ ID NO: 298428 - DNA, 2760 bp, Cannabis indica
aagagctttattaatgatatctgcgttaatgatgtcaagtatgatagttatttctatacttggaacaacaaataagatggtttgaatagggtctatgccaagttagattgagtcttaggaaacattttgtggatggacatgttttttacagttgaggtgaattttctccctgaaggtgattttaaccatagttttgcccccttactgttcactctttgcaaaataatggttgaaagcctttttcggtattatgatatgtggagcataagctccatatttcaaagtagagtgaatatggtctggtcagtaaaaagtatgggagctcccatgtatgtttctgtcaggaattgaagctggttaaataaattttgaaaagagttgtataaagaggagtttagtgatattgttgagaggaaaaaaaaaggattttgtgatgcttcaaggatgccaattagtgcttcaaaaggatccttctaatctggttttaatcgcagttgagattgaagctagggaagcttttaaaaaaggttattgactctcatttatcatttttaaagaaaaaagcaaaaattgcttgggcaaatggtggagatagttacacaaatttatatcatagaagtctgaacctagaagaatgcaaaattctgtctatgccatttatgatgagtgtggaaatcaggttgatgatcctcctgaagtattacttcctttatggagtattataatcatttattgagatctaaaagggcacaaagaagaagtgtgatgactattgtaatgaacaaggggcctgtactttctactgagcatatcgatttcctctctcaaccttatactaaagaagaagtcaaagcttcccccttccccattcctaatgagaaagcctctggattgaatggttttactagtggtttctttaagaaaacttgggaaattgttggtgaagacttcattattatagagctttctactttggagtggggtaagcttctaaagagatcaatactactaccttaactctcattcctaaaattaattgtctcaataatgtttgtgattatagactcgttacttgttgcaatgtggtttataaaataatcactaaggttctttgtgctagattgaggatttttttaccaaacatgattgtcgataatcaatgcagctttgttcataagaggtacattggatataacattattatttgtcaagacttagtcacacagtttggtaggaagcataacaatccctcttacataattacgttgcatcttaagaaagtttataaaacagttgagtggaatttcatcaaagagatgttgaaggctcttcattttcctgaggcggctttcattaatattgttatggattgtgtaagaactcttcacttctatttgttcataaatggtgctttccatggtttattccttactaagagggtcttagacaaggagattccatatattggtatgaaatatttatccagacttttgactaaagttccaaatagaagggattttagctaccacccgaggtgtaggaattttcggttgaactatctttgttttgttgatgatgttctccttttctctaaaggggatacccaatcaattatgctgttattaaaagctttcaagagattttcaaacactgttgggcttcatgccaactcaaataagacaacaatatattgctcaggaatcaattttatgtccaatttatcctcgatagctcagtgttttctcttagcaatcttccctttaaatatttgggcatttctacttgtgttggtcgtatttcctaatttgattgtgattctataattgagaaaattggcaaaaattattagatggtcgtatttatgttggagagatccattttgattaattttgtctttatttctacccatacttattgggttcatctaataattttgccaaagtatatttttggtaaaattaatagtatttgtagtactttttgtggaaagaaaattttgattcacctagtccaggatatatggtttggaagagtgttacccacaacagcctctgtcgcgcttcgaaaaatagttatcaccactaagatctaatttttaccgttagatcatcatcaacggtcaaaaacatcttatttgtattttccctttatttttgtgggtatccttcatatataaaaggagagtttttcaagttcaaaaaactacccaaaaagttagagcttcttcctctagtttctctttctaaaaattagaacttctgacacttagtattattctgtaattgccatctcgtgagaaataaaaacttgaagtagacatagctctattactgtcgcgatgcagagagtgaactactataaatttattgtgtctctcttataattacttaactacttaattattctcaacaatccaaggaacagatgtgacttagaagtctagtttaaatttttgagtcaacataatacaaatccttattatctagagtggtgccttaaatggatgaaaagatgcaggaagtccctaaatatgctcttgtatactttgtttgggatgttgaaataatactttgtgaaatgatcatgtatatagtatgtacagtaaacttttttgtaaatagaattaaataagacatttattttaaattttctcattttaaaatagagaaaacaagtatagagaatattatttggatggagggattgagaacaacctttttttttttttgaataaaaatcataagatttattaattaataa

SEQ ID NO: 298429 - DNA, 6904 bp, Cannabis indica
ttaatatgtgttagtatgataatgagagagactgtgtgtggtgataaaaaaagggcttgctttcataagctcctcttctacctcatcttctaccatcttggagacacattcacattaaagattttggtgttcaaatgcaaatatgggaggtatgtgttttcataagtttgtgatgctctaaataaagtattgattttgcatttaatgattatgaacaataatgtttaatgtgtgtttggatagttcataatctatgtgattgtttaacaggcataactaaaaatgctactcattacacgaaattaaaaataaaattaataaatctacaaagactaaaatataggttttgtggctcttctatagctttcgatgcctctaaccaaaacactaccaagttcggttggtactaatagtacactgaagttgcattgaaagaattggaaagtaaaagaaactttgaagaatagataagattaactgagctgaacagaattaagaactaattgatctattctcttaaaaaaatatatatatttttcaaagcaatatagggtgaccactgacctataaaaattaattatatgcctgaaatcgattaatggaaataaagatagattagagggtctgttgctagaatacgtaactagatacaaagctagagtatgcaacaacatcaacccaatcagggaaaaggcctttcagtttctttgcatcaccaaccatgtactggtccaacactgcaacctcaaccctcaaatcttcaccactgttagcctgcaatgacacccacaatcaaaagattcttacttgatttcttataaataataacaaagctagtgacatggtaaaaccagcaaactaaactgtagggctgcgcctatgattgtcaaacttttacctctaaccagaaggtccaattttcatgactggctccactaatgcgacaaatgtatgagggtggacctccatcaattgtttcaggagctgaaataatatttcaagggtgtgagtttagaggtaagagagagaaagataataaacatgtaagatgtaatcagatagatttttcttttttgtacctggaagcacattgtcggcaaatgaccaacttgataatgggccagtaatgttgaggactgtcacccaaacctcctttacggaactgaaaaagagtaagtaaatctgtgtctagttactggtagtttgtaaaaagatgaagaaccaaatcagtgtgtttgtctcaatgtaggagatcaaaattagtgaaatggtacatgcatttcattctacttaccccaatgaaagttccaagtgaattctccgagttccctcgccaagtgttgtataagattcgtaagtggacagaaaagggaatcgatcgtattgctccaaaatttcattagtttttgctggaaactttaaacttcttgaaaacataaaaggaacaggaaaaagtgcctgcaaaagataaaatgttgcatgaaaatttggtgaaagttaacagctccagacatggattatatgatttttactgctcagacaaaaagcaacaaactttgaaacatagcagccagtctcacaaagaagtggttctttgagagataagcagttaaagatttaaaggcccaacttatatcatatattcgttcggaacattttagatttacaatacataccaaccaagattccctgtgacaaaactttgcagtttcaaatgagaactctggagttatttgcaactcctttgcaacttcaggtgcatatttgaaaagaaaaagtaaggaattggaatccaccacagcgaaatcataactggagtccacaatgcgatttgaatcttcagtcacataagaaataacctctttagcaataaactcgataagaaatgaaaaagtaggatttttgacataaaaggtaagagaccatcatctaaaatatgtttttgttaaaagcaaactacaaaagttataatccaaacttcagaagtgatgcaaattattgaacatttttgtcactagctttagtacctgtagtacgaagtgtatgctgaaaaacagccctcttaggtgcagctgtggtgtatggaaagaattgagatgacagagctaatgctagcacactaagatgaagcaaaaattgcataatagagtgtctggctaaccagtgaccacaaacaggtagtagagggcccacgcaccaactcgtcacaactccaataattgctgcaactacaacatcaggaatgaaataacctgcacacaaaggaaatccaattgttacatattcctatcaaattttgtgatttccactgatgagcttgtacttaaacttcatttttggtcataaaagaaaaggaactgcaactaaaagagaagaaaagatgcttttcatctagtcaacaattaacaaggagtttagtctcattttggttctagcaaaatgtctgctgcatcgtgcttcaatattaaggaactggaagagcctaactaaaacagtaagtatatgagagaaagtgcttgatattgacaaactaaccatatgggggtggaacagcacccatcattcccatcttctcaaccaagaactggataagaaatccaccaaagtaaacagagtaggcaaggactggaatttgagggatcacatatagcattgttgacctgagaggcaatataaatcagatcaaaatgataatgttcttccgtgacatataaagactttctcatgagccaaaatacctgagagatgtatgatcagaacttttgactaccgagcaaactaaaatccaagcaagaagcatcgaaccagacagaacaaaagttaagaagcctccagatagcccagctgcaagataagcctgcgcttactaagtgttttagtctttttagatttaaatataacataatacatattatgcttataatattccaaatatgctcactacacatcaataaaattacataatacataccgtagttaacatagcataaaacccaaaagctccccaaaatctggcttcaacagatagtacctgaaaaatttatgttcagttaaaattacaaaagataagtgatacaaattgtcaagacattgaaccattataaatctttagagataccgattcttgcctaaaagttagttacaaaggcaagtgaaacagattatatttaaataattatttacttatttaatcaaaaaaggtctttggttataacccaaaaaccagtaaatcaccaacagcaaaatatcattaatatcacaattattatttcagctattactaatggcactttcaaaattgttccttttattactactctattctgaagcacactaataagtctccaatccgcaatttacatatgctaggcgtaagaagaaagaaacaaaatgcgccgattgtctatttgttctgtgactgttatttgggcattctcttctgtttttgttctatatttgtacaggctggtttcattttagtgttgtgttctatatttggttgctttatgatgtttaaagtgagaaaagtacggtaggctagggggcattgaatccttgatgtgttatgggcaacaaatcctcgctcaatgggagagttcaactctgtcaaataactgattactgagtccactaatgtaccaagttttttttccgaaatataattcttcactttccatacatttctctcattgatctcacacacattgcatttacctatgagttaaaaactaagaccagtgtagtcaaagggctgttaagaatgcaatcatttaacttgatcatggtcagttatttaggttttagaatgtaccgctacctcctttgctctgcattgagatgcaacatcttccatgacggtagaacgactcaacaaagctacaggaatcaactgaccaaaaagtgcacaagggatgaacatcatgaaagccaaatatggatgagcaaacctgtaattcaagtcctaaaagtcaacaagaatcttgagaaagaaaagatcactaggagagatttctcaattttacacccattatgtgcattacttctgaagcatataatggtaaaatacatctctaaatctcatcttatacaaactagatcatcagaaaaacctcatgaacaagtgtagggctcttattctaatattaattagttcatagaaaataagaaattaatttgagtattgcgtaagagtataaaatctcaccagttcattgcctgactagtaaaaagcaatctcagaatggaaaaaataattgggaaaataattgcaagtataaacccagttgtatgcaatagcgttcctggtacataatcaaattggacataatgagtttagtcagcaatcaataaagttgaaacacactttttaggaagtgttattgtagagatggagagtaactaaaggttaagaacatattagaattgctaaagatttatataactttgcaagtataataacataatattacccaaagaaaaaactatatttatctatttttatccataccaattttaaattctccttatattttacctttcataaaatctgataaagttgcgaaccaagaacgcagcccagaggacctcaaatgtaaaaggagtggcataatgaagaagatggcaataggaatgttgtgaagaatcatagctactcttcttggatagtatatctgtgtaagatcaagaggaagagggtgaaaatacttgtcactttaaaagatggtttatataataactagcaaagagatacttaagagcaggagctttagagcataccatgaaccatgttaagtaatcaaagaaaacagcacgctcacttttttctgattggacttcatgaggttctctttcatgtgcattatgtagctcagaagaattggcaaaagccttagtgacactaaacaaattttctccgcgtgcttgaatacttcccggtctgtgagttaattagatgaatcagaggaactatttagaaaggaatgatactaatattccatattaagtaaatctgtaccaaaatagcagttgtaatgcatacactagtctgtccactgtatcataggaggtatggtaaaagtaaccaccaagaagaaagataatgtccagacccggtatgttgccgtagtcttgggaaaatattcgataatctgtatctccaggaataactggaaaaacatcctgcatataccagataaatatttacaagaaagttaatacagacaagcatagctatgaccatccaacatgaattaaaatcaggaaaggtaatgctatagatatggtgaaaccgggttgtcaaaacaaaggtttacataattacatagatgtcaataacaagcctctttcacagacaggaaaaaactagacacttccacagttatttgagcctttcaaacggaaagtacctgggctgcactgtgtgccatagggtaaactgctgattgagcatagacttgcgaagcccatgaaccaggtccagattgacacactaaatctgcaattttagtaataaaagtgaaaaatgatgcatttctaaagcaaatcagctgtttcactatttcattccacttgccctaacattatccaaatctttaatcataggcagaatgaaacaagtgaaacaaataaattatgaagagaaaccaggtgtaacctgtccaaatccaatatcaatatgactgacattgcattagaaatagaaagtggtttctatactcttattacaaacactcaatttaaagaaaagaaatataggacagtcaatgaatcaattatacacatgttgcaggaacgaactatgtgcacacttttatattttacaattattgagaatggtaattgatttgatagtgttctacctggtccgcctgtcccagatgcttccacatttataaaagctccaatggtctcacgccacttatgagtcctcataaaaccatgtgagccctgaaatcatcataattaccattagacattatgatatgtacaatgagcataaagttacaacttataaaggtgtgtcatagttccagttgtggaattgatccaataaaacatcttaccagcataaaaagttcttcagcaccattaaaaagaaaaataataggccgaggaggtacccaaccagagtctgtaataagtctcgccaactccagcattgatgctgcacagaaaaagatgaggcaatcgttaccatcaggccaaaaagagtaacaattaagaaaaaaaaacttttgttttgtgtactcaccaacacatgaaccacaatcactggcacctggagaactaagtgggctatcaaagtggccattcaacagtacagatgaatcatagtcttgtgaatctgcagatgataccctgccattaaaatttaattattttgtgatgatgtttccttaaaaacttgaaagatgtaaatgcaaatgcttcactgttacaaaatatgcataattatgcttaatgtggggcctgaagttaagtgcaaactactgtattttaaggttggtacaacaagtatgctcaataaatatacattaaaaaggatggaaaaggtacctcataatgacatttacgtggtttctgtaagtcagagatatgctatggcctaaaaacatcatattaaaggagccattgacaattgtctcctcgatttcaatcctgcaataaatatataaacatatgtaaaactcaattatacaaccaaagttgaaaacaaaatatctagaagagactacttttttttttactaataatcaggactcaatccattaattacctcatattcaaaccagctcgttcctttatcgtttccaactgccctttgatataacgggcagcttctttcaaaccatggcgcccttcctattaataacgcagctcaattaccaataattaacgcaacaaa

SEQ ID NO: 298430 - DNA, 1048 bp, Cannabis indica
ctatctttcaatatagctattagtctaaataatctattataaaataatatatctaaaagtactaattaaacaacagtgtacttaataagactactctatatataaaggcaatgtggttaagcagtcctataaaaggacacgatggcagacataaagaaagaagcctgcatgcactgtttccctttcagtgggctatgtggaaaaatatgaaagccaccaaacaggcacccgatccaagacccttttaaaagtcccactcagatatcatctgtctacctctccctcttttctatctaatttgtatctcttctcttctcacacaatttcaaatcccaatgaaagatgatacaaaaaaatataaatagggaaattgagtactattaaaattaccaaataaacattagttttttgtttgaaaataaatgcctcaccaattccaaattgcaaaccctagatagacatcaattatttattagatggccactttcagagcaaaagataatattcatttaataggatttgatcattttactgcattgtttttgtgtaaatagcttaagtacacgtgtacgttgagaaaattaatttaacaactaaaaaacttattgcatcaatttttctagacttcaaacgcatgacctaccctagtagtacgtagtaactagtaaaaagaaatataatctttaatataacttttcttgacacaaaaccattatgctataattatcaacaaagcaaaaaagaaaagaaattagtaatatatttggtcttgcttattaatataactttattatacacgatgtggtgatcattaattcattatgaataatattaaaactatatgtgcgtgcatgcaatgcatatccttagaaatatatagatgcatgcgtacgctcaagtctacatcctcaacatatatagggagattaaattatagcgagtgttatttttgcttgttaattagaaacgtttttttttttttacttaaattggtatttttattaactaatcaaatcgttaaaaacaatagaatgtgtttcagaggaac

SEQ ID NO: 298431 - DNA, 1803 bp, Cannabis indica
gataggaactaaaccaaaaaaaagagggggagggggcgaacacttcttgaggaactttttgttgttcaaatgcttaatattgcacgtctctaaagatgacattatacaaccttccaaataaaaataagtatttgcaaaaaaaaaaaaaatgctctcattctgaaaataaagttaagtatttgtataccttgcacatttgaaaaatacaaagtccacattgattacgagtcctactctgggacaagtttgaaaggtagaaaccatttatgcctttaccttcctactattgatcttctaatgtaaaagaaatgtgtccaagatcatttgtttctcatcacaatgaatctttaatttctggcaaagtctaatacgaaaataaacaaaattggcaatacaacagtcagactaggtccctaattgcccacaattataaagcaacgatgttgggaaatattatgacatggttattgtgtgggcaacctctcttggaaggaacaaaataaataaaatgacaagttaccctgtctaatttcttgttgtttgtgttgcttcagagaacagcttatcctccgaaccatttttccctataatatatctcaccaaaggatataggagataacatgcactaaactccgaaccacctctccacttatttcacatctacgctctagattaaaccagtttaaagactagcccacaaattctcataatatgcaggaaaacctatttaatttttatgaaatcctcacttgcaatcctcaactagtttagtctagggcatgtgcaagctaccacacgcttcaaaccagaattctccagtctcatggaaaagtattaaccttagaacagtatcttaggagtattggacctagctaaaaatataaaaataactgttttgaacggttgtaaaaaggaattttccaaacatattgatgtacatagatcacatgtgaagttcatacaattttatgtgatatggaaaccataatcaaactggcattgctcactaaaacagaatctcggaaacccttcaaatagaatccaaatgcaaatcaagtaagtcgggatcaagctaattagaagtatacccttaatccaaaaataaaatgaataattgaaaattctttttctttcaactccaaaaaatgtttgaagatcaaattcaaagacattagtagagctgagtaatgaaattgacttgataaaaatgttcggacgaatttgaaatgtgcaaactaataacatattcaccttaagttgtctaaggagaagcgattcctggatctcccagaaaaaaaccacatggcttcttcgaaactcactgcaaattcattccgattccaattataggagtacgaattccgagggcaatctttcaatcgcacgaacaggcgattaggggctttgtgttggagagagcgaagcttgtgttttgatcgggaactgttgttctttttctttttcttttctgttttttcttttttaatttgtttaatttttttatttattatttttttatatttttttgcttagaaaatatttctatttaaaattccaaatcaaaaatataaataagttgaagggaatggctgagtttatatgtgggaaatttgaaattttatatgcataataaaccctaatattattttcctaaacttaataccccttacatttgaaccaaaccaatctcaagcttgtctcttcctctctcgcccaaacgcacggctcacatccacggctcacctccaccatctccgacgaccaccaaggaccacccaccacctccgacgaaggacccagccc

SEQ ID NO: 298432 - DNA, 4027 bp, Cannabis indica
gtcatgtacctacagagttctaaaaatataacttaggtattattaccgccaaaaattaaatttaggtatttatttacaactgggagttaaacttaagtatttatgccgtaaattacttaaaatacaactacaagggatactggatttagggtttactcgacccagtgtatttccttagggagctccagttttgtttgtgaaaaagaaggatggatcccttcgaatgtgtattgattatagggaactaaacaagctgacaatcaagaacaagtatcgtcaactctagggtaagactatattctctaagattggcttgcgttcaggttatcatcagctaagaatacaagaggaagatattctgaagactgcaatttggacaaggtatgatcattatgagttcttggtgatgtcgtttgggttcacaaatgctttagcgtgttgaaggatttcctcgataaatgtgttatagtatttatcgatgacatctttgtatactctcagacagaagaggagcatgagcaacatctctgaatggttttgcaacgactgaggggtcacaagctgtatacaaagttaaaaagtgtgaattctggttgtcagaagtgtcctttttagggcatattgtcgaaaaagatggaatcatggtcgacctgggaaagattgagtcagttaaaagttggccaaggccaagaacagatacgaaaggatgaagttttctcgggttagcatgttataatcgatgttttgttgaaggattctctaagatttcaatgccactgatggaattaactaagaagaacaagcaatttatatggtctgacaagtgtaaaatgagtttttaagaattgaagcagcggctgatcacagcaccagtgttagctttaccatcagaccaagaaaagtttgttgtttattgtgatgttgagatatgttttgatgtaagctgacagggttataacttttgcttcctgacagttgaaagaatatgaacaacattttctaacacatgatttagagcttgctgtgattgtgtttgctataaagatatggagacattatctatgtggggaaaaatgtgagatttatatggaccacaagagcctcaagtatttcttcactcggaaggatttgaatatgaggcagaggtggtggctggaattagtcaaggattatgattgtgagaatctgtatcatcccaagaaagcgtatgtagttgcaaatactttgagtagaaaaggtcccggacaagtctttaggaccacaatgatagcatcttagttggcctcagatatagttaaggctagaatcgagtttgtggttggaaagttacataacctgacaattctgtcagatttgttggaaaggatcagaaagacacaattggaagatgctgagttagttaaaattcaggatgaggtattggccaatcggcctaaggacttctcgatctcgaatagtgaaatgctactttacaaagctcaaatttgtgttccaaatagcgttgagctcacgaaagagatacttgatgagactcatactataccttattcattgcaccagggaaccaccaaaatgtatcaagacatgaaactctattattggtggtgcgaaatgaagagatatgtagtggattatgtgtctaaatgtttactttgttagcatatcaaagcaaaacatcagaggccggtagggttactaattttattgagacaacttatataggaaatatgagaaaaatgatttacaacaaacaacatagaaatactaatttttgacacagaaaaattccaatttagtaaaatatttcttcttgggaattataagaaattaaataagttttatgtaggcaccaagatcatgagaattagatgagtatttagagatatatgatagttttactgagatatgtttctttctgaaaagactaagaaaaggagacctacaaatattctcctattctgatcaataatgagtaaacatagagttttttacctcaaatacttcaagatatttggattaagaggcacgaaatgatgatgatagaagatgagagtgaagagtgttataaatttggctacagatgtaatgaaaatatgacttgaaaacatttagggttggaaggaatagaaagatataattttaggattgtttaaataaagcctatagtgactcctaataggtttagttttattaataataataatataacaaaataaattatcaaataaactaatatctaacttttaaatttaaaatgtaagctctccattccgtaactttaggacttagttcagcatagaaaacttctgaattatgatacaactatttctacaaaatttatagatctttgaattgtctttctaatgccactagaatcaccttaatcagagttccataactctagacatggtcatttaataaaaaaaattctaaacatgtaatatttatcaaaacctacaaatttcttaaccttaattccataatatttttatttaaaaccaccaataaaaattattaagcccatcaaatagtttttaaaaccccaatagacttttatattgggcttaactaaaaatatatttgtttttgaataataatgcaagcttcattaattcaaatcattcatcattaaggatgcaattacaaatagtagagcaaaaccattaaaagtacaatcagcctcataaagagaagatcgcgccaaaatatgcacagccttattcgcagattgtttaaaaagttgaaagaaatagcagtgatatctgcaaataatgccttacaatcagacagaaacaataccttatagtcagacagaatatggccataaggagaagccatatatttaaaactttgtaaatctctaatgactctaagataatctgactcaacagcaatattagtccacccattattcttgatctaacttaatgcttctttgattccaattgcttcaacaacatgaggttgcaagaccccaactttattcattatcttagtttccagaaccagaccagcagttgtccaatccattaagccaactccaaaccgtcgctcattagagaaaagtgctctgtaaatattaactttgattgtatgaaattctgaggggtccaatactccacaactaccacattcgaaacaccatcatttgtagcagcaaaaacttatttttgagcattataccattcaacaaagtttagtttagctaaggagatcatctctattacaacaggttgtttggagttccataccagattattcctgagtttccaaattgcccaacatatcattgcatctcctaggaaattagctttgttccaaaattgcaaaccttcttcaagccatcctgcaaatgtcattgcatcagcagcaatcgcaggcacacaagaggcaaaccaccaactttgagcaaaatcacacctcaccaaaacatgaagggttgtttctggagctgctaaacaaaatgggcaggtagttataatcggcacattcttggtgtgtagctgaaatcttgttggaagacagtttgtggaggccctccattaaaaaatttggacttttgggaggaatcttaagttgccataaattcctccagaaactagagttatcatgttgaaagcggctgcctttgaaaagctgcaacagagaataagcacttttaatagtgaaaaaactagaactttctttcaaccaaaactaagaatcactcccgaagcttttgctaataggcattctccataccagttcctaatctctgtcacttaacactgttggaattattttaccaggatcttagatttactaacgagtatgttatttaacatcctaaatatgaatttctaaaacgatatgaaataaacacatataaagtatgagaaaccttacagtggttgcagcggaatataatgtctccttccactctgatctctaacccttgtatcctttctatcgcagagtatcaccaagatctgagtccgaatgtccttctcttgaatcaggattcttcacaatcttccacactatgatt

SEQ ID NO: 298433 - DNA, 4671 bp, Cannabis indica
  modified_base (931)..(931): a, c, t, g, unknown or other
ccctgccaaagcccatcctagccccatcatcaccacccaaacccaacaattctgaaagtacttaccataaacaaacagatggaaacgacaacaaaaacgttggcgctagtgggtggaactttctccaagctctttcaaataataataccaaaaacgacactaaaacagatgaaaaggtgtatgttcatccaatggttaagcgctcctctgcgatgctcaatgccaagagcttgcaaatgtgcacggaaggcttggggagcgagactggtagcgactcgggcgacagcagtggagacgaaatgtctttactgtcttcgtccccattgtcgtctgcaaagacaaagaaatctggtgctacacaggctgcgaagaggtattgtaatcgaagctgtagtagtagtttcccaccgccattgacctctgtgagtggctcttctggtcttcaggttagacctcacagagaagatggacgccttgttttgagagccgtcattgtaccttctgttcggagttttttccatgctgagcgaactgacggaaggctcacactccgattgatgagtagttctgagcccgtggaggaggagaaggaagaagatgaagaagaagaagaagaaggagaagaagaagagggagaagaagaaggagaaaaaggtattgatgagcttgaaattgagactgaaattgaagaagaagaaaagaacattgatgaagatagtaaaacagctgatgatgatgatgatgagtgtttttggagtggagagatggatgatcatgataattgtgatgatgaaatggttaatgagaagctttgcagaccaattagtagtaggtgcaaagaagatggtcgtgggaagagagttttgatgaattgggagccatttttggtggcttcttgaacaacttctcccattattaattattaatcttntacctaacaaaatttactattaattattattacctagcttatattatgaataggattattagtggtattaattagaagttagattatgatgataatattataattaataattactaatctagctttggtttgtgctactgtgttatctttttcttaatatatattaggtcattataatttgaaaatgttcccgtacctttggaaatttcgtagcatgctaatggtagttattatcgttaccgaacaagttcctcactcttctctgttatagtgcatggtttttggtctaatcattcattaactccattttgttcccaaaacacccttataattttaacaacatgcaatattaactatataatttggcaacatatgtaaagtataataaagaagttttttttttttaaaaaaaaaagtgaattttgaacaaaaatttacaattttactctcatttttaacaaaaatattgtcttttgttaaaataataaaacagaacaattaaaacaacattgaaacaactaaaaaacaaccgtgaaaacttaacacaatatacagtataaaacttacacattatttttagaaaaaattccaccactccataaaaaagttaaaatttttaatatgtagtgtaaaaaccctataataaaccacattaattcgctatctaattatctaccttggtagaacattcccaccaaatgctctaaatttggtatttctgtaaaatagggagcgcaaaatttaaatttatccaaaatatattatacaacataggctttagtagatttcaatcacacactaacatttatgcaattattaaaattttattatgggattaagacttataaatattaaatagtagaaattacataattatatataaaaaaattataataatttacttttttatggcataaataaataatatcatggggttgtgggtttttttcttattttcttttacgtttatatgaacttttttatgccatatttttgtgtaaaaaaaaaaaaagatagaaattccatatttgtaaaacaataataagatcggttttatgaggtgttatgtgtaatgaagtattttattgtagaactagttttatttttaatttatgttttagtattttaggaaccgatttcttctttattttttaattgtaatcggtttgagttattttgtgttacttgtttgtattcattatgttatataactggttctattttagctataactaattccattttagttataaccggtttgagttattttgttttatttatttttattcattataacactattatagaaacggttctattttaattataactggtttaagttattttgtattatttgtttttattcattatgttacagaattagttatatttcaattataaccggtttgagttatttgtttttattcattatgtaatgaaaccaattctatttttatttatatctgagacatctatttctggtgacttttccagtaacttttttggcgacgatgacttttccatcaatttttccggcaacagtgactttttcgatgacttttccggcgataataaattttttggtaactttttcagtatcttttccagtgttagtgacttttccggcgaaacttaatattacaagttttgttaaatttatttattgttttttcctatattttaaattttaattattttttaatttttaatttttttgtcattatttatttatgacatataaaagtaatctaccatattttcccatatttatgataaaatccctattaaatattatatatctaagaccaggaccgatctaaacattgcgcagcttgaactattacacaagatctccattttttaagttctatttttttttttgaaagaaaaggcatatatatttttttaatttttctatggcacatacataaataaaaaaattataattaaaaatttagaacatatcctaaaaaaaaaattagtaatataattgtggtctaatgcacacaatatttttttttttttttttttttaaaggtccaattttaaacttttgctcatgccctcaaaaagtttgggcccactttgtctaagacaatactatttactattctaaactagttttattagtttttaattctgtttttatatatgtatattaatgtatatttaaaatcaacaaaatttatttagagaaagaatatttaaatgatgtaaataaaaaatttaggaaattaatagatagtgtaatatatacaactttgatgtataaaaatagaaaagaattaaagatattgccaagtgtattttgaaggataaaaaaaagagtgatgttagtattttatatattataatagtacgtaatatgtttttatgcgaaattcgatatcatattaaatcaggtgtgcagtaatgcacctttcgtattttcaacatctatctagttttcgttttattaattttgtatgacatgtacagagtaattatttaacacgtcttataaattttaaaaaattaaaaaataatatatccaaaataaagtttaaataatatgttaatttatgagatttttttataatgtatgaaatagattgtttgagtcctatttttgatgttgtcaattattttaaatttttaaaaattatgcgaaatattttaaataactacattgtataatgttatataacagaaaaattaagattaaaaatatcttgagtaaagggatgcataaaataaagtagggctattcacagagtatccgatttgatcccatcaatctaatctaatttgctaaatgcgaatatccgcatttgtgcatatagggttggattgaaaaatttgaaatctacacaagtgcaaattagatgttgtttgatcttaaaaaataattaatctaatccaatctacacttcattatatatatattttaaaaatattataatatacataatattaatatcaaaaaaataacaaaataaaactttcaatctaaacctaaaagttgtttctctttctcttaccaatggtcaagattcaaactcacacgcacatacaataccacgaattatttctcctcttatcttcaatctcacaccaagtcttcaccttttgacgatttgccctcgtcgaccgaagtttattttcttacttgagttttgcggatttctttctgtcactactaaaaatttgagttttttcgatagttctaaataatcaactaatgtattgatgttggtctctataactgctgcctatttgaccgtcacaaaacttggtagaataggcaacagttaaaaatagttggtgaaaaaatttcttaacggtttaaaaccgtcggcaatagtgtcactatcccgttgggaacactaaaaaaaataaaaaaaaaattccaaatctgattgagataatctcagctatacaacaaaacaaccacaataatcttagtaacttgaaaaaaaataagagctaagagacattccattcccatttcaaagtcgcatgagaaagaaaatcttaaatctgagagttataactcatttcgatctcgaagccacacgacgaagcgaaacccacatatctgaaagttaagagagagagagagagagaaagcacttacaatgacgagcatcttctagttgtggctccgatggtagacaagggaggagttgggcgtgcgtgagggaattgccatgcaacaatgcctagcggacttagggctttgaggagagagagagagagag

SEQ ID NO: 298434 - DNA, 2735 bp, Cannabis indica
aaaattcaaaatccgcacttgtggggattgaatgttaattgacatgtaaaagtaaccgatcaaatccaatccacatattactctcatatagaatcactcctcaaaagtatgaactcgacgctatgcttatctgaaaaagagagagttgttcactctctttctgaatctgatttatatgaccccaaccaatctccaaaaatttttctggttgccaaatgtcttgctaattcaattaactcgaaaacttttatcaaaaagatgggtgaattttggagtaacaaatgtcgttttgcagtcatggtttccgagatgcattctgatctttttctcttaactttggcttgtgtaggtgatcaacgaagaattctttctggtgagccatggcattttttcaaccaactgatcctgttgcacttaccctcttctctacagaatgttactaaggatgacctctaccatgtccagttttgggttcaaactcaccgtctccctttcttaagcaaatccagggctcttgctaagaaagtcggggaatggattggagaatttaatgatgttcatgaagactcacttcatgaaggttggggttcttttatgcgcactcgggttcggattgatgttaatcagcctcttatgcgtggcaaaatgattactctgcctcatgtgaaggatgaacattggttggaatttcgctatgagaatctacctgtgttctgctttcactgtggtaaattggggcatccatttgagaaatgtatttctttcatggaaatggtggatgttgggactgaccctgaccttgaatatggtccacaaatgattggagacaaacttccaacttctggttatgatcgataccgaagtgacttctctaaggcaaatgcttatccgtttctcactaggctgactagaaaaactattgtatcttcgattcctgctcttcaatctcatagaaatttatccattggtgtaagcctcagccacaacccctcaccatagcaaagttctcttcaactgaaaaaccagtcacaaatagttcaaagattcattggaagaagtggaaattcatgtgttcctctaaagctgatggtggtatgggttttcgctctttaattcattttaaccaggctcttttggcaaaacaagcatggagaattttggatacatttgattcactactgggaaaggttctcaaagctcgatactttaaaaatggggatttcatttcagcacagaaaggtatcctaccttctctcacttggcaaagtatatgtgatggcagagatttgttattgaaaggactcaaatggaagattggtaatgggcaaaatgttagatgtgcttcggatccttggctaccgggaaacactacttttaccccttattcttatggtggtcaccctcttttcacggcggaacattacatttctgagaatagacaatgggacactcagattttagaacatcattttggtgctattgatattgagtgtatcctttctattcctcttagtccttttcctagagaagacaagcttatttggcaccattcggatacgggtctctatactgtgaaatttgggtatcatttagctgttagcctggattccatagatgaacattcgtcatcttcatcacataggaagtggtggaaccggttatggactttaaggctgcctaagaaagtaaaaatttttgcttggcgatttgttaatgatgcacttcccacatccgtgaacctcgtccatagaaagatttctccatcaacagcttgcactctttgtaaatgtggttgggaatcggtggaacatgctattttttgatgtgatcgtgccaaagatgtgtggagaaaattttgttagaatgtgtgtataccgaacataggtaaccttaaaggttttgatcttttttcccatcttgcagctgcacataatgatgctgaattggaaatgattacatgtctcatgtggagtatttggtccgaacgtaataaagaaatccatggcacaaagcctaagccagcagatttgatttgcacatttgctacttcttatttggatcaatatcaaaaagtgacatcaacaaaggttgcttctgctgcaatgtttgtagataacagcactgcttctgttcaacaacaaaatacacccgtgcgatcctcaccaagttggcaaccacctatggttggctgcaacaaattaaactgcgatgtagcttgtgataatgaaggagcaattctgggatttggagctctaatccgagaccataatggtgatgttattgctggtttttcaatgcccttaagagggtgttattctcccaaagagatggaagcagcaacactgtttcatagcgtgcaatgggctattcaacatcaaattccaatccactttatagagattgattctctattggtagccaatgcgattaataatatgtcatctacaagttttgtaactccttttcatgatttggtagttgatatttgttatcttttgtcctactttcctagagcaaaggtatctcatattaaacgagatgctaataaagcagctcatgctttagctaaatttgctcttcgattggatgaagatatttcttggttgggagaaattccctccccaatcttctttgttgttattagagacgctcaattttaataataacagttctttctcaaaaaaaaatctaatatatataatacaattatatttcaaaacttaattgatcaaatg

SEQ ID NO: 298435 - DNA, 9036 bp, Cannabis indica
cacatttttctatttttttcatttggacgggttacaattagatatttacaagccgacatttatattgggttggtaaaaatacactataacccgacaaaactgaccgatgtacacccctaccccccatcgtgtccctcaccctctcgctcttgtacctctcgtacttttgcatctaattaccattgcagatccatcgtagaccaactatcctctttgtgattggcagtggtccttacatcatgattgacggaatcgcttgggagatccattcatcttctaggcctgaggacatcgccgccgatcctttctgcacagtcgtatttcgagggccagatgggtgtccaagcccaaaggcaccgatggtcttctacgtcctcgagggttgttcgacaagtggagcatgtttctgatgaggtttaggaacggttatgcatgagggttctcccacgtaactttagcctccgtacgagggttctgagctccaacattagtttgcatctgggcttgcccttcagctacctcttttatagatggttccccgtctgatccagtcaaaccgttaaacatattttgtaccttctccatggtctctttcatcctagcagttagtagttgttctttcattagggcgtcttgtgtatctgtcagccctttagttactcgtaccatactaggtcttgttcgtaaccctaatcataaaccctaaatctaaacccaaactcggacctagacccagaagcagaatcaaacctagacacgacccttatcccgaatagggatcgtggccaggcccagactcggacccagacccaaatcagattcagaattctggaccaagagcacaactcggactcgaaccttgacccagactcaaactcggacctagacttggaactggaaccagaaccgactccaaacctcccctagacgtgaatattgactacgacttggaccaggactcggacaaagaccgaaacccttcccccaaacacagagcaagattggaacacgagacctggacatggacttggatccatacccaaaccccgacccgcacctagatggggattcaaacccagaccagaaccacgacccgaatctgaacccagagtcgaacccacacccagacctggactcagacctagacacagacggagattggatcataggactcacacctaaacccgaacccggacccataccgagacctgaaccaagttcaagacctaaacccgaacctaggaactgaacccagacctagacctagactaggatctagacacgaactcagacccaaactcgatcaaagattcgaactcgacctgaacctgcacccataatcagaatcggaacaagaactagtctaggatcgggaccaagacttagatctgagacttgggatcgaaccggacccaaacctaaacccaaaactgtaaacgctaaacccaaaactttaaaccgtaaaccctaatccctaatccttatagcctaagtcataaatcataaaccctaaaccctaatccctaaaccataaacactaaacactaaatgctacaccctaaaccctaaaacctaaattttaaatccctaaatacttaacctaaataaataaaccctaaaacctaaaaaaaaatcctaaatccggaatttagaactagaatcgaacccaaacccgtccgaacccaaaccaggattagaactcaggaccaatacctagacactgactcggacctcgacccggacacggatgtggaaccaaaagcaagccaaaacctgaccctaaacccgaacaagaattgagaacgagaccgagacttggacccagtcttgaacccgaacccagacccaaaccgagactgggattagaaccagggaccccaacctagacctagatttgggcccaaacccgagagccaaactcaaacacgaacccaaaccgaaacccaaactcggccccagacccaaacacaaacaagaatttgaatccggacttggacgaggaaccggaaccaaacaaagacctagacccgaacctagacccgaacccggaccaagacctagacctggatcaaaacccaggacctggacccaaacttagacctagacccaaacccggacctgaacctaaaccaaaacctggacccaaacccgggacctgagcccaaacccaaactcaaacccaaactcaaaccccaacaaagagccagagccgaacccatacccgaaatcggaataggaccgggaccaggactaggacccagacttgggactaaaaccgaaacaaaacccaaaccgaaacccaaacccagaatggaactcgtacaaggacctcgacccttactgtgacctaggaactgggacccaaactcagacttagacctagaaccaaattgggagctagatccaaaccaggatctgaacccaaaccaagaccaggactttagaccagagacttgagaatctgactgggactgggacctggactaggacctaaactcaaacttggaattggaactcggacctggactcaaattgggacctaggaccagagatcgtgactcaaacctggatcggtattaggacacagacctgacgctgaactcggacggaaacatggtctcggactaggacctgagaccttaatttgaacccgcacccaaacttggacccatactaggacttaggtcctggacctggatggaggacccaggcccctgaacaaggatagtgacttgggccccgaaattgggagtgagacttgggacccgaacccagacctagacccaaacctaggacctagattgggtttcgggacctgagatcaagatctaaatcaagacctggggcttggacctgacccaaagtcagtgtcttgatttaggatctagagccagacttgaacctgaacccgcacttggacccaaagtcggaccaacaacaaactcgaacccaaacctgggcctgaacccgtactctgtgatagaaacttgaacagaaaccgaaactggaatgggagtcaggccgggacctaaacccagacccgaacccagaccagcacctggactaggactgggacctaggaccctgcgatctagacttgaggctaggaactaactcgtagttagtgtcaggatctgggacccaaactcggaccataaacaggacctagacctagacaaggacccagactcagacccagacctgtaccccatctcccaaaactagaattgaaagaagaccaggacccgcgaacgggactcagaatagaacctggacctaaatttggaataagaacttgatgaggaccttaactatgaccccaacccagatccaaacccgaactgggactcaagacaggaacccaaacctagacctacacttggacccatgacccaaatctagattggggacccagaccctgactcgggactcaaattggatccagactgggattcgaatctcaactcaagacctaagaaacggggcttggacctaacgcatagtcggtgtctaaatttgcgtatcagactaggacctaaactcgaccaagacctggaccaagacccgtaccttgacccaaacccagcacctaaaattggaaccagaaccggaattcgaactatgaccctagaaaaggatcgggaccaagagtagaacccaaactcaaaacaggacctaggccaagacgcaaaccgagattggaacctcggcccaaacctaggcccaggctgggatcgagacccaaaccaaaactcgaactcggacctgaacttgaacctggacttgggatccgaaactcaaaacccaagacctgtgacccaggacccggactggaacctaaacacagacccaaacacaaacccagactcaaatctaaaactcaaacccagacctaggactcaagactcgaccctagacccaaaccttgacaacggaaccagattgagatttggatctggacccaggacttggggcctggtcccgacctatagttggtgtttgaatttggaagacctagacccaaacctagaccaggattgggttgctggacccaaatcaaaacttagactgggactcgggtcctgaacccaaactcagacactgactaggattcgagacccaaaactgggactgggacttaggaacagatcgggtctaagtctgggtcctagtctaggtccaagtttgggttcgggtcccagaactagacatacactacggggtgggtccaagtctcgggtccctagtcctaggtcaaatcctcatttagatccttgtcttgggtcccagtgcagtttcagttcgggtgctaggtttgggatctaggtcccagttcaagttcaggttcgagttcgggtttgggtgcgatatgggactcggtctgatctgggttcaagtccaggtctaggtctaggtcttggtttgggtaagggttcgtgttcaggtgcaggaccaggcctgggtctgtgtttgggttctagtccaggtttgggtctaggtccttgtccaattttgggtcccaagttggatccaagtccgagtcctggttgtagtctgagtttgggtctagttttggttttgggtccaggtccttgttttggtcctagtctagttctagttctagttcctattttgggtcccatgtttgggtttgggtttgagtctgggtctaggcctaagtctgagtcttgttttgggtccaagtttgggtctaggttcaggtctgagtttgggtgcgggtcaaagttcaggtccaggtcttaggtctgtttatgggtcttggtctgggtctgggtttgggtctgggtccgggtctcggtatgggtctagatccgtgtctagatctaggtcccagtccatcctcgatctaggtctgggtccacttctagtttcgtgtctgggttttgggtttcgggtttaaggttaagggataaggaattagggtttagggttgaggaattaggtattagggtttaggggtttagggcttagtgtttagggtttatggtccaaggtttagggtttagggttttaggattttaagattattgtttaggttttagagttctgggtctaagttcaggttgaagtttggggcctgagtcccagcttgggtttggatccaggtccaagtcgcgatccgggtctgggtccgatccaagttcgggtcctggtcttggtctaggtctgagtcgtagttcgggtccaagtccaagattcagatttcgaataagtgtcacatccaagccccaggtcccatgtcttgcatccagatccagatctcgatctcaagtcccgatctgattctagtttgggtcctgagtcccagtctgggtcatagatcttggtcagggtctaaggtcatgtcctggtcccaattcttgggctcaggtctgtgttccagtgtcggtccgagttcgagtcccgattcttgtttgggtccgagtcctggcctagtccaggtctaggtccctgtcttgttctcaggtctagggtttgagttttgagtctcaagtcttggtccagattaggtcctaatccagttctgaatttgggtcccaatcctggtccccatcacctaaacccaaacgtagacccaaactcagcctcagacctagacttagacccaaacccgctgccagtcccagtctgggttcgagttttggtctgggtctcaggttcaggtttgggtctgagtctggtccgtgtctgggtccaggttctggtttgggtccaagttttggtccagttcctaggtcacaaatctcgggttcagggttgtggtttgattcccaaatctaaacatcgactaagggttgggtccaagcctcgggtccgaagtcgatattttgatcccagtctcggttcctggtccatgtcccaagcctatgtccaagaccaagactggggtccattcgtgggtcccagtctaagttctgggtccaagtttaggtcccctatccacgttttggtcctaagtttgggaccagatctaagttcgggttcgaggttgtgttttggtcgaaagtcttggtttgggtttcgatcagtgtcttggtccttattcgggtcctagtctgagttccaattcggttccatgtctgggtctgggttcgagtctaagtttttgtcctggtctggttctaattttgggtctgggtcttggtctcgatcctattctcttatgccggtttgcttttggtttgggttttaacttggggtcaagggtacgggtttgggtcctagtatgggtctgggtcggggtcttcgtccaagtcccggtgtaagttcgcgtgcagactcgggtctgggtttgggtcctagattaagacaccaactacagtttgtgtccaagccttcggtccagatctggatcctggtcttggttccctgtccagttcgttctacttctagtcctggatcccgatctcggttcccaaacaaagtttgggtcctaggttttagtttgagtccatgtcaagattacggttttggtcccggtctgagtctaggtctcactctgggtctgagtttggggtcttgtttgggtccaggtcctgataatgttcgagtctaggtccaagtcccaggtcttgggttgcagtcttagtctaggtcccagtttttgtctaggtcttagtcttggttcttgtttgggttcgggtttcggtcaagttcatgtcctagatcttggttttagtccagtcatggttcagttccagttttgtttttgattttgggtctgggctaagttcaagtctaggtcaaggttttagtcctagcccgactgcgggtctgggtctaggttcggatcccggtctacatcctagtccagatccgacttcaagtcctaggtcagggttcgagtttgggtttgggtctaggtcctaggttccgatccctatatgggtctaggtttgggtttatgttcgggttagggttacggttagggtttagcagattaggattttgggtttagggtctttttagggtttaggtttaggattttggttttagagtttagggattcggggtttagggattaaggtttaggggtaagtgtaaacggtttagggtttatggcttagggtttagggtttaaggtaaaacttccggtattggttcttatattaggtaatgggttacaaattttggtccaggtttgggtttgggatcgggtttcagtttgagtctaggtccaaaatccgtacaccaaccatgggttgggtccatgccctgagtgcaaatttggatcctagtctcgaggcccaatctggttccaattcgggtcctgggtcctaatctgggtcctaagtgcaggtccaagtctaggtcccaaatcataacaccaactacgggtcgggtttaagccctaggtctagatctggatctcgatctcaggtcaaatctgattcctgttcggttcccaggtcccgcagttctagagcttgtgtttggatcccaattcccaatccatgtctgggtgctaggtctcggtttgggtccacgtccgggttcaggttcgagtccaaatttctttctaggtcctgatcaaggttcgaatctaggtccaagttctggatctcgggtcgcgatctgagtccagtcccggtttcggtccaagtctcagtctgggttctggtttgggtttgggttcaggtttgggtccagttcatgtcctactctggtttttagtctcgatcttgtttcgattctcgttttgtttttgattttgtgtctaggttcgaattggagtctatatcagggttcgagtcctagtgcaagtgcgactctgggtctaggtccagatccctgtctaggtctgagtctagatcaaggttcaggtcctaggtcgggggtcgggtttaggtttgggtccgggtcctgggttccgatcccttggtctagtttgggttcgtgtttgggttagggttagggtttaagggtttaggatttggggtttaaggggtttttaagggtttagggtttaggattttgggttagagtttagggatttagggtttaggggtaagcgtaaagggtttagggtttagggtaccactttcggttttggttctgatatcaggtcatcggttaagaattgatgtccagttttgggtctgggtttgagtccaggtccagttctgaaatccatacaccaacaacgggtcggtacatgccttgggtccaaatctagatcctagtctcgggtcccagtctggttcttgttcgggtcgcaagcaccagtctggggtcctaggtgtgggtctaggtctagggttgtgtactgggtcctagtcccgatccccgatctaggtccatttcctaggtcccggtctagttcctggtttgggtacaggttaaggtcttgctcttagtctagttcccggtctggattcaggtctaagtccatgtcctaagtcccgagtctagctctgggttcgggtctaggtcccgggttccaagttcctgtctaggtccaggtctgagttctggtttgggtttggttttgagtttgggtccagttcgtgtcctaggtttgggtcctggtcctggtccatgtttggttctagttttggttcttattttgggttcgggtttgggttggggtctgagtcctgatctaagtctgggtctaggtccgggtctgggtttggattcttgtctgggtccgcatctgggtcctaagttcgggtctgggtctagggtcaagtctcgagtctcggtcctagttctgtttatggggtctaggtctttgtgttggttaccaatccaacttagggtcatagatcccagtctggatccatgtctaagttcgggtttcagtccaagttcaagtccaggtctcggtgcaggtttgggtctgtgtttgggtcccagtccgattctcgagttctagcacctggtcttggttctagtccaggtttgggttcagctttggtcccaggtatgggtcctagtcctaaccctggtttggtaccagtttcaattctctgtcctagtttgggtgtcgattcagttcggggtctgagtcct

SEQ ID NO: 298436 - DNA, 5593 bp, Cannabis indica
tttcaataataaataatatctcagagcaaaaaaaattattttaattttttgtaaaaagaaaaggccccatttcaaatttcgccctaggcctctcaataccttgagacggccctgcttagcattaatctgttacaaggcaagaaggtattttgtactcaattttcggtagcaactgatttcagtgtttttaaattttttatagtgaaaagatttaacactcttttctcataagtattcagtgattattattagatttaataatgcatgtatataagtaaatgttattagcatattttgtgctcaattcatatctatttaatgtaatatgtaatgacgtttagattttttttttttttaaaaaaaacttgtcataatataatatcaccttgtaaaatagtaccaaaatgacaacaatgaatgatggttcatgatagattggtgtggtaaggtgtagtagattggtactccatattgaggtgtgtgagtcataccttaacaaccactcaccaaactccttttttcttctcccttttagactctatctattatgaacattcatatcacaaccatttttgtctattattaataaatattaattaaaaaaaaacatatataattcaatttaataaggatttttgtctacttaactacaaataagattcacatgtgaaataactctaaaacataattaatgacctatagtagtttctaaatcttttttgttgaaataatgaagcatatatcatttatttaatattatcacttcaacatataaactacattactctaaggaaaaagaaaaaaaaatgatacattatagattataatgttttagttatctaataaatttatagctattgaaagagtgaaagaaatctacctttgtaaatggatttatttaagagaaaataatatgttgtaataacaatagatttaattaattagattaatcattgattatctaataaaaatatatcattttccaattatattttactactatatattgttctattaaacatgaccatacttgaaattttagaggtcaactctcatgaacatgctttaatagaaattattttattcacccatgatcatatatatacatatatatattatatatatatatatatattcattactcaaatacacctactactaaactagtttataatttgtaaggatgcatgcatggttcatataaatatagaaaaaaaaaaaaaaatcaagaggcttaaaatttattgaacgtaatttgcacatatggcaattatttaatttgaccattgttcacatttatattattaacactagaagtttcttaatcaatcttttttttttaaaaaaaaaaatagtaggtgattttggcttgatctcaacaaaccctaattatcaatgtacctaagacttattataattaataatgattatgattatttaaataacctaacaaccaaaggaaaacaaaataaaataataaattaaacagcctaaaatgaatggcaaatataattggctttaactttacatatcataaccataaactcaattttgggtatagaataatataatagtgtttttttcttatacaaaacgcaccgttttaggtattataatagccaaatttccaatgccaggtggcgcgtctctgtcacacaccatcttaggtctcactccatcaaccactggttgacctttatttctttatttttaccttttatttatttaataaaacatagcctaaatttatttaattaagtattaatcaacgtaaataaaaataaataaattgaattttcagctcctgaaaatttatcccctaaattaaaattattattttttttttttgtaaaaatttccttttgaactttgaaaataattacaagtttacttatttagttgccttttttttatttttacaaataatttcccaatacaaaactgctcatgaattaatttattgtgattggagagtccaaaaaaaaaaaaaaattataaaaataattttctaacaataaaatatgggacaatgtatctgtaattttagaattaatgttcgaatttttaaaaattattatactctttagaatctaattatacacataattgatgcacacattaataaatcatcttaatatttctatagttagagaataattttgtacataaataatataaaaaattaataataatatatatttataaagagtaatttgtagtataaatatttaaatttaaaaaaattataacgtgataataaatttttatttttttaaaaaataaattaatttaaatataccacttaaataataactttacatttatttaaaatatttatgcttaaattagtctatttataaattataatacttacaaaataaaagtgttttaagacaaaaaaaataatattgaatagattttttttcctcttttaagacataaaaagaagcccaaaattagggtccctaaaataatgggccaatgttctgtgtgtttctttctgatttcttacatgaacacttaacttaagtaaatcactaattacagattagttgatattaatcaaatcttaaacttaaagtaatctcagattaacccatcaccatcatcatcatcatcatcttcttcaaacccttttttcctctcacagtcgcataccagaaatttggttccaaaaaaaccattattcaatttcgaagcaacactcaacaaataccacacattgattcctattcttctctccaactactaattcatttgatttctcttactttttctctctctctagtagtaggttttagagagagaacaagaacaagaagaagagggaatgaagctctcggctttgcaccagagctacatgaatcgaaggaacagcagttttagaggatctgcgccgttggattcgtcatcggacggttcgattaggtcaccggcggcgatcttttggcttgtgttacatggactttgttgcttaataagtctcgttcttggatttcgtttttctcgtttggttttcttctttctcttttcaacttcttcttcttctactaatggtctttatcctgtgccgtttcggtctacttctgagctcggtggtggtcccttcgatttgttaagacgttcgaatccttctggtgatgatgaatttccgatgaataggagtgttcttacaggtggtacttctgctagtcgtgttgtggttggacgacacgggatccgaatcagaccttggccgcatccgaatccgactgaggttatgaaggctcatcagattattgatacggttcagagggaacagaggcgtcaatttggtgtcaagaaccctaaaactgtcattgttgtgactcctacttatgtgaggacgtttcaggctcttcatatgactggattgatgcactcgttgatgcttgtcccttatgaagtcgtttggatcgtggttgaggctggtggagctagcaatgagactgcttcgattcttgacaagtcagggcttaggaccattcacgttggatttgagcagcggatgccgaattcttgggaaggtcgtcatcgattggaggctcgaatgagactgcgtgcattgaggttagtaagttcatggttttgtttcccaaaattgaggtacatttgtgatgtttgatctaattgaagcaacaaaaatgaactctttaacgtttaggttacttctgtagtgtgtaaattgaaattgattttgatgattaaacagaactgtaagagaccagaagctagatgggattgtgatgtttgctgatgacagtaatatgcatagtatggaactctttgatgagatccagaacgtgaaatggtttggtgctctttcagttggaattcttgctcattcgggcgatacagagtcaagtgaatcattggtatcttcaaaacagaagaaggaagatgagcaaaacttgccaatgcctgttcagggtcctgcttgtaactcatccaataagttaattggttggcacacctttaattcgttgccacattcgggaaagaaggcaatttacattgatgatcgggcagcggtgcttcccaggaagcttgaatgggctggatttgtgttgaattccaagatgctttggaaggatgctgaagataagccggaatgggttagggatctagatacattggatggagttggtgaggatttagagagtcccttattcttgttgaaggacccttccatggttgagccgcttggaagctgtggacgccaggttttgctttggtggcttcgtgttgaagctcggtttgatagcaaatttccttccaggcaagtcttctatctataagcatccttttagaaaatttagtgctggtaatttactgcatttagttagtttattattggcatattagttagcaacaacaaagaaagtggttattagagatgatttaacttcattaattgagtgtcaacattgatagcatttattatttgttgagatttctagtgataaaagtattatactttgtctattacaagggtagtggcaaaatatttcagcattatattgacttctaaaaatggtctataaagtgaatgatgtttatcatgttgcaaatggaaacttattggttagaaactgccaccaaaagtgtcttaataaactgatctctagggaaactaattatgagttaggaagttaggaactaatggaaaaagaccaactcttagtagccttttttatttagtggtttaaagtagagaaggaatttacatggtgtttggactttgaatcacgaggctaataaattttcaatattttcttttaactttattggcaaattttatttatggctgttttaggtagtccatcatggtagttcttggattatgcttgtcatcaagacacgaataggaacacttaagttttaagaactaatccttagtcatcataacttacggtcaattatctttttttcatctgattgtttgagttggttactgtgtttattttgcttaattactcacctcagaatgaaactaccactcattccattaatattccaggtgtaagtgtccttttcataaacttaattaactaaaattaaagctcaaagaaaaaaccaatgagctataaaggtgggtcgattagatactggttctgaaaaatctatatttgatagatcacgtgaatctcgttatataaacaaactattcacttgtaaaattcctgttggaaccaatatatgtaaaactacttgggttttttgttattttagttattgttgggggctggatggtaaatttgagattatacttatatattttaggtgctataatacagggtgttaatacgcattttttttaataatggtcgtattctatattgatgtttagaatcagtagggcctcgtttcaaaatgaaaaattaacaatgaagtctcttgaaaaagggagaaagataaaatagatagttacacaagaacataataaatagaagaattgataaactaatcaagaatccccttttaattataagttttcgtaattgtatatattaaaaatattctattttataggtttatacggatttgaacggtagaccttctcggtaaaacagac

SEQ ID NO: 298437 - DNA, 6455 bp, Cannabis indica
gctgacgtggcacatcggtatatgcgcaaaaaaatttgttgaaggtatttttataaataaaatcagtttttggtataatattaaaaagacccctaatttaatcgggcatgccaaatgagccttgtttatggtgtcaaactatctatgacttggtacaacttaatattactccatattgaactacaccaataagattatctatgttatgaggtgttattagtataatttaacaattcttttttcttctactgatgggattttctttgggaaaacatggaaattatttttgtttattataacatatttccttttcccacaggtgtgttataacatattataacatattgctgttcattgatttcattctagggaatggagttgagcaatggtgtgttccaagcggcaatagtattaagattaatgttgatgcggctgtatttagtgataactctacctttggtgttgggtttgtggagagagattccaatggctttttagtagagagcggtacaaagttgttctatggctcgatttctcctgtggtggccgaagcaattggggttcaggaggctttgagttggatcaaagatcattcgtggcttagtgtagttttagaaacggattgtctttcggttgtacaagctattcgtagctccgtagttatgctttccttgtttggcaaagttattagtgattgcaaggttttatcaagtattttgcgtaatctttcttttcattttgtaaaacgatcagcaaatatagcggctcattcctttacaaggacctctatatctcaccctgatcgtctttttaacttggacactgttccgattgagctgagttattcgtttaataaatgaagactttcattttcaaaaaaaaaaaggaatttacaaaaagacttccaaccaatttggccttgaaatactgatgatcgttcatgtgacattcaaatttcaaaagaagaagagaacaacaaagattgaataacaatacaattttttaaagactaaaatatattatcataatgaattcagaagcaccaaatgattagccctaaaaaattatggattgatcttcgaagcaaagacttatcaaatgccaaagatacatacatatatgctaaaagctacattatacatgtaattacaaaaataacaccggaagccaaaaaagaaaataatattattagttcagattaattttagcgggaaggcaaacacaagaagttttctcttcaggtgtaagagttcctaaagcaaccagtttcataacacgatggccattaagcacatacttttgctctgcctcagcaaaacctttgttgagaacctgttcaacccatttctccaccacccatttctcgtctgacaaccaagcagctgcaagtatctgtatcatgactttgtagtcaatctctagcataatctcagctcccaacattctcttcacatttttgttgatgtcttccactattttcccagcaagagcatcaaagtcgaatggctttaaaaccactttttcatccacttgatcaaggaaatcgtccaaccaggcttctgtgctttcagagatggagtcactgtcatactccccacaatcactttcttcaatctcctctacaggaacattcaagtccaggaaagatcttggtgccttgagggcacgttgttgttgctcggtggagttgcttgatttaatcagctttcttttatttacagatgaagggtttgatgattcttctttcagtgtaactttcacattcatactttcctttgggtttgcagtgctagcaacagatccaccgatttgtatttgcatttgacatctcttagctgctagaatcatatcttctgaaaattgcatcagatccttcactggatggtgagatgttttccccttaataatagtagtggttgccacaaatgtaacattgctaatgctgatttctcttccgcgagtgtctggaaacttgcctgttctaatggcttgcgacaagctattctggactagaagatcagccttctctatattttcaagaaagataactgcatgaggtttcctgcttaactctccagcaagataatcaacaactgtcttccccctaaacttcaaatcataatctgggtcctcacattcaaaaatggagtctgtctgacatcctctatcgtgagaacccaaatcaacagcaattaggctttctcttgagccatacagtatctcagcaagtgctaaagcaattttcttcttcccaactttgtcaggtccaagaaatgtaagccaaatatctcctctgacatttgagacatgatgtcttcccccaccagatctgctaaagcatacagcttgactaatagcacatatggcttcatcttgccaatccactttttcagttaagacacttttaagtgatttcagatccttaggatcatttaaatttgttgtagaacaggaagattgtacagctctaggcaaagtattcttacttattgcataaaactcaggtgagaaagcaccagacatgtattgtgggcgtacattatgatctgatgattttgtaggccgtggttccttgctacttgatgcatatattgttcccaaccccaaatctgtggtcacagaagtgacagatgaagacgatgtgtggtccggaagaaaattcatatcataagtaggtttaggggaataatgggggttccccatcgcattttggcaactctctgaagctttagtcaaattctcagaatgaagatcagcattcttggggtcagaagccactgttatcaaactgctctgctttgaaggaaaatccttttgcaagtttgttggtgtgttggaagatgacaatgtagatcgagattcatttacaatcaaatcttcaccgcagctttcttttccatttagagctccttgaaaaacctctactggggaaacttgggacgctggctggaaaacatcagctttatagaatggtcggctgtgatgaagacctagacaaatttcattccactttttctgcaaccccagtattctagtgttcaatgtacttccaccatcgttggtctgcactgaattaagaagttcattcttaaggtaaatattgtcacatctattgcataatgattaacttcaagacttaagaaattctctacaatgtgataactgaattcagtgcttagtggtgaatttctgtatgcactaagacaaagaatcaaaagttcaaagggattactacacaccttcgttgcatccactccttttcttgcgtcaacttcagccatttgcaaagaaggcaagctttctgacaattgaccagcaacagaaagatttgatcctgtcttcagaatcgaagaaacttcctgctcatacttttccgtgcatgcagagcaacgggtaaaacattggtttgtgctactaacaggatttttcaattcagatgatgcagcaaagaaccctccaaaaggaacaaaggaccccatcaagctgtaagcatatcatgagtatggaactgtgagatccaatggggacaaaaacagttagagccaaagtgtatgccttaagacatacattcatttacaaacaagcatacaatgcacatttgttttaaatagaaaatggcctctttaagtgttacaacaagtgtagcacaaaatgtaagagcatgtgaaaaatatgataactacaacctttcggtaaacaagcatattcttcataaaaatggccaggcatggttacaaaataggtctggtagcttgaaatgactcaatatttttctcttttgtttcttgatagagccaaaaactgcaggttatgaccacagttaggcagcagaatagacacagagccaattcaagttgtaatgaaaaagtagtaacatcccaagaccaggaactttattggataatgaaccgtatatttgggacccaaaatgaaaaatgaatagtacgacactccagcttgcatattctacagagtccccaagtcgtacaatattcctgatacttcactcaagcaaagcttgcactcaattctctctacatttaaacatgacattctgtagtagttactcagactcactgattaaacaactaaccacgtatccctttgtataagttctagaactccaatactgctacatgaaggcgcttaatctagtcataaactcaaactatgcataatctagatgttatcaatgacactctttttaatcactaaaccaagcaatggctatacgtgatatgtttacagttgctgtgtttacttggaaagttcttacattctgtttcttttcccttgtactcagctatggtttggttactcaaacacaacatcaacatgattacaactttcctttccactttcattaatgtcaaacaccaacttcctctatatgagagaagtgtctaagaagaaaaatccaaaagaaatgagctgaaataaaatcatctaccactgaccttgatttagagtggactccttcacttgaagctttagaagacgtaatgggaagaagatgcaagtcccagtccttttgaatggtaggaaactgacccaaaagcttggaatagatttcataagtccgtgttgctccaatcaaccatagtttcccactgtgaagctccaccaagcttgttaatcgtgagaccacaaagctcagccgatcagccgagacaccatcagcaaccgaggtcttcaattctccaaagttcaataagacaccaggtccggagcattgctccaccattcgacccacctccttaaacttcgtatcaagcttcccctcactcccttcttcaaaaaaaaactcagaaacatctttctcaatacctattaaactcaatccagccattgcagctggcaaaatgcctgctttaccactgtgtacaccctcggcgaaaatattgagagcctcgcctgcgtaaacaccgattaacaaagggttcttcccactcttcctcaccaacacttcaccgattcgtctgcagttctcgtccccatcttcttgccgagagaacgggaagctgaaaccccgaagacccggatccgaatcagtaagattacagaggaacatgggtgggcagcggcctctaatgaatgaggaggcttgcctcgccggtgtcggtgggtgaacaatcgcgagcttgatatcgcagctcctaaatccggcttccccaaaaactcgactgacaatcgggtcgtcgagaatcgagagaatgaaatgcttgagctcgaccctcaaaaccgacgtcgtttgctgctgggagtgaagctggtgaaagtgaaaactctccggatggcgcctctggttagcctgggaacgtttgatggcagccatgagggagttcgaaacgggtggctcatctaaagttttagaagaaggcaaacggtcgagagagaccccaacggagagctcaagtgcccgaaactgcaacctgggtgagtacgcgctgcttcgagcgcgcgtgcaggcatcccggagcatagaggagggtaaggccagtaaggccgagacggcatgaagggaggtggtctgcgcgtggcctcgtcgacgcgccactgccactgcatcgtcgagtgctcgagctgcctcctccgtcaagcattgcctcgctgcacttaccggcgtcggcatcgccggctagcatatatctcccctatatatatatgtatgcgcgtatgtgtaaatatggaataaaaaacttgtatatacgtgtaaaagcggagttgggtcgattagtttttggcggttgaagctagtttgggatttggatgaaattggaaaaatataataatagaaaaaggaggggtttacttcaaagactttttgataataaattaattcagtgggaggaagacaaagaagatgagagagagagagagagagagagagagagaattgtcgtggtttggagggtggtcagtggtgtggtggagagagcagcagctggtttgtgttgcagtactcgaagtagcagcagtagttgtaggtagtgatggtagctttgtcttgtgggatcccacaagaggtgttttccattcttggggtatttttacggacacatggtgagtatagattctcatctcttttcacacccaacctatcccatcatccatttacttgaaagaaaaccaaaaaaattaaaacatccaccttaatttttactccacttcctatgggagattttcaccttatttatttagttaaaaaacaaaacaaaacaaaacaaaaattagactcattaaaataatatcaaaaaaaaatatatatcattaatcaataaaaattggctttcaaaaatccacattttcattcaactaaattaaagttagacctcgcggttattacacataatgttttccgaaatagacaaagtcaggatcggaccgtacaacttgtgggtagaagctcatttagtcacattatgggcaacaaaattacaagttctactgacaaa

SEQ ID NO: 298438 - DNA, 3415 bp, Cannabis indica
atatacccacttttataaataatgtacttcattatacccttagattaatgcaaattatgtgttagacttaaatagagggtgaatgtgtattaatcaacccactcataaaactagatatattttaataaaatatattttgaatgtatctttaattaatagataaaaaagaaatatttctcaatttatcctaatgtgatccatcaatttataaacatattttatatatataaaaaattattgggtagttaatcatgctcttagattttcagtattttcggtacataaataattgtaattttatttttcaaataaaagtgtataatatagttataaaagaacttactaaaaaaaaaatctaaatattatataacatgtcaaaattaacattcaaacaactaattaaaacaaacttatttttacatttatatatactataaaaaggatagtaactagaattgtacattcggttcaagtttttcggcacgacacaaaatcagcatgagtttaggaagtacgagcatgacacgatacaacaaaaattgtagcttaaattcagaattacaacattattttcaaggtttgattttggtggtactccttagaacctttgtatggttctagcattagtggctccacaagctaggtctttcttgaggtattcgaacataaggctccaatcccacccctaatgtaagagtaaactcatttgatgttcgcggatgacacaattctattcacccgtgctaatgtgaacatggcatccaaaatattggaatgtgttcataagtacgagagttggtctggacaacaatgtagcttggtgaaatccagtgttctcttctctaagaatgtggcaaatcctctaaaggcaaatatactgaatgtgctaaaggtaagggagtgtgatggtaatgaaaagcactggggaatccttttgtattcaaaaggaaaataagagacaaatatatgtatttgagagaaaagatgatgaaaaggattgaaggttggaaaacgaagcttctattgtatgcggggcgcaccacattggttaaattggtagcactctcgattccattgtatgcgatgtctataaacaagctgccactctctagctgtcgtgatattgacaagataataaggagattttggtggacgggggatacggagaaggagcgtttcatggccctggtggggtgggatcagctgtgttctcccattatccaaggaggtttgggatttagaaagatggaggacatgaataaggtactacttgccaattggcatggcagatggcctcaaatttgaataggccgtgggtcaaatgtctctcggagaaacattgcaagaaggcctcaatttggagtacacaagccagagaaaacaattcagccttttggaaaggaattctcagctttagagatgttatttgcaggggaggcatgaccctagttggtagaggggacacggtagatatttggaagcagccatggattccatggctcgactactgtgatttcctaaacctcatggatcaagtaaggccgagatttcctaaccttaagtccgtgccaaatatctctcttgataatgggtgctggaatgtgaggcttcttaaggaaatgtttgcgatacgttgggtgaaagaattggtagaattggtcgattacctggtgagaacatggatgtgttagtgtggaaagagtcgactgatgggatgttcacagtgaagagaggctatgaggcgtcccaagcacttaggccgagtttagagagtaaattgtggaagaaagtttggacccaagattgcatttcaggcactcgattatgttatggagagtgatttcggactgcctaccaactagagagaggttagtttttatatgggataagacttgttctatgtgtagggaagaaactgaatccgctactcagattttctgggattgtcattgtgcgcgggcgctttggtttagcagtctcttctccacccggggaggggttggtaatgggtgttcgatcaaggaaagattagtgtggctgttggaaaaaatcccgagtgagcattttgctagcttcctatcctttgtgggctgcttgtttgaaggtatttggaaagctagaaatgaactcttgttcaaaggggggtggttgatatccaacagataagagactccattatgagaagatacttggaatccctaagagcaatggaggaggatgcggatataggtgcaattgcacctactggtgttactagaaagacggtctgcaacactgctgaagttttcagtgtttcggatgcgtcttggaaggaggataaggcatgtcttgcggtgggtttgttggataggcaaaacaacaaaacggagtggttcgcaaagtaggttccgatttcttctgcggctgaggcagagctgctggcaattcaatgggctatgcagctagctagacagaaaggattcaaaaggtacgctagtgcttcggatgcaaaagtactaattgatgcattgaagaaacaaatttgccccccatttcggcagttgaaacctctggctttggaggtattgagtttgtgtaagttgtttgatgcttgtaacttcttttttatttctcgtcgagacaattcagcttgtgatgcgttagcaaaatgggctagacaaaatagccagtgtaatggctacattttcagggagggatcccctattgtgattcccaacttttctttgcaatgaacttctcttagttctttccccaaaaaaaaaatgtaggagtatttatagaagggacatccattttgggtgcttgtcaagttaattccctatttagtctgtttgatttagccaggcgaactctcaattgtcgattctctaactagactaaggatatacgtaacgagttggatcataaacatcctaaaacgtcttgcggtaatatttctgtggggtttgtgatatgattttttgaatttgacgagttgataggtttcccaaggagactttatgaactttttcaacgattggtttacaaaagatttataatcgttgctcttactgaaaattccaaactaacttataataaattacttgaattgagattatgaggatttattacctgaattgagattataaggagttataatatgtactttaaggagataaaatatatacatatttaataatattaataatttgtacttagttcaatattattttcgtatatttcttggatttgattcagttatctcaatggataaatattacgactatgatttttattagatgaggtcacttatcaaaatttgtgttatgtttatttactatataactattttgaacgtgtaaagtccttttttgtcaagttagttgacaaaataatttttccttttatggtaagattgttgtgcattcatacccga

SEQ ID NO: 298439 - DNA, 2151 bp, Cannabis indica
tattttttttctcgtctaatatcacatttcctacaaacaacaactgagaccactcagtggtcgtgacacttaacaagtaaagacatcatctcagctatcaattctagcttacactaatagtgaaacatgaaaactaaggtgcctaaagttctttcatcgtcgagaggaatgatcaatgtgacatctttcactaaaattccaagttccaatatcatttttttccgtgaagaatacatggcacgtacccaacttaagatttccatttcaacacaattcaaaagcataaggtaaggtgcttgttacagtaaaacaatctcataagaaagaacactgcccatcaaaaatcaaaccaagtgaatataatatcacctaaaattgagacaacccatcactcgaatctaaacaaatagaataaattaagccatacccagatgccaaaatcactaaacaagcacacaaacacacacccctctaaatatttacagaaaataaattttgtattaaatacggtatatcaaacaatgcgccacattcctaattaacaaataatccaagagagagaattacccaacatcgtcgcgatagagacgattgatgagaacatcgcctcggaggttcaagaagtaaatggcggaagcagccaccggcatgacggatccagtgggtggcgtccggaatcagatctaggcggagtagttgcgatctgggacgtaagatttgaaagatggatggcctatctatttgatttgatctctgcttttcttggtaagggagaaatggaagaatttgacaaagcagaaatggaagagaagagttgagttgtgttgcgttttggtttcttggtttgttttgtttttattcttcgctcaataataaattccagtcagcggaaatggcttcttctcagtccttcttcccacgcgtgactacctcgcacgtgctccattttctttctagtttctatctttatgtagtgtttgataaggtatgaattttaatgtgatttatttggaggagtatagccccaatcaaattttaattacctaaggaggtgtttttttttaagtgaaaattttcattccaaaacattcattcaattgagtaattcagtctcaacaatgacagaaacatcactgagaacattagagcttaagaaagtacaatcaacatctaaacgagaagttcttgcaatttgataagtaacttgattttatttaaagaattcaacagctatttgcaatcctccacaacacctacaaacgtaggaagcatcacattatgattatgaattgcttggactaataccaagtaatcattctcaacattgttgaccgttggggagtcttttcagtcacaacaacacctcattcaatgttatagcttcggtaacttcaactagcacaacacctgtctttaattcagatttaccagccaccacatgaccgggatgatctctaatcactccatgaaacccatacttttcgtcctcctcaaaaatggcaacaccgataatcatcttaagtatatcaacatctagtttagaccaaaactcaacccctttcgaaagacactaagtatctgctgaaagaaaaagacttttatcgagacagactattgggcatccgattcaccgtttcccacagtaaatcaatttttgggagaaatggttaaccaaaaaataatagaggcaaaaagttatttttttggcactaaaacgcttgtaactaggggtattcatccaattcaatctgtactattttgctcattgtgcatccaatccacactaagtgtgaatttcattttttggatccaatccaatctgcacaataactcaaattcaatccaatcaaatctgcaaaagtggggattggattggttactttttaatatttatgaaaaaaattattgttattttatatctctaacaacaaatcaaaataaataaaagggataattgtggcaaaagttccccaaaatttagagttgatgcagattaatccccaacctcgaaaattggcggtaatagtccctaaggtcacattttttgttagtctgttggtccctaagataacggtccgtttattaattttaaaaataccccgtgttgaagtattactggtctaaattataattttaataaaaaaaaattaa

SEQ ID NO: 298440 - DNA, 1020 bp, Cannabis indica
gcggtgtgggattgcacagcttacccggtgtttccccttatggatcgtatcattcacttttctatccccatcaccaagagaccaaagttttagagtaaagtttagatgtcaaaattaaaagatcatactattctaatatcgattgtatggatttcgatacattttcgctaatttttgattctattatttatttctcgtgaataaaatagggtttagatccagattacaatattttaacagtaagtgctcacctatgttagagctttatttgaataagttggtcaatttagaatggattgtttagcgcgtgataatgatgtccaagtcctagaatctttcatcatgggaaagagagggccgtaatataagctaaaaataactaaaattattggtatcaaaggagcattaaattagataaatagacaccaatataatcaagttgtgataaaaatagacaacttaatttatatctaagctattatgagtaatttgtatatatatgcttttagaatttagtttgttcattcatgattataagagtcttttaaaaaaaaattcgtaatttttggcgtgtatttttttttttaaaattttgtttctcaaacttctgatttattgcatgaaatacctattattgtagtgagagacttttgtgttgaatgaaagttaattatcctttaaccaaaacaaaagattattaataaaaattaaggttgaatgatacatatttatttggtggatttgaattgattaatatatgaataaataaataaaagtggtgtgtgagggtagtaaagtaatagtatagtagtagtaattaagcacgtggaggaggaagtaggagagtcggcgccgactgtttcagtttgggacaccttttcctttcctgttgactctctctactggaccccactacctattaccctattacctaatatcaacatcaattcctcttatttttattaaaaattaggtggagtttagttgggaggaatgaaaatataagaataaaaatggaat

SEQ ID NO: 298441 - DNA, 1072 bp, Cannabis indica
attatttgtattattcacattaaaaatgtagtattttcataaatttatgttataataatttcagtgggcctaatgctatattacatttaagggcccaacataaatggttggacaaaattcttgatgaaagttaacagttaaagaacccattggaaatttaattttgtcgatttcatgcataactaaatttgacattcatctagtttaataaagcaaatgagaaaataaaaaaagaagacattaaaataataaaccaaatgatgaaaaagagttggattgcaatatttgtaattatggtgaagagtttgacatgttttcacggaccaagtcatttttcatgcccaacaccattatggcattataaaatatagtttaagaaatataaatattaataaacttatataaattattagacgaaataatcattcctttatatatacgtaaacaataagtcaaatattttggtatctatatctttaggtctaaagcttaaccatccgtttaagtaacacataaaaaaccctatataacacatgaaggaatcattagacatctcacatgcatgatcttatatatatatatatatatatatatgctagatgagacttacgtgtcgagccacgtaaattttagttttatataagttttagtagtttttgtttaaaaattcagtaactaagcaacgacaacaacaatggtaatagatctatttaagtttttcatatttgtaaagattataaatctaaacttttaattttcttgatttaagattttgaattgttctgatttatttgtttatgaatttattgtatgtttctagaaaaaaaagtattttttaatatagagtttaaattttatattgataattgttaatgaaattagtctatagctttatgtttctagaaaaaaaaaaagtattattttatatatagagtttaaatttaaatttatataaatatatttattttaaaaagagtaatcgtatatcaaaatttggagatatacgattttttttaatttaaaaaaaaagattgtttaattttttggattaattattgggtttatttgttaa

SEQ ID NO: 298442 - DNA, 656 bp, Cannabis indica
aaaaaaaaaaaataaaaactttaagcaagggtgcttgtaaatttacagttaatgggaaagatatcaacatttcggaagactcgtgggtggcccatgggattttgttatgtccaaaaccgaatggcgagcctcaggttagcctgagtactgtgcactactaaaaaattaggtttctccaacaacttaaacagtcgactaatgtattgccatcagactctataattgtcgactattcgaccgtctcaaaactagataggcggtggtggaaaatcatcgacgaaaaaacttactaacaaattaaaactgtcgacaatagtgaaaactatagcttacagttttaaaccgtaaactatagtattttagcattttcctcatcttctgcctcttaagcctcccatactcctcatagttggacattaagaacacgacaaagaatcttcgaaagaagattaagcagcgaaatcctttgattcaactcttgatttgtagatgcttctaactacaaacaaaaaaactcaacaatataccaaaaataaataattactttttttgtaatcttctttataactttttagtcaattttggttgtctttttttaggttaatttggatttttgccccctgaactttgacatgtaccaaatcatgtcccttgaa

SEQ ID NO: 298443 - DNA, 1047 bp, Cannabis indica
atatatcttttattccattttttatttttgttacctaaaatagtgggataagaggtcccctttcttgtagtgaattggttgcaatttaaagtattggaatatcattccaatagaatgacctttccaccattttggtgaaatgattattccattttaaaatagaataaaagatcattctaatgcaagatttgaaaaattttaataatttttttttttatcaattttcttatgcattttcaatttaattcattccattcttattccaatttccattcccactcctatatttttattcttcctaaccaaacgacaccagttagaattctttttaatttaatttaccaaagaaaatgaaacaaatcatggatttagagtggattaaaaattgtaaagaaaaagtgatagtaaatttgtataggagatcaagtataaatgagttgaggccttcttgtatgtgttgttagtttgtattcgttttggtgtttgaagtaatacaattcattggtttatatatataaaattaatacatatgaggtctaggatgcaaataagagaaaggcatgcataagtgtaatatcaatacaccattttattcattcagtttttgttatcgccatgattatcaatcacatgggcaattaaaacccatccatcagctgtatctgcatatgtaataatgattccataacataaccatatgtttcgacaaatggctaattaagtagctaacaattatttattaattacgtatatagggatccattgagctcaagccccaaacttcttctgaagttgctgaaccaaatccttgtccaacatgaacgccttagcaagaacatcaggattaattggagggtcagatccaaacacggcattagcagttaaaggaatcgagaaataacatagaggggcatttcagactttcctcttggtcctgaattataggaatgctggtgtaatagaatcaactctgattttatgaatctttaccgttagcataggaatatataatattccttttctgctttaacaaacttgtacgtgtaa

SEQ ID NO: 298444 - DNA, 7021 bp, Cannabis indica
acaattctttttaaaaatatatacattatattttgtaaatttatttacataaattaataattttatttcaaattgtaatatatgtatcaacattatatttactttaaaacaattctattataatatagtatcaataattatttattgttattattgttacattgataatttttagtattttaattttttttctagtgtaactctatttaattataacctctcaattaaaatataatttgcttaatcccaagtgtattcttgaatagaggttctactttataagtaattctaataaaatgtctatttatcaaacaaaaagacattcataaattcaaattcacacaaagacaaaattggaaaaggttggaaaacctagtcatcttatatatgaattgagtacactaaaaaaacatgactttatgcaaaaaatttggatgtatttccaaaatttgacattttcttataaaaattaaaaaacttttgttctttcttttattttattttaattaaaattaaaaaaaaaccgtttttaatttttttcccaaaaataaaactaaccaaaagatgattttgtcggatcagccaccattaaaatgaggtgaagtaaattacaaaattaccctcaatagcctttatagtctgtagtttcaggtatataatagagttggtacccttattattaccatagtcaagtcaaaaagtcaaactaacttccatttcactcactctctctctctcctcgcctgaaaattcaccggcgattatatcagagatcattatatatatacatatatatatgatttgtgtgtatttatgtatgtattgttggttttaactaaatccagattgattgtgattaagaccacaacaacttgattaaacactcttcttctcactctagatatataatatatatatatatatgtatgtatatctgccattgttgaattggagttgaagcttagctcagttcagctcagttggtgttatttcttaatttatcggcaatgttgttgagaagatcttcttcttcgtattcggttagaggtttcttctcgatcttggctccgattctggttcttcttctatgttcggatttgcttcctgtttctacgagccagagcgagagtgagagtgagagggagaggttggttggagatgaatcggatctgctacttgggactaatttcactcagttcaatgtgtcgagttctaaacctaaagaaggtagcttcgctgatatgattgataaagctttggagaatgagttcaaggagaatgaccaaaatgaaggtgtgtagatccgaatccgaatccgaatccgaattcagcctttctttctctttgtaacttctttttttttttgttagggtttaatgttgatgttgcttcgtttgcatttctagtaaattggagtttactgaagattcttatgagattctgttttgttggattgaaatgatttgcttggttttgaagaatttggtttgattagtcaataacgtagaaatacatcaaattgtgtaatgaaagaacaacacttcatatcttaatccttaccatataatatatatatatatatgtaaattactgatttgtggtataataaataagagaataatcgatctgaacgccttttcttacttgtggtacttgttgcattgcagctaatgatgctgggagctttaacaacagtgtttcagagcaacaggttggtgctacttactgcatctcaaatattaatctcttacgtttatgtgatcaaaattagaagaatccaattcaaataagatttgggaaagaatcaaactttatggtgaaagaaatgttttcaatggaaaagggaaacagttaccatctttccaaaatttgttaatgaccatgagaagtatgaaaatataattgtttttagctaaatgtgtattttatgctcatcaggcagttctggagactgttgcaagagtcaggtcgaaaaaaaatgagacgaaagaggagaagtatgtgctcttatctgaaatgaatatatttattactttatgagcacctgttccatattggttttgctttcatcaattgaacttgcttttgcattactcaattgtggtattattaggtcgtttcagtttcaagatgtcttcaatctggataatgaaaacagagcagaagatactccaaccttgatagatcggaaggtaaggttgcttctttagaaaaagaatgtatacatttatattaatgccatgggtttttgttctcttgccaataaaatgctatatcacttttttctctatccgatcgactcctctcaggacaatgtcttcattatatcaaactttaagtcaaagtatcctatgctgcagctagacttgaggttgacttactgtttctcgttttgttaagtttgttcttcatactttatgagatagtctgaactctgaactcttcaatttgttggattgcagattaatatcagatttggtagttgttattgtgtctgcaacctgtggggggatcgcctttgcttgtgctggacagccggtctggctacctttttctatgaatcatattgattaattacaacttaaaatcctatgtttatttcttctgattccgttatattattttatgcatggtgaaggttattactggatatttgctagcgggatctttgattggccctggaggattgaacttcatcagtgaaatggtgcaagtatgtttcttcttgcaaggtttttactttttatccagctttctgttatgaagacaataaaacacttctggtaaataattcatatgttaaagcacccatcgttcatctcttgccatttaactagttcgattttcaaaacaatttttaatccataacataggcaatgttaagttcatatgtgagtataaatatataatttttttcctcatagataaatgtattttataagacagttacaaggacttgaactcttctgcatcactcacacacccaaagcttgaggcattttgggcatgttaagttctataagtattcatcttaattgatttcatcctaattagttaggcccagtatagtatatgaaagtttgggcctcatcctcagataggtacatatagtttttacttcatacccctgtacataaaattaggtgtaaaggataactgttttttaagagtagttatagcgtatgatactatgcttcccctttaaatgatggtctatttgtaggttgaaacagtggctcagtttggtgtaatatttctcctttttgctttgggcttagacttctccacaacaaaggttggccattttcttgctctttcacttcttctccctcccttcgcattgttttttttgagtggtcataacttataatgctatttaaactatcactttgtgattatagttgaaagttgttcgagctgttgctattctaggaggtctgctccaaattttactattcatgtgcctctgtgggattacagtatcggtatgtgttgggcattcttacttcagctatatttgtacttcccatacacttttatcaggtgttggttcctcgctaaagtactgattagatgtttctttttgcagttgtgtggtggtaaaacttcagagggagtatttgttggagcatttctttcaatgtcttcgacggcagtggtaacctaaaaattgtttcatgcatgcatgtgtgcaccttattattcatttctctgtttgtgatttttcagctcataaatattgcctggatgtgtattatgattactgaaaagttgcattcttgtgtcctaaggtattgaagtttttgatggagaaaaacaccacaaattctcttcacggccaagtcaccataggcacccttatcctccaggtgtgtaggatttaacactttactcttcttacttcttatggacttcaaattatttaaaaatattttacaatctctctttctggaaatatcttgagaaatgtttgttttccaggactgtgctgtgggattgctttttgctttgcttccagttcttggtgggacttctggtgttcttgaaggatttctgtcaatggccaaattgtaagttttgtcatttggatccagtggatagtgttgattacacacttttttccttgaacattgtgcttatagtaatctcattcctgtacttcaatacttgatataaggataagctgatcatctacttttaaccaggctggtgatcttgattgcatttctagctgttttgtcaatagtatctcgcactgctctcccttggttactaaaattgatgattagcttatcgtctcaggtattattttgcttttgaatgaaacaagttagttgagtgtgcaattaacttacattgtctactttgtatggtctgtaacaattagtttcatattgcagaccaatgaactctatcaattggcatcagtggcattctgcttactcgtagcctgggtttgttttcttgcttcctgtaccatctatttgcggccttggttaatgcttcagaaaatttctatttgttatgcatatagttagcagaatgactggtggttcccattaatattttaattgtgcatacttatggacagagggagaaacctaatttgcagtaacaatgttattttggcaagctgcaattttttcttttctgtgtgaccttcttcagtatatcaaaatatactgttataaccatagattgcatgttggattcattatagaatgtttgtattactgcagtgtagtgataagttgggactaagtctagagctgggttcgtttgctgctggtgtgatgatatccacaaccgatcttgcaccacatactcttgaacaagtaagattaataaattattctcttttcagtcaaatggatgctgtggagatgtatggagagcaattgatttcgcgtaactgtaaatattgtattcaagtatatgctattatacatcttaaattatgggttagatgaatgaggtataagtggaagctagcctcgttttgttcttcatagtagtgtgcctgcaatggttacctatcgaggtagattagaggtgacgggtgttgttgaaattcacatccttacataaaaaaattccttgtttcagatttgtggaataatacctgctccagtaatgcaaaatgtgaaatggatcataaacatccatttttgtctgtacacaacaactgggaagataagagaaagaaaactgagtttggagtaggcagacatgttgccttgctctgttaattttgtttaacaccgattttttggcgaaatttgatttttggacttggcagatatgtaggtgttatatcttcccaagagaagtaagccttttgaaaagttttgtgccaaaccattcaaaataatttctatgcggtcttcctagttttacagtttgcctttttcttctcttcaagccataacagccataaaattattgaacctgtatagtcagcacaaccgccataaacgtatgtgtgaaatatacaatgtatgatagtctgtctttgcaattttgaatcatttgagatttaaataattccatttacagagtgaatcttttcctttatgcagattgagcccattcgaaatctcttcgctgctcttttccttgccagcattgggatgttgatccatgttcagtttctatggaatcacgtagacatattgcttgcatccgttatattggtcatcatcgtaaaaacagctatcattgcatcagtcgtcaaaggatttcgctacaacaacaaaacttcaatccttgtaagttttcgctaccacaatttactgtcttattaattatttttcacttcttctgcaagtgatcaatgtgtggttattgttcattgtacaaaggtggcattgtctttggcacaaataggggaattcgctttcgttctccttagtcgcgcctcaaaccttcatctagtcgaggtttgttctgtaacttaagttgaaatatatactataatctgtttacaaccattaccaattcttctctatcttatgtaaccagggaaaattgtatctattgcttcttgggaccacagcactaagcctggtatgagttcattttaatgacattcgagtataaaatcatgtcgggttctcttctagtattttactcagctaatctaccgtgaaaaaccgatgcaggtaacaactccaatgctcttcaaactcattcctgccgtcgtgcatcttggcgtgctcttacggtggtttccccccgacatttctctagaggtaatcaatcgcctaatctcgaatccaactccaaccaattccaagttccattttcaacttaacacgttcgactctctttctctttctctttcacagatgggattaaaaggagagaatctccgaagcgacagtgggaagcaacgtgttgttgtgttggttcaaggttctcatgattcctaaaacttccaactaagtaggaattactttctcttatcagtccaatcaacaaacattcagaatgaaaccgaacaggaccgataaggtttatcgatctaacgactactgaactaacttaactaacaacccaagccttactcccttattattaattttttttcctcccactttgtgatatcattctttctctgtataatatagtctctttttttgtttctatgttgtaatttttagtttgacagtatttgatttctccaagtggtcagttttgaatgtatcaagtcttttgattattggttagatttcctcttctctttttcacagtttcaacattattagtagtgtttattttgattgggaatcttcttgcattcataattattgaattaattcacttattattgtgtttagagtttagatttgagacagaaaagaaaatgggaattttgttttatatttattccataaaattgagttccaaacaagcaactatggcataacaataaataacaaagtccaattattatttatttatttttttttgaaaaaattaatcatctttattaattgcaatctatagtgattacatgatt

SEQ ID NO: 298445 - DNA, 1559 bp, Cannabis indica
caggtacacatacctaattattatgtattactattgtgtactatgttatatacaaatagatcttgggtatattattaatttttctaacagatctgacccatattttaaaagatcgtgtcatattaatatattataacgctaaaaattacattaaaataaatattttttatagacatacatacatataaatatacatattattattatttcttttttcatttctacttcctccaaaaagtagtaccataccataggtaaagaaaagagtcaaaattaatagtaagaatattttgtaaagtttaatagtaagaaaataggtaggtaaattttataagaatgtgttagtaattaaaatagtctcatttgcttaactaatactgcaccatatgctccaattcacacacgtgatgaaccaggacctcaatattaaaatggtgtttgttaataaatttatttttaaaaaattaaatattttatgtggtatagtttctttaaatgaaaaggtctctaatagtcatttttggaaaattgtttacttgtggaagccaatcctgaaaggcttccttatcattccgggaagggtcttcaagaaaagataacctttctccgagaaagagttccagatggctagttgttcctcctaaaaagacagttctagatagtcgactctagcagactttatcctattcggaaactccttccgtgagtccctttagtctgtgatcccggaagctcatatacattcccgaatgcactaagacttacgctgacgtgaaaatcttgctttaaggaaaatttgtttagttagttactaactaacttttcaacttcatttcttgcagccaccgactttaggatcttgatcctaagactataaataccacattgacctgacattttagaatacggttcagattgagattaagagttaaagagagttaagattgagaggtagagaaagacaggtacagagaaaagagatatattgcgtttagattttgtaagaagaattttttgtagatgaataaggttcttgggtaagagtgtgagagttgaaacactttgagagaactctaataaaacttattttatcaggatctagacttactaacatgtatgttgattaacaccctaaatatgaattctctaatacgatgaaataaacacatataaagtttatataaccttatattgatggcagtaaaataatatgacttcttccgcttagatctctaacccttgttcctttctgtcgcagagtaataacaagatctgagcctggatctccttctctccttcgattttggttaacgaccgtctatcgcactatgattgagtacttgacttgctatgagtgggcatggtactctatcactaaggcttgaatatgatgaagaacaatgataaggattcgaaatcactatgaaaggagtctctcatctactagttgtctgacaaagttagaaactaggtttagtttggttgaagtggattggatgagaatgagagcatcatgttcctttcattatttcaactagggtttatgatttaattatatg

SEQ ID NO: 298446 - DNA, 2548 bp, Cannabis indica
ggtaaaataatttccaacagcctgatccttacaacatcactccatctcaaccccattttacttcaaattttctaataatggttgtaatcaagtttatgccaaagcctctgttatgatagcagcaccctataaaagatcatcctttcatcactgatctttcacgcatatacatgcccaatcttggccttaaaaaaatctcacaatacttttgctacatactttcaactcacaaactcccataaaaccttcctccaatacacctctaacaagccgtcaccacagcccttattgtactatcacaccagtcattgttgctgcggctgctaaaccttttcccctctctgcatcacacttgggggtggacaagaaaaatgcctctcctaatgtaactatcaagagaccgaatgatgccctatcagtaaggaaaatgttaaatagatgttgtggtatgtactggaacaaactcttcttcgttgtcacaggaaaaggctgttgagaacttagtttctgaaatttcaaattctattttctcttatgacacatgagcagcggttgctatgtaaccccgcaactcaccatgaaaaccattagatggaatgcacgaggtttggggagctggagtgcgttcaaacatcttcgattgcttattcaacaacaatcatcccatgttttgtttcttatggaaatgaaactcaatgtcaatttgattactcacctcggacaatctcttcattttaaaaacgatattgaagctcctagagtggggcttggtggtctcatgctcttatgaaaagatgatgtggatgttaccttattaaactatgatcttattttttttttgtctgttatatgatggcagatgggagaccaagttttcactttattggtttctatggtgcactcgaaaccaataataggtctcaatcttagacgcttttttagcattttatggatgttgctccactccaaccatcgttagtaattggagacttcaattaaatcctctccaacaacgataaatctagtggtccacttcgtaattagtcactaatggaagcttttcgaactgtcttagataattattgcttacatgaagctttttatgatggtgatccttatacttggattaaaagtttcacatttgggaaaacaataaaagaacgtctggattgatattttttcaaccaccattgggagactcttttcaacacacactaagtgtaatatttggactactaccattttgaccaccatgccatttcagcccctttcaccccttctgcatcatcatcactcaatgaaaatataagagcatgtttaggtttgaaaagttatggttggctgatcccaaaagtaaggaaattattgcaaagaactagatttcttttgattcaaatgacctgattttctcagtccttcgtaactcgaattcctgtgccaaaatccttcaaacttggcatattgggaaatatgataaaatgaagaaaaatatcaatgagatttaggttaaagttgctcacttgaatagcgccactactcgcaccaacaatcatatgaatgaattgcaacaatttgaagcaattcttgaagactaattggaataagaagaagtttactggcagcaacgttcaagggttgattagctggtctgtggtgataggaataccaaattcttccacgccaagcatctgctcagaagtccaacaacaaaatcacatttctctacaatgaggcaggccaaaaagtgaaatctaaggcggatatcaatgctattgtttgagatcacttttttggatctttttttggccacaaatatagatgaacaagcccttataaccacccttggttacattcctactctggtttcggatgacttaaatgagaaccttataaggcctttcctgaaagctgaagttgaaatggccttaaaaaccatgagaccggataaaatccacagaattgatggcatgtctgtcatgttttaccaataaaattggtccatggtgggtgatcttgtaacctcggctgtgttgagtgttctcaataatggagttgatccttcaggcttaaatcaaaccaccatcactctcattccaaaacttaagaagcctcaacgcatgaaagagtacagacccataagtctttgcaatgttatctccaagcttgttacaaaagttctagttgctagattccctttggtaatctctgaaacacaaagctctttcttgtcggattgtttaataacaaataatatactagtagcttttgagttatttcatgctataataaataaaagggtaaatagcggcataagtacccaaagttttaagtttgtaagcggcataaacccaatatttatttttagcggcataagtacccaatatttgtaaaattgtaatttttcttcagttttgtcagtacagactccgttttaaatttattaaaggaacatttagaagtaactaatactacatgtttctgtctagacagaatgatcaagaatctagaccttatatgtggcctgtttaagaaaataacagagtttgta

SEQ ID NO: 298447 - DNA, 3655 bp, Cannabis indica
ttattttttttctttcaaatgtgttaaaatatataacactttaataaatatgatcttaataattaaatattacttgattgagttatagtttacgttaaataaaaaaattaaaattgatattgtgtcaaattttaattaaaatttattttaaatttttatataaaaaaggcctcatttcaaatttcgccctaggtctttcatcaccttaagacgggcctgccagtgaataatataatgaacattaccattaaaggctctagaagtttttgagaaattacagccaacaaaacgattagctaaataaaaataatttgtcacaaagttgtcgatctcccaacgataaatgcttttgtttagggtcttgatcacaatttctgagacactctcaacaatcacaaattggtgagacttaagtaaagcagtactaagagccaacttaaaaattgaagcttcttcaagaaagggatctctgaacggcatcttattggttaccatctagaaaatttttgcgttatgatttctagaagcaataacaaccatcataacattaaaactaacagcaacatcacagtttatcttcagccaatcaaccgaagtaggggtctaacccaactattttggtttttcaacatccacgaacaaggtcaaagcatactctacaaaggtagacataataccattattacaaacataaatgtcaaccaatttattttcacagaccttgtcattatgatctctccaaatggtgtcaacgacaatagatgcaaaaaggaaggtgtcacgagtggacactccccttgaatgaaaactccaaaaaaaacttgacccagtcccaatatattcctccactttctttaatatgcattagaccccatggggaggttctccaaatgtgaccagcaaatctacaatggaacaaatgttccatggtttccacctcaagaccacataaagggcatggtcggtcctccacaaccatacgctcaccaaaaattcctcaaattggcagcgagtttgaaaagatactccaccaaaggagtttatgtctttctaaaaattttcaagttccacagtttatttcaaacaaaaaggcccatagtacagtgcggaggacactccaaagcttggattaaataggcaaattttgttgtaattttttgttgttctcctcacactagatccaaccatcaacccccaccccagggggtttgccaagccttagaatattgagaacagtatcacgatcataaagatcttctaacttttacaaattccaatccccttctaaattaatcaggtctaccgtggtattgcacccatctctacggaaccctcgcggttgaggacacttgttttggccataggcaacccatggatcctcccacatgttgataaaggtcccacccctaatagctttgcatgcactttttgaaagaatctctttaattttgaccacattcttctaaaatcaggagtccgagttacggtaattgcatctcaaaaagggagaacccttcaagtatttagctttcagcacattgcactagagagacctccattcaattaacataaaccaaccccacttagccaagaaggctctattcatctctaacaattttctaaaatccacgcctcctcgagacattggcaaacaaatcttgtgccaagtttttttcatcacctttaggtggtactgacactattggtggtgcttaatagcaatgctaaaaaaaattattcatatattacctctctctacatttgttacaattgcttttcttcgactattgtcgttgactatttctataatcaacaatagctaaatataccttgggttgtgtacttagtatgtgtgatgacaaggttcgagctggaagtgagctcgagggagagttgatggcactaaccagaggtgcaaacatcattgatggtgagctcgtttcggcttgcccattgaacaagaaagtccccaattagaacattgttttttgctttacttaatctactatctattgtatttgttgtagactctctttgttctattatttggtctattcaagcatcttctatagagtgttataaaaaatggtgtatacatatatattttagtttatactcataaaattgaacttcaatagtagtatataatgtggtttaaatttggcacatattaaaagtgccaaatttagcacaaaatataggataaatattattttagaccctatgttttgcaaaagttatagattggaccatctgttttgctaaatgacaaaataaactttatattttctaaaattgtacaaataagaccctgaattgatttttttgtcaaaataaaacttaataatgttcctacttagaggtgttatgacaaaattgtagttaaattttctacatctgttcgtgttaagaattgtcttcaagttagttatattaaaaaaaattatcgaaaaattgagctcaggattctatttgtaccatttctgaaaatacagggttcgttttgtcagttaacaaaatagatgatctaattgataacttttataaaacatagtgtctaaaatagtatttatcccaaaatataacatgagctaaattttatccataataaatattttttatttactcttttgctactcaatattattaataaccttttacattttatttatatatttaataggatttttatttatttttaatcaaaatttaatatttttgttctttttatacatatttttatcaaaaatacattaattttaccataatacattaaagtacaattataaaatttagatcaaatataatattgatttattttttgaattaaatttaacacaaattttatgactctcattctcttgctaagtggaggggggtgtttgtaatccttgtttgttttgcctttttaagtttatgagaggtgaatttctatgtgatcacctagaaattcctatatgatcacttataaataaaaatatgtacctaaaatatgccttctttcatagtattattattatgtatcaatggtgctcaacactttttataagtggcgtttcacaattgattagcgatattccttaaaaattattttcttaaattatataagaccaaatatttaattatactaatagcaataatagtaccttttagcaattttctttctttcatcacctaaacaaaatgttttcctttatgtgattgtaaatgataaaaactatattccattagataaagaagaagaaaaatcaaaaaagcaaaagtgtaaaagttgttgattggctttaaaaaattagaaagagattgataccatctttgcttaaatgttatttaaggtacgggttcttttttctccattggtactataaagtctcaactcgactttaattggttgatcgaccaggctttatattagattcaatattgatggacgaaaatgatgtaatcaaatattggattaattttcatttgagcattgccaatgctattaattgttattagctatcagtaatacctaatactttctagatgtgtcatcttacagttagttagtggtactctctaaaaactaatatattaaattatatagaacctgatacttaattgtactaagggtaaatagcggtataagtacccaaagttattagttagtagt

SEQ ID NO: 298448 - DNA, 2281 bp, Cannabis indica
catgacaggtacatgtgtgcacatgcattatctctaagtcaccctggtattcgctgccgatgtctagctgcttatggagatgctgttagtgccgtaaagtggtataatatttgtcttgagattctttgacggatattctgcgaatcctctacacagatttaatgttggctgtttttatatattatttcttttgtacagggcaagtagacttgggagagaacatcacgatgacttagctcaatttatgttgggcatgggttatgctactgaagcacttcatttgcctgggatatctaagaggtacatgtgcattactgtagctcttgtttcttttgatgttcaatcttcattgcattctagatggattttgttatcctcttctttaatcatttcataattcaaattacagaatcctgtcacattctaattccatatgaatttattttgttactcctctcctctgttatcttttatgatgtgtttccatgattgatatttgtgtttcctttaaaatatattgtttttctagttcatgactccaattttacataaatattcttgcatgaataacatgtatcttattccattttgtaggttggagtttgatctggctatgcagagtaatgatctgaaaagagctctccaatgccttcttaccatgagcaatagtagggagatggggcaagatagcacagggctcgagttgaatgacattctcaatttaacagctaagaaagaaaacttggtggaagctgtacaaggaatagtgaaatttgctaaggaatttttggatcttattgacgcggcagatgctactgcacaagctgaaattgcccgggaagctctaaaacggttggctgctgcaggatcagtaaaaggtgctttacagggtcaggagttaagaggactagcattgcgccttgcaaatcatggagagctcacaagactgagtgtatgctactatcctatttattttgcttgtcttctagggtctgagaccattgcctgtgatattttattctagtttacctttttgttggtttttgaattgcttgatggcactagaatgtttaacacgtctaccgaaatccaatttcatattagactcttttttatttaacgtgttaacttatttctcagataacatactagtactttcaaacacaattgtctttactgcagggattggtaaacaacttgatctcggttggtcttggacgtgaagctgcattttcagctgctgttttgggagacaatgctctcatggaaaaggcttggcaggaaacaggaatgcttgccgaggctgtgctccatgcccatgtatgctacattttcttatatcctcattccctgttctgttttcaagtattttgatctaaccttcttatccatttgacttcaggctcatggacgaccaacattaaaaagcttggttcagacttggaacaaaatgctgcagaaggaggttgatcacacaccgtcaacaaagatggatgctgcagcttcatttttggcctctcttgaggatccaaagcttacaagtttagcagatgcaggcaagaagccaccaatcgaaatcttacccccagggatgccaactctcaccggtcctatttctctgggcaaaaaaccagctccagcagcagctcagaataccgagcaacaacccaagcaattgctattagaagggcctactaccgcaccagtcccatcaccaatacctacaccgccaacaacaacaacaacagaaccttctactagcacagaagcagcaccaacaggaacagaagccactcctccaactacggaaactcccacaccccaaccagactcgggagaacctgttacaggggatacacctcaagttacatcaacaagtaattcagatcaggtaaatcctggtgaaacacctgttgtagaatcatctacggccaatatagttgaaccctctgaggctcttcctcaagttcccgagatccatgaaactaatttgcaggcttcgtcattagcaacaggtgccacatctacttgaattgcaagacatgccgctgtgttctgtctttgccaacaatagaaatttctgtatcgatactgatacaccatgaagaactccattgatttacaatttttctgtattgacatagagaaaaggaagcgattttgaatagttagtatctgtaattatgatggttgacgtgtatacttcatttgttcatctcattgtttgttgttttctttgttttgtttttcttttcttattgttgttcataattgtagttgt

SEQ ID NO: 298449 - DNA, 3089 bp, Cannabis indica
tctaataaaatcttcgtaattaataaattacgcttattaataaattacgcttatttaagtatgttctcaaaagtcgctaattatctcataattaacttttgtaacattataatattactcataatattcatatcactacatatttaataaaatatgtccaattaaacatagttatatttttttagattaattacagtatcgaaattggataagcagaacccagcgtaccaggttatgcccaaaacacattattttattgatggaaaaaaatgctcaaaacactttttctagaaactaattggtaatggcccaggttgacattatgttaacctaggcctaggcctagattcaggcgacctagaagttcgatttggtccttggaaatatttgaatcttaatatttgctaaaaacagagaatatgcctagaataatttttggaaaaattcttcgaaattggcctaggttgacaaaatatcaaccttggtgttgggctagccctaggtgttaatttgggtactgggcctgcccgaggtgtccaccttggcgccatgcccttgttttggaacctaggatgggttatttcttccttgaaagcacttgcttccccatttttttatgaagacgaagaagatgcatgggtcaaatttttgatttgatgtttaaaatgtgcctaggttgatagattatcaacttgtgcgctagggtgcctgggcaccgggtgtccgggtgctcaaaaatgaatgttttcctaatctaattctgatacctcaaatatgtttatggtatgtctagtagattcccaatgaaattttgacttgtcccaaaaactaaaaccctagtggggttgtcaacctaggcgttgggtgaaaccctgggtgcctaggtttacttctaaggtgttggtttgtgtattttcaactcccgatgtctggacttggttactccatgtcttcatggtatagaatactgaaagatagtgagttagaaatgacttatcagatgctgaacttccattttgaagttcccggagtcaacgtaggctgagggctagggaccctttccaggtcgactgctatgactcgggactactcaacttcgagatgtcatcttgcttgccatgtgtcaaacattgatgtcctcatcacctggaaaagtttttgggttaatattatttttcatgcaatcaatctcgtgagaataaaaactcaaagtagacgtagctctattactgtcgcgacacagagagtgaactactataaatttttgtgtgtattatttactttacatagttacttataactttcatctcatctatagatataagtgagttttccaaatttctgcgtcaacattttgatgctttctttgagagccacaactcaagaaatcacttacaagatagttgtaacttcatttacaagtgtggcatgtaccacaacaactggtcaatagactgggggcatgccagtcactgaaactggtgatgggagtacttcacagatgtcaggtggaggtctcaaaaccagatgcataactcgtcccctaaggccactaactgctactggtatcaacaccaatgaacaaattccacctaaggaaccacgtgtggaactacaagctgcatgaacaatttcaaaactggctcatggagaattggaggaattcggagaatcagcatgttgagtaagagcagcaaagggataacctatcccagtaaaccagggaagtttatcgctccagtcgtgaaacaccttccctaagatgagcttctaagctagcaggagagatacactattgaccaactggccacatggggactagcacctaaggggaaaccctcaatgcatgaaacacttctaccatgcccggtattcgtccaaacactcaacgcataacatgtattgtggctcttcgaagggaagcaaactttgagcaaagaactcaagctcaagcacgctaaataataggtcctccgctagatcttgagcaaccatgtgctactaagataaacaattggtcacctccataaggttctcctcattggttgaataacaccaggcctcgtgaccctacaaaaggaaagggacctgagactgatactagagggggaagacaatgactatactttaaaactagaggttatgaaattttaagagtaaggactaacgagccacttcacactcgaaagtacttctgagatgacagaggtcagttatgcttgtacttcgctcgtagcccacgaccaacaatacgagtatttccctcgagtgcatggggaagaattgaacctaagcaataaattcaactcttttcgcacttgtgatcatgctgaagactactttgagggaaatatcactacaatattcctaacaaccactcatacagcgtgtcatcccaaaacgattcaccctttaaaacatggacattaacaaggctataaaagatttaaatggtctcctttcttattttgaagattataggaaaaatgtatttgtaacggctatgaattcaactaaaaaaattgtaagtgagatgggaatagagcctaaattttctaaaaaataattaattcgtaggaaaaagcaatttgataaaaatgttgatgttgatgttgctgtaattaaatcttctgaagaatcatttcgaattgattattatctttacttgattgatcaaattatttgttcacttaaaataggtttgaataatttcaagtgtatgaaaatattttttattttttgtttagtatgaagaaactaaaagcattgggtgaagatggtttaaaagaccactctttaaatgttgaggatgttttaaaatacaatggatgatctgatattgatggtttagatttgttttcaaaattgaaagtgttaaagaaattttttccaaatgaaatagtaactcaattgaaatacttgattatataaaaaaagttgattcttttctaaatgcatatattgcttacagaatattactaatcatttcagtaacagttacttcagcagagagtattgtaacgccctaatgctaaggcacgctacagtgatttttcaattacagtattatctttgctaatcaaagaatt

SEQ ID NO: 298450 - DNA, 5118 bp, Cannabis indica
tttgctctggtaggtggggtagtgggtgcttgctctctcatttcagggctcatccatctgtcgtacttggcgtagtgacagtttggctgctgcttcttccttagctctcatcgcttgggctctaacagctcttgcttttgggtactcgtatatatatacatacatacattacatgcatacattagttcatgagaagttacagccaaaataaattctcttgttgcagacttgtgtgtaaggaaatgatactaggaggacgcagaggaaaacgcttggtaaagatgtaacagtattttttgaaccaaattctgagtggaaaaaaggatcttggttcttaaattcttcttcttcttctttgcagcaaacattggaggctttcatagtgatatcactgctgagtcagatactttatgtggtgcttctccacggtggggtgtacagtagtacttatggtccagggtatcgcaatgacccccagaaacctgccacatcagctgatatttgatgtttttttcgttgtatgtttttatatatgttgttagaagaaaactatatactgttatatcgcatacatatacattttgcttagtacgagtatatggcagaggaacaaaccaactgtacaagttttgcatgcttaaaaatagtcccaagaatattattatgattgcatcctcttttccatactgaagtgttcactagagttatagtatattcttctaaaacccatttgaccaacatttactgcggttattagtagttaaattgaacaaattctccactaaagaaaagggtttgatttgatttgatcactggtttgattcatcatgaatctgccattggacaatggccagagtatggcgacctccacaagcaacaagcttagctatccaacgttcctcaccttcttcgtcatcagttgtagtattctctgtaggaggagataggtctatgggaacctccatcggttgtccggtcgtcaccttcctcccatatccaagccgtccatggtctccccgaccaaactgccatagataagaagttgaatgaacggttgagatcttaagtaaacaaggttagaaggagacaacgcaagtgaccaagatgaaggaattttatacacaaaagataaaaaaaagcatatatgatgagattattaccgaaaatatgcgaccatcacgggttaatgcaaccgagtgagtgcctccgcaggatacctattcgaaaaaagagcatacctttttatctttagacagtttgaaagaggtagagaccaaccgtagtggtcagaatatttgattgaattcaaatatgaatactacccttctactagaaaatcacttcgagttacaaagacagtttgccaaagcaaaatcatggcaggctgacttgctggctaatgcaatttaagtagtgaaataatgattcaagatggttgaactcgaaccacttttagtccccagtttaaaaatgctttgggatatcaagaggcccatcctatgatccttgcatacttttttaagaaaaaaataagaacgattatgacaagagtaaattttttaaccaaggtagcttaattttctcacactttctggtatcatacaaatcactctgataaatggatcatctatcaactgaagaagaccgatcaaaatgttcatccaggtttgatgagaccatgtcatatcttccagcaaagcaagttagtggtaaagtttaaaggaatagttcattaatggtacctgaacaatatcttccccagccaaaagattcactttctggggcaccattttactgcttttgtcattatctccaaatccaagtcttccatgttcccctcgtccccaaccatatacctgaatatagataacacaataaaggaaccttcgttttaaagtgttttgctcaaattagcatcctgcagagtagaatactcacctctccttcatctgtaagtgcggtagaatgccaaccaccagcagcaatatcaacctggatgagaaagaaggacaatcttatcaaagcaagctactacaaaagacataacaataacaaacaagaattcagaaaatttagacaaaagaaagaaagaataatgatgatgaaaattcgaaatgagctaaacaaggatctgtccaatgattagcgaaactacttaattttgggggggcttcatttgtataagtgaacaaatattataattatagaaagaaccaacaaaaaattagttaaacatatagctagagagaaatccagtaagcaaccgtgatatgagaaagaataaagtccaatgattcttagaacaaagaagagcttttcctggaagaaagaaaaaacataggacagacagaatattttagataaaataacactaaccagagtaagaccagaaagcccttgaacaggaattggttgggatctgggttgggtatctccagttcccagttgcccatattcattattaccccatgcccataaagtaccgtcctcttggagagccaaattatggaatgccccaacagcaatcactctgacagcttcaaggcctgcactcggacaggaatagaaatctgttttctgtaagaatttacaaagaataaacaaagttttcataaatttattttatgcaaaatatacatgactgtaaaaacggcaaaagtgtgaattcaaattaagacaccatacatatcaccaggaggccatggctgaccccatgtccatacttgcccttcccgagtaagtaccacagaatgagtacccccagcagcaacctgtaatgtgaaaaatataatcatatatgaaatacacaattcatatggtttaaaagtatagtatatcctttcaaaacaagcaaaattgaacaatctaaggcaacgtatgttacttgattatgaagacaaaagtgcaatagaaattgaggaagagcgcaaatattttattccaggtcaatatcaccaggcagctataaatgaaaggtgtgataagtaacattaccgtggatttgtgatctattaaactgggcatgtgaagggggggaaatggtaacaaacgtatactaaaaacaagagcacaaaatacctatttcaaacttcacaagttcacatccatacgaggctttaataattgtttagtttcacagaaaggatatccctaagaactattgtacagcattcctagtgacattctttttcatgacctcttagttaaaaagggttggaaaaatgatgccatactgaatactgatcatacttcaccggaatctcttgacagtatctatattatttagtaaacaggctattatctcatactaaacattcaaatgtttcaagtttttttacttgtaaatgaattttgtaacattaatacgaagataacaaatctaatattccatgcctccttcgtgaaataaacagccgtaagctaaattcaatatagaaaacggaaaacattcaatctaacacggttcagtatatgtcacaccatctacctgtgtcttagtagcatacctggcggactacaagcttcggcgcacaccgctgaggaatcactatatcccttcttagaggtctaccagtgtcatcctttctctcaggttcttcaccacactggccatactcatttccacctgaaaatatcaaaatgcatccttagtcaatcaaaaactaaattcccattcaacttcatcacacattatgagaatcccacaatccttattcagacgtttataacagttttaagttacaaaaaaaaaaaaatagtcagccatgtggttggctcccacaaggcctgaggtacgtgtcccatctggttacttgtataatttcctggtcaggaggtacttacataacaattgttattgtttattgcttggtccccaaatattgtagagttaggtgggttatagtttaatggagacaaaatccattacccatcgtattcaagtagtaatattagtcaaacaagattctaaaattgtagcacagaagaagaaaaaaaaatctaaaatccaatatcatattcataccccaagcataagcccggccttgatcatcaacagccaaacaatgccaaccaccaatagcagcctgcacattgaaagtaaaagaaaaaagagatgagttcaaacttgaggagaaaaagaaaacctccaatcgttgatttttctcttaaacacgaaagcttgtttcaaagcaaaaaggaggattacctcgacaatcttgacattagccagagccttaacctggcttggaatattttcagttttagtttcaggagggtgtccaagtgttcctctttgattccatccccatgtaaacaactttatgcatatacagcataataaaaatacagtgagtaacgagaagaaaaaagggtagcagaaaaatattagattacgatgctgaaaggagaaaaggaaaaaccttgccatcctcgcaaatggcgagggaatttcggctaccggcaactacagaacgaacgttttgagactcaagagctttaacaacggaaacccattctttatcttcattactccccaatcctaattgcccatcttctcctgagcccctgttttatgacataatccattaagcaagtcaaaatcaaaaacataacttttttgcccaattattgacggaacagataaaacgtgaaaaagagcgagcagagaccaggctataatggcagaatccgaagccatgagaggttgaaagagagaggtgtgaaggagagagtaagaaaaagagcagcccaacccaagcacaagcacaagtaaaagagtagtgagtatggtattcaaactcggacacagcgaacccgatgcggcaatgcgtcagccatttagtgggcatgggtacaaaacccaattttatttattgtttattaaatgataaaatcttttaaatttttaaaacgttttttgagtttttatgagacagctgccctcttttaaccattaatgagatgccactttcctcgtttttaattaggttaagtttttatggattagtggggatagaatcaaggctaatgatttttgccctctaaactaatattattaagattgttaaattattatgctctctgaactttcatgatttgatacatgtcaaatttcgg

SEQ ID NO: 298451 - DNA, 2515 bp, Cannabis indica
atatatatatatgccaagtcaatgcacatggtgcacgcttacactcttcaaaagtttctatataatgtatatatatgttatattataatatatagccgactatatatatatacacataacactatatagtagtctctatcgaaaatggattgtttgtaagctatctccacttacccaaatggccatatataattccatatgacttatcttatgcctttttgtttttttattgcttttaagattaatataatttcttatatatttaagaaaaagagtagattttgtttgtggattctcataataagtagaaaatttgactatatatataggtaggtttgtacctgcatgctttcatttcatttcaagtagtcaaatataatatataaacactatacttatctcaattctcatatcatgcatacaattaatatgtaattatatatataatatattattattattgtcactaactttggtgataaggctttctttcattgatgtcactattgtcctttaatttttttttttaatttaagtacgttaagtttgctttcattaaactacacttgtgctttaaaaaaatatttggtctttttcaccttttcttaatggctttgtataactaataaaattgtgtgaaaaaatttcttaaatttatagttattagaaattgtcttttttcttcgatcaagctcgtcgactttctttgggcttaagtgcaacttggtcaggattttgctactgtaattagtcttgcctctaacttttcttactgcaatttttggttcaagtcattaaatttttatttttattaaaaaattcatttaaatatacaaataagaaataacacatggataataacactttacagttaatacttacgaaaaatttcaaaaatataatttaaatattattactgcaaactgaaaataaatttaagtatatacgcctcaaattactattaaaaataattcttttattaataaatgttttggttggcccttctttggatttttgactatggagacttaaaactcaagtcactaccaataaaacatcataacacaccgaaagatgtatatataaataaataataatgaaaataatactttttttttgctggaaaaaagagggatcttttgatttagttttttttttacttaccatgtagcacagatctctctttcttatccttacagtcattttaataatttcgaaaatttcagttataagagtcttatatttcaatttttttttaattgggtcattagtaattatcttaaaagtttaaactatacatacaattctttttactgctgatacaacctttcttgttgtctttgactttttggatccattgagtttctaattatctcaacatgaaaaaaagaaaaaggaaaaagagagagtaaatgcagagttgaattgggggaattaatacatgtaaaaacaaaaagagaatataaatgggttaaaatgatgattttatttttctcttttctagttgataattgatatggattccctctttctattctctttctcataataatagtagtgaagagaataatattgattgtttgtgtgagtgaataaatatgtgcatatatttttatggctcaactcttaacacatatctattaatttcaccatatatatttataaattaattccatggtccaattttggcaaatggaaaatcgacaaaacaagagagagaatagttgagtgggattgagactgtttctaacaaaatttctaaatgaaattaatgatattttattattagtataatttaatattaaatttaagttattgattaaatttttatttgttaaataataaattaaattttgcattttttaaaatagtaagtactaattttttgttaaaataaaaattaataataatttgatctagagttgttatgaaaaaattgaatatattttctgtaactgttattattttcaagatggttatattaaaaaaaaaattatcaagaattaagcttaaaatactattttgtactattttaaaaaattaaaggtccaatttattattttacaaaataaatagtccaatcaataactttcacagaatacatggtctaaaataatattaacccaaaatactatttataaaaatataatctcataataatattagacactactaatatcaaataacaatactattgacaacattaacaagagataacatttgttataagtacaattcaatatcaaatttcacataatttaataaattagataatataaaaaatcaataactaatacgtacaatatattagtatttgtgtaatttaatataggggtttaactttaataagaacaaaagttgagtgggattgattgagaatgtttttaatattatatactggttcttgtgtcatttcccactttttcaatgcaaagagaaagaggtacatctgcctcttcctccaacttcttcttcttcttcttctagtggctcacacacccatctctctctctct

SEQ ID NO: 298452 - DNA, 3597 bp, Cannabis indica
atagagtattcgatcgaggaaatacactccattaccttaccaatccaactcttacgaaatcctaacttctgcataatgtgagtaaaaaaaaccatttcgcttgatcataagttttatgtcaagtttattaacacaataccccatatcaccgtgttttttttaagtatattaatacacttaaaacaaataagagcattgtcactcatcaatctactaaataagaaagcactttgttcttgagagaatatttctcattgtatttgttattaccttaataatattataatagtattaattaaagattatgtattgttattgttgttgttttaatttttttttggttataatgttcttctatttagttctaatctcccattcccaattgtaatataatttagtgtattcttattatttcctattttttccattaaaaaaggtagtgaaaaggttttggaggcaagaacttttccttgataaggctcctctcaatcaagcccttatatattttccttctctcatcttctgtatatacaagtactacaaggtatgtatatatacataatgtttctcatgtgatctgtacatgttttctgggttattcgatgttaatcgtttatcgtttggtgagtaaaacttgtatggagaattcttaaacgcaatgctgaagccgcaaagcaaaagaggaatctttctagatacttgtttttcttttttgcagtattcgaccaccccaggtccccaacccaaattatatatctattatatatttgtatggataaatacccatatcctatgttttcataactttatatgtatttatactacggagtgtgagacactcaaacttaaaatgagccacaatctagtagtagtaatatattcataagaaatctactgatttgggataattactactgtgttatgaaatatgggtattgcattacatgatggcaaagatagaaataaatatgatcaagtcaagatagttttaatgggggtgggtgtctaatttcgcagccattagatttctgaaatgtctagttaaatttcaaataccatttctatgttttggtcaacaaaattgcataagcaagttaaaatcaatttatttttattacacacaggttgttagtctatagatactaggagccggtcaactccattttttatgatgctgaagtgtttatttggttcaaaatttcaaagtattgtactagcttagttggtaacttttagtcttacccaactagttttaggctcaacatgttgtgattcattacttttataggtaaatgcattagactaactcgagtgacatatattgattattttctttacctctaaacagatgaatactaaggacactgcaaatgaacaacctggagcagatgtagcaacccttttaaatgattgtgcagatgattctgctgaaccgaaaaaggtgagtaaaagaaaggcatgtagatctctctcatcagtgtcaactaaaatttctaaattacatggtgatccaaatgattttggagacaatgttgagttatgtggtatggataatccttgtggaagtgagaatattagagaagcaattgctaaaatgcttataggtaatgagctcaatcttgaatgtgtggagagtgaaagattaaagcatttttgtagaatcttagaaccaaggtttaaagttccatctcccgttaattttcaagatgattgtttgaatctttatctgcaagaaaagaacaagttaaaggatgttttgattgagtcaactcaaagtgtttgcctatctataactacattgacatctaagcaaaagttgagttacatgggccttgctgcacattatgtagatagtgactgggaattgcaaaagagaatcttaaagttttgtcaagttccaaatcacaaggttgagacaattggcaagacagttgataagtctttaatagaatggaacattaggaaaatattcactgtgacagtcaacaatgcaagctctactgatggagttgttgcatacttgtccaacagagtgacaccaattctgaagcctgagttcatgcaaatgagatattgctccgatattccagttttaattgtcaaagatggtttgaaatattaccatgagtcaatatctagaatccgcaatgccatcaggtatgttacatcctcttcagcaagatttaagaaatttaagacttgtattgaacatgagaagattatttcagagaattttgtcttcttagacgttccaaacagttgggaatcaacttgtctaatgttgaatgtagctgtagcctttgaaaaagcatttgagcgtttgggaaatgaagatactcaattccgcgagtttgtggatggagaaagggctcctagtgacacagattggaagattgcgcgtgcttgcataaacctgaagaaattgtatgattcatcattagtattgtttgaagactattatgtgacattgaatctagttgtggttcaggtggcatggattagcaaacgcttgaaatcttggtgcaacagtaaagatttgcatctaaagaacatggcatacaacttaaggaaaaaatgtgagaagcattggaaaaatatgatcaaccatgtcaaccctttgttgtttgttgctgttttgcttgatcctcgctacttggaaaagggtttaaaaaacatgtcgcttttgatatgcgacgatgagcttttggctgatgaactgacaaaaaaggctaggaagactttggagaatttgtatgagcattatacaatgctttactctacttcaaatggtgaaaaggatatgaagaatattgactatgataaactaaattcatttgaacactttatgttaggtgaagatcaaaagataacagaattggagagatacttatcacagtttcgtcatccttcctacaatgatttcaacatcttgatttggtggaaggttcatagcttttgtgaatgtgagattttacttaggatagtaagagatgtgtttgccattcctgtttcttttacattttctgaaacagattgttgcagtagtgatatgattcttgacttatctaataatactttgttatcttctaagacaatagagacactcatttgtgctaagaactggttagaccctcttgcatagagaggaattaactatgttcaaagcttctcttaagctttatcttttcttgtaatgtttgtcaaatttttgtttgaattatggaaactgcatgctttccgttttgcatttctaaaatataaaatttttactttgttttaaaatataattaaaattagatgtctttaaatatcaaagagtaattatatataaatttttatttatgttgggcaaaaagttattaattatataaaaaagaatattatttaatagctgattatttaaaagtaataatattttataattatataagggataattatgtcatgagtgattaaaattttgagtttgtaatgggtataaatttaatgatttttttttttagctgtataaatttttaatgttagtaaaactttaatttttatttactttttattaataactagtggcgtctcacgtgcctcgcacgtgtggggctc

SEQ ID NO: 298453 - DNA, 1159 bp, Cannabis indica
tgtgtttatttcattgttttaaagaattcatattaggatgttaatgaaatatacatggtagtaaatctagatcctggtaaaatatttccaacagaaacatatttagcaattttgttgtcagaaccatcaggagaatcagatattgaatctaaattagcatcactagatcctacttccataaagggagtcttttaaaaaacttccttttttctatccctctttcaaggaactaaaatctcctcaaaaacaataatatcacgaatatcattttgaacccaatcaatgcggtaagaatcactagcaactttgccagaggatttagccaataataacataagaaaagtcaagatacacaaacaaagaaacaaaaaatatgaattgaaaattattaaaagaaatgacaaaacaacaacaaatacactatatcaaaaaacataccttctcctccacaccttgaacaccataagacatggtatactcacgagaaacaacaacaatagaagaacattccattcagaataaaataacaaatgtcaaacataacaaaataacaaagaaaaaatcttaaaacaaacataaaacaacagttaaaaattaaatatcatactagcaccagcatcaacaaaatcatcatcatcttttgaaattaaatcttgcttcaaaagacacaaaagaaaaaaaacaaaaataaattaaaaacaatcaacttcttagaaaattcaaaccatggaaaaaataataataaaacaactcaaaaacaaacatctttcaaatctacaaggattcttgaaacaaaaataattttatcatcattgttggtgcactcttgagcaatagatgcatcttctgcactttcatcaacctttgcaccatgaacaacaacacacaaaccttccttagggggataaaagtaaagtcgtctcgaggacagtctattctccctcggtgttgaccaataatataggtcgtaagttatattgacatgtacttcttctctcactcagtattttaagttaatgtgtttagtttattaattcttgcaattaatacatattaatcactttaaaaattataatcaaattattcataataaaagcctcaaattataaaagaaaaatcccgtcataatcattaaatctgaattaactctttaattcat

SEQ ID NO: 298454 - DNA, 3229 bp, Cannabis indica
cttgctgtttggatcttacgatagtcatccattttcacgcgagaatgggcaccaaacaacgtctcgaaggcctgccacaagctcgaagacgattcacagcccataacctccgtagcaatgctttccgtcatcgatccgtaaagccacccaagcaacaactggtcattcacgatccatatttcaaactctggattgacagtaacaccttcttctcctgtcgaaagatctgtaggaagaaactccactggtctaactttggtaccttttaggtatccatccaatctgtgacctcgaacgatggcagacaccatggtcttccacaacgtatagttgtttctatcaagcttcaaggcaaatggttaattcaaagtggtgacaacctaagaacctacagcacttgctgaaggaacggaggactgagccatgacgctggagatgctctgtcaacctgaacgagctggggtttgatcttccatggagctgagacgaagtaggcaccaccggtgcaggtacagctctgataccaagtttgaaaatagaggaaacagagaatgaaagataaatgcagaaaagtgtagaatgtgaaatgctcagctcaatgaactttgaggcttgcccaaacttttataaccaatgattgtaccgtacaagaatattccagaacaatgattttacaatatctacacgttttacaattacaaaatcaaattctaaccgaaattagttagcctaggaaaagcaaatatacacctcagcacagtaagtcacagtgaaatattacagtggtaaaatatggtaaaaatcatttcttaacaatatctcttaggtaaaatctctcaaccctttgcccaatgaacatgcatcactatttatagggctttgatcttggagaggaagtatttcccttctcgttacaatggatataagcagaaagattgcataataaataaagaatacactgatcgtgggatttggacagcttgccatatctctgtaatctgatccccaagttatagggatttctttgatgaatcacgatgcgaaagctaaattcgctatgtgttggtcgctctgcgcggattgctgatcgctttgctttaggcatgcatacgaggcatcctgtttggactatattctccgaatagatactcgaagtcgtttccacatgtcaccatcatgtgatgccacatcagagtgcaaaaattgggataacactatagttaaaagtgcgagaagagtacggaaaccctccctctcatccttcagaccattaacttccttggataaagcctcgttatctgcctcgagctgggaaatatatggcatctcctagatcaccttcgtcaactccttgactcaattttcggcggctagaagctttttgttcacctcacccagcttgatccttacaaccttgacctccttcttgcccgcatccacctccttctacaagttcgtggtagtggggatgtttttaagagcagtagacttggctcggacataggtgtaagccatcttcaaattgagctacacaggaaaaggttaaaacttccacaggtaaaaagacgagataaaaatcgaaggagagatactcgagttgcttccttcaagagcccgcccatcaaaagctccgtagaaatctcgtcccctctgaatagctggtcattcacctcaagaagtaactgatcctagtagtgttgaagcatctccttacccttcttggtctcagggttcaacacgataggagtgtttgagggcctgggtagaccaaacccatccgtgctacctcccttggcacctttagacttggaagccttcttgggaggtgcctccacgtcgaacaccgtctcctcagaaacctcgataggaagcttgactgagctcttatccttggtcggtatctccttaggcggtacctcattaccctttggtcgtttgggcgaaggggtgtggtcgagctgtcacctaacctcttctttagagcctagaacactttctgagacatagctgcatatgaaaaaattaagaaggttagaaacaagtgtgatataagccaagtaagatgaaaattaaatatgagtaaaaatatcctacacataggcaaaagcattttcctgaataaccaaagatggaggctcgtcatctaaagagtcttctagctcctactctgtcagagggactttacccttccctgcaacttgggtggatcgccaaacaggtctttcatgatcctccctgatcatgatagaccgtttaataggtgcttggctgcttggaggggtcttctcttttttctcggagtctcctgtccgggcataatctcctatttgggctcagcgtttttttccttcttcacagcctttggtacaaaatcggctagaaaaagtttatatttgacaaagttggccactgaagtcaagagggagatgttccgtgcagcaggaggtagttggagaatattttgtgccctcttcctgagctctaatgtgaacggagggcggtagtaagacggtatctgatggaagctgctatgaacgctactcgtccctttgacgaagtaatactcatccacaaagtaccctatcttagtcacctcggtggccgtggggcctgtcaaccatttcttctcaatctgagaaaaatagaagtatacagacctattcttcttgggacttgactttggatcaaagagctagttggtatcatgcggggatggcacaccctatccttgtgaggtgtagagaatgaatagggtggataagtacttgatgcccttgggagggaactaggtcagacttatatggtaattgtccgcaatcctcctgaagtatgagagaaagggcaacatagcaccttacttggtatgaacgccgaccaagtataataaccttccctaggctagtcgccaactggtcgggggagggaaggaagcattcgacactccctaagtaaccacagttgagtaaattctttatctttgccatggtcaccacaaatggtggagaaacccatcgatttcctagtgcaccttgcttcgtcaaaggaatggccttggtgtactcttccgtaacgtagtcttcaccggcctcaagaacctcccggcctcaaacataggttttccttcttcattgaggccaccgaatggcagcacccaggctactccttcttcttcatctccttcggcctcaggaggagtagcaggacggacctcgccctggtcctccatctc

SEQ ID NO: 298455 - DNA, 2029 bp, Cannabis indica
gataaaaattaaaaaagatatggagttttgagataaaagatcgagaacatgaaaagaaggttaagggcgatattgtacataatcattagggtctcaaacagaaatacacgtcttggtaatattccttagggaacattgctgaaatccatgaggctgacagccattcagaacttcctagttgtttagttttttatgcatggcaaagtctttaagttgagtttagtataatatagactatatgctgccccatacagagcagacaaccctgatcaacaaaaacctaaaaaaaaactcaaaaatagggtatgttagctaaaacccataaatccaaaacctacctaaataagtaaaaatgaccaagttttgagaatgaaatacttacttatgatgttggagggtatgggtggtggcatctgggtcgccgatgaggttcttactcaaaatgcacgaagcttctttacaattttatcataatctttttgaaaattcaacaacagaagcttttaacaatgacaaactgatcgacgtctggatataacctctatcgaaggagtaaaagacagttgaatagctcaaagccgagatcaaacattcaccagaaagttcctgggttcaagggatttctatctctctcttggaattttttttttgaagaaaatggctaaaagaggtttgtctgctgagtatttataaacaaagtgaagatttgacttccatccaacggtttgggaatgacaaaggttgcttttaatgctatttgcataatcgaagggcatctatttatgttgatatttgccttggataatgcactgacatgattagtcgtcagtatgacacccaagatgacacatgccccaatagactgtgtgaacctgaagtacgatcttgaacctgaacatgagcaacaagctttcgtgattcttgagccccgaaggcttgaggggtaaatgttatttatgtttttgaatagattaaagcatgtattgcaaatgttgaataaaaaaacaaggtccactcattgggtccacgcagatgaattgcacagcccacttatcaagaatgggcagaaccataccaaacattcagttctatcaagatcactggtcaaaaatgaacccttacacctgaatcccagatcaacaatcaacactcgacaagaggacgggtgtagactaaaaggggatgccctcagggatcatctgggaatagaatgcgaaaaggtatccataaccgatcatagtcccaaaagccagcccacatggcatgattttgacgtaatctcaaaaaatcagacgacttctcccctatgtcaaaccatagaaaggctcacaaaaaaggacattacctttttagcggacacccactattctattattttctcattccccatgatggcacacacatacctatcactgtcagtagtacctttgcatatggacgacaactatctccattttgagcctcatcaacctagcccgatagctaatattgtattgaccttatcagtgggctcttgcgctaaacaaaaccttaatgggtttgggtctgggtctgcctgacccatcaacaatttacctataaatatgttattaacctttcatacaaagggttggcaaaaaattgagggttcaagaacaggaaatacagtgtaaactccatagccaaagagtttaataacagtaactcgtggactaataaggctcattaatacttcaaccacgcaaaaatcttgccttatttttttttagctcatttacttatttttgtttttttattgacacaatgtgtagtagtagatattgacatattaattatatattatccattatattatataccacattttaaaatcctaagatttctttaaaaaaaaaaaatcctaagattttattatttctattattaatgtaattatttatttaatttctaagaaataaattatcatttgaactgtcactaactcaaaaaggaagagagaaaaaaaaattaaaattatgaagttgttcaataaattccatgaaaaaaatat

SEQ ID NO: 298456 - DNA, 2103 bp, Cannabis indica
tttttgggatgatgtaacataacataacatatttttttgtctatgtatattttggctagggaatatagtatacctaaaaaaacaaaaacaaaacaaaaaaaagatcaattatatatgtttttgtacgtagtacatataattcagaggaatcttttattttaccctacgaaaaattattcaacactcataataatttctatcaaagacacaaaattaccacttttaagactaaaactaaaataataccataaagaatctatttttgaaaaataacacaattataacaacttagaatgaatacaaccaacctagacctcttcaatacaatgttgtcaatttagattgagctactaaaataattaaacaattttttttaaaactccaaaataaattattataaagcctatttatacactcataaaataagttaatttgaaactagttttccacaaagtaaattacttgaattttttcaaaaattattgtaatattttaaatgaccactatgtaaaccactatatatatataaatatatatatataaattaaattacaagcccattagatgcaaatgccttatatatatatatatatgaaaatcattaagccacatttatcgctctttttgatgtcatattattattagtgtaattaaatatgagatctcatataatttaagaaaataacttttagggaacatcgctaactaatcgtgagatgctacctataaaaggtattgagcaccactgatatccaatagcaatgctcttaaaatataaaatattgctattgggtacagtagtatccaacatattctactggcgccctacaattaattagttagcgatattctttaaaaattattttttaagttatatgggattcgataatagtatggcaatgaggagaatttttaaatactaataagtactttttagcccttctctctgatatatgtatatatattgtatataagattaattatgagttgagttgaattatataattaatatgctatagcttcaattattgtgtgtgtagaagatatggtcaatctgcttatttgtgtcgcaacaaaaacacaaattattggctatctcttgtatattgcccatgttaatttacatatatatgatatatgtataggtgtcatatcacattgctacctactttgcaacaagaagcaacatataatctagatagctttggagatcaaaaatataatctttaatcttgttgaagttgaataatttttctatgtgtgtgtgagtggatatgtttttcttttggttaatgtggggtattgtgtcatgagatagtatgttagaattacatctaattatataacaaaaatgataggtaccattaatacttaatactatttaaaatatcttattatcatataaaatattgacatcatttgtgagaattcacttctcataatggtaaataccactagtgtcaataatgcttattatatgaaacactaaatcatatacataataatgttatcaatttgtccatttgatacattatttttgtgcatttatattgttatgagcaaagcttaaacattcttattgaaaaatatataatttacgacattcttgatagggccgattttgaaatattgtgagttttaggataaaaataatactattcaagaaatatattggtatttttaaaaatactaaatctataatttatatttttttttaaagaaaaataataattttgagaacccttagtgcagacttaatccaccttatatacattatataaaagttgcagataaatttcttgtagagttaatataatatgctatataatatattatactaattaattactgattgtaacatgtaaactaaaaggaataaacaataaaatatgggtcatataggacggacccattaagattgatgtgggggctatagcccccacgaataaaaatattgtcttttaaaaaattaaatgtaaattttttaatttaataattataggccaaaatagtagaaaaggcctcacaaaattagataaatttagtaagagtgattataatgtagctataaatattttttttatgataaataagccccacaaa

SEQ ID NO: 298457 - DNA, 3600 bp, Cannabis indica
ctctctctctctctctctcaggccattctcattctctctcttcttttctcatggagctctcactctcccttggaggaccaactatattccctcgttacagggcctcatatacttctaccaagctcacaacccacttctccaacttcccttcaaaattctccacccaaaactttcatcaaacacttagcttctacggcccgaccaggggctcaaaatctttattaaacacccaccaatggagaaattccatccgggtaaagcttcaatttttttcataactttatattagccttgcattttgattggtgggtcgctttggttttaccataataaggattatatattgttttctaagaaatctcactctgggtatttttagctcggcttagagaattttaataatgctttttttatgtctttaaattatgaaaatttgtggaattgagcttttgtctattaaattttgctttgatgtgaacattaactggttatcttggaactttgaatggttaagtatgtcaaagcaagaaatttgagtgtttataatattgaataagtactgaaacactggagtaatctgaggccaattttcatgttttttgggttgatatttccccttacctgttttgaacttggtgtagttttgttagtatgtgtgattagtaaagtaaaggtagatgttttcaggcatgtgctgaagctggagctgctggatcaaatccagtacttaacaaagtttcagactttagagatgcttgctggagattcctaaggccccatacaatacggggaaccactctaggatcaatgtaagtcaatgtcacatctgggaatagcaaaaaaatattgttggacaacacaatgttctttcaaacccatgctgagaatcctgagattgatatagcttaatcataaaaatatttcttttctcttcttcttttattgcagtgctttggttgcaagagcattgattgagaacccaaatttgatcaagtggtctctactgctaaaggcattctctggcctacttgctttaatatgtgggaatggttatattgttggcatcaatcagatttacgatatcggtattgacaagtacgctatacaaatttaacacatgttattatatcacttagtcaattattctaaaacaattctagcaaaccacctttgaatttgtataagagttcctgtttcttgaggcttaaaccaggttcagatttgcctttataaactcacagttgatttgtatagccatatttggtgtatatgactatgcaccttgtagactcatagagaagtcagttctagtttttgtgcaaaaggacatagtcacttatgtatagctagagaaggtctcttggtcttttggttgttgttgctaatgtcaatattgtaagaaaataaaataataatttttcgatatccaaattggctcaattttttaagtattcaacctgcaaactagaaagaaaatttctgttggcatgcgaatttttatatcgagttatcaattattcatggaaattaatctgctggcaaacatccctgacttgctctttacctatgtatgtttcatttacagggtaaacaaaccttatttgcctatagctgctggtgacctttcagttcaatcagcatggtacttggtgatactttttgcagtagctggtttattgactgtcggattcaacttcgggccattcatcacttcactctactgtcttggtcttgtccttggcaccatctactctgttcctccatttagaatgaagagatttcctgttgcagcatttcttataatagctacggtattataatttttctcccccatcctttgaatgcataacccctaacaaaaaaaagagttgaaatttggttgaaaagctaaccaaagcaacttatgcaggtacgagggttccttctgaatttcggtgtatattatgccaccagagctgcccttggacttacatttgagtggaggttggttaaatgttttctatatagtgagtttttcatagtatcttggcaaatctatttggcatgtaaaaagaataacactttgaattgtatataagattctaaactctgaatctactggtcataatatagggcttattttctcccagttcatagacatttgataatgaacaaatggagaaaacctaaataaactcgtatatgatttcagttggtcatcctcataatctgcagtaattacttatttggttcttaagataaacttatgttcatcactaattccaaacaacagttgaaataaaattattgtttgacctgcagttcagctgttgctttcatcactacctttgtgacattgtttgctttggtcatcgccatcacaaaagatcttccagacgtggagggcgaccgcaagtaagtttcaggaaattcatcactttctaccttcccgcggaaaaaatacatgcacccacaaagagaattcccaaatatttggttgatcatgctgctatgtaaaatgccaagttttattcaatttaatcacccaatctcaataaatcttacacctacatcttgaaatccagattctccacttgttccttctgcttatcatgtgaaactatctttttcacagatttcaaatatcaacctttgcaacaaaacttggagttcgaaacatagcataccttggctctgggcttcttttgctaaattatatcggtgctatagcggctgcaatttacatgcctcaggtaaaacattcttaatccttgcttctttcataaattttacatcaatcaaatattgaagcctgcccttttatcatttcttgctcataggctttcaagcgtaacttaatgttgcccattcacacaatcttggcactgtccttagttttccaggtttgtcaaatcaacatgactcgaaaagtaaaacatctatttattgtcgaattctttcttgaaataattttcttgtatacttgcaggcctgggttttggagcaagcaaattacactaaggtactataatcttggcccttctgttattattacttagaaagcaataaacttaattttcttataatattgagtaattgtgcaggaggcaatagcaggtttctatagattcatatggaatctcttctacgtggaatatataatattccctttcatctagaaaactaatctttcttttccttcttccgattatacaagagaaagtattgttaactagagccattattttgttaattgtatatattgtaattgcagtaaattattgtacaccctcaaattttgttaatgtttttccattaaggcccgtttggttggggttaatgtaaacacgagcataaaaattgtatggaataaaattcaggtcttcaaaaatttatattgcaatatatctctttcaataaatattggttcccagattttcttttttgaattataaagtagtatcatatcatggctctttatttttttaaaaaaatgttaaaaggactaatggtatatcctttaaatttgataatttttattaatgtaatataaaggttctctctaggaaagcttaaaagaagtaaacatctaaattaaaaaaaaggctaattagaattttt

SEQ ID NO: 298458 - DNA, 2575 bp, Cannabis indica
tctatataggtggtgccgtggtgatacatttagagtttctgtcaacactttaacactgaaaaaagtgtagttgaaaaagcttcacaggctttgcaatttagtgatggatctaccgatttattaatgcttctgtggcatacttggttgctcacattgaatggtatttgtcattcaaccaattcctgacatcttaaattatgtggcattgtttctaaactacactactcactactcactactctatcacttttgtatttgatcttatacaaaaggagaaaagagatgttaaaaggcaccggttgcactcacttgtagtcctcccaagtcccaacaaaaaatattatatgtatttttgtatgtttttgtaatttggctctcaaattattttttcttacaatttgcctcccttaatttatatttttggtgtttatcacattttaaagtataatatttttattagtacaattaaatattgtgataataatttttatagagtattactaactaatcgttcggtgtcacttttaagtaatgctagtcactattagtgtctaataggaacactcttttaccttcttttgccttataccaaacacattttttctcttctctctacttttctgtccacaactttctttcctctcttgtcctctctaccaaacataaaattgccacctactctcttctggtcccaaaaattgcatgaactatgggatagttccatttaaaaaatctctcatctcttttgaatagttgtggcattcacaagcatcacacatcttacccattccattttctttcaatagtcctatcaattctcgttaaccagaatttataagacaataaataaataaaaaaaaattaattaagatttttgtccctgaattttaacatgcacgaaattatgttatttgaacttttttagctattagaaatttcttttgaactatcagtttgtctaattttagtaaaaaaaagtctatcatagataaaaaatttagggtacttaatatgatacatgtcaaagttcgagtcacatgatttagtagatattaaagtttggggagcatagtttagtacacgaacaatcacaaaattagtaaaattgaataaaagttcttaaattcaataattttaataattcagagagaacttttaataattaaaaaagttcagaaacataatttaatacatatcaaataaattacatatcgatatatatatcaaaacctttatctaactttaccaaaagcctaaaaaatatggtgtggaccataaacatgtatattgcatgcttattattaattagaatatttattatttactgcacagtcggcatattcttcatagttaaaattaatatttctttaatatgacccctatctattataactatccatagaaagaagctgaaaacaccatcattaaccaaaacccaacaaatctcttatatttaccatcattatcattctaaagctatagagcctaaaaaacaaaggatgatgatgatgatgatgatgatgatcaaaacacaacccttatggctcattctcataacatatataggaatcttcataaccctcaaaagggtcatctcattactcaaatgggtgttcataacattcatcagatcttccaaaaacctaaagacctatggttcatgggccataatcacaggagccacagacggcataggaaaggcctttgccatccaactagccgagaaaggcctaaacttgattctagttggcagaaactcaaacaagctccaaaccgtctcaaatgaaatccagctcagtagtcctgggacaaagataaagagggttgttttcgacttttcgggcgatatctcggcgggtgtggcgggtgttgaggaggctgtgaaaggattggacgtggggattttgatcaacaatgttggaataacataccctgcagcaaggtactttcatgaggtggaagagagtgtttggatgaatattgttagagtgaatttggaaggtactactaaagttacaagagctgttttaaaaggtatggttgataggaaaagaggggcaatcgttaatattggctctggtgccgccattgttgtaccttctcatcctctttatgcaatctatgccgctacaaaagcgtaagatcctatatcttatatattataattatatagtattttttttttgaataataattatatagtattagtatacatatatatgaaacaattaaaacaaaaacaagattattagctctaatatttataattaagcaaagttactaagaaaaaaaattgtttgtttggttatttattttcgattagtacatttctaagtgcatgcactattattattattattattattattattattattatttttattttgagggtgttaattaaaactttgtgaagtatatgtacgtgcatttaatatgtaactaggtgattgttacgtgccaagccacgtagtgttagttttatttaatattttagttttttattttaattaataattaaaatagtataattatttgaacgatttgttttataaaaataaaatatgtgtcagta

SEQ ID NO: 298459 - DNA, 3853 bp, Cannabis indica
ggagtatgatatgttgcttacaagtggaagttgtttaagagttctttcttttagtgaatgccgtatggagaagctgcctcattcaattgccaatcacaagcatttgaggtacctggatttgtcttacactgatattacaaagttacctgattcagtttgtaatttgtacaatttacagactctattattatttgggtgcaaagagcttcgtgaattgccaaagaagatgggaaggttaatcaacttgcgatatttagatattgaggggatacctctgaaagattcagaatttccccaagagcttagtactataaaacacttgtacttcttatctgatgtggttttgagtagtgatagaaatagcaatggaggatttattatgaaaaatgtaggacagcttgagaacttacttagaatttctgggttggaaaatatcaaggaagccagagaagctttggaggctaatttgaaggagaagacatgtctttcgaaattgactttgaagtgggattattttggtgtagctaataattcacacaaggaaaaggatatacttgatgcacttcaaccacatacaaacttggagcatcttgtgattgatggttacagaggttcaacattctcagactggattggagacactgcattttctaagttggtatcagtcagcattaatttttgtcagaattgttgtatgctaccccctcttgggcagctaccatgtctcaaagatcttaagatttttggatgtcgtagggtgatctcaataggtgatgagattcttggtgagaagggtcttcttctatttagatgtctagaatccttaacattttccttcatgacggggtggaaaaattggtcatttagtagtgaagctatgcaacaaggtcaaatattattccctcttctcaaaaggcttaatctgtttctttgtccaaatctcaatgttggtttaccaggttgttatcttccatccttggaagatctcagaattgagaattgtaaaggaatggtgagtttcacaacccctccctctcttgtcgagatacgtatagatgaatgtccagtgttgggatcacactccaacgtaaagaggatcacattaagttgctccaaaaggctgcaaaacgatctgcatacattctcatctttagaatccttatatatcgaaggttggcaaggtgattcttttcccaacgacgaggggctccttccgaccaatctgaagacacttgacatttccgattgtagtaagcttgagaccctaaatggaaaggcctttcaacaactcacatcgcttcagacattgataatttttaaatgtgaaagactgtggtgcttgccaaaagaaggactgcctaattcccttactaaattgtcaattagtggatgtcctttggtacaaaaacggtgtgagaatggaggagaagattggcctaagattcaacacatcacagacgtgaattttgatctcattcatggtcttggtacgtgacggtacattaatctttttcttcttttatttttttgttataagaaattgagtttcatttatcatcacatcagaccaaccatcaccaaccatcaatgatcaatcctaactgattgtatgtgcagttattgtcgcagccaaaaagtttctaatggctgggaacaaatcggtgtgaatcatcaatttgaagaatgataaaaagaccatgtaagaatcattaataagttcccctttgacagattttgatttgaattggagaaatttaaacaggacaaggaagctgtattgtattttgatattcaaatggagaaagttggaaaaccactgcaatatcaatataaaatggtatatttatttcttttatgaaaacttgagttgaaataaacgactgttatatttgttttctctaacactaaagtaaccgtatgatcatttcaggctaaatcatgatcatgatgacaggcagtgttcagagatttgtatagcagatgctgagtctcattgattcttcaatccagttttgcatctcaaagttaactaattattctgtgtgtgtgtgtgtttgcttaccccattttgcatttgtaatagtatttgtacccatactaatatcataatcccaagtttctatgtttacaagacaaagactttaccaacccatcatccatcaattggattccttttcatacctaattttataaatattttgtagaaaaagaacatttgaatgagagtgaaaatattatgttgtatggttgatattgaaacctacacataaaaaggaaggaataccaatccaaaatcttacaaaagatcaaatgataaatttatataagcatcctctaaatcctttcttcaaccacttcaatactattttagaggtacatctatgatctatattatgctgtattctgtatggttgtaatataaacttaaattttgctccatttatttactctctctctctctctctcctctcttcagtaaatgagggtggcgcggctcaagatccactgtcttccaatgacttttcatctttatgcatatcgccagactttgaatgccatcaatcaaattcgtttttcataccaaattttaaacatgttctataaaatatgatttgaacgtgtaatggactctttgcactatcacacctgtacgtgtgtggtggcctggtgtgtgagtctccacccatgcgcacaaaactaggtgacccttaaggcccacactcaattctcaaggttgcatcttatatatacttatgaataggagttcctgtcccatgaaaaatcattctttacccccaactcgccattgttaaagacagatagttttctgttcggtattgaaaactacaagagccaatgagaaattaacatagtgcatgtgaaacaaggcaggaatattccaattctgctcatatttattcaagggaataatctcaacatgtggtgcaaactttagtttagtaatttgagtatgtattttaccaccaaaccaattgttcagtcaactatagaattgatggatgtgatagtgtgatttcatgtcaaaggttctgtattcagaaagcttataatgagaagtgacaaagtactgttgaactttgtaagcatggcaaaataacttggagattactcaaaatgtgaaaatgatataagtcaataagtgtcaaaaagtaagaaaaggaaagaagattatttaaagacttttgtcttttaagaaatttccttgcagtagtgaaacaaattaaagcagagttatgatgactatatatataccttaacttctataatgttattgattaacccactatcaattctttaatctatactgaacaataattagaaaaagttagttttgagactaatggtacaccattgctgaccaaacaatccattcatccaataaattatcaaagcaaaaattgttaataaagaaaaaagaggtgatcattcaactttgttcatgggtcattcatacattattatttcctcagaaatttccaaggaaagaggctatacatgttaataaagtatacactcactcactcactcactcacttacccattcgtttctttctttcttcattctcatccgtaacccctacacagattcaacaaagaacttgttacttttgtcattgatcaatatggctgctgaattggttggtggtgctttgctctctgcttcacttcaagttctgtttgacagattggcctcggaggacatatcccagctgttccaaagaaagaaacccattttgaagctgctagacaagttgaacactaggatgttatcagctaataaactgctcaatgatgctgaggagaagcaacttcgagatgacaatgtcaacaa

SEQ ID NO: 298460 - DNA, 1657 bp, Cannabis indica
cctatatatactctctcaatatccctcttacaatgacccatataccctttttatttatcctaaggcctaacattaaccaaacaaggtatattacatctgatatcatttccatcatctttattaatatacaattttgtttcctatcagtatatataaataaatacgtattgatactatttgtacctgagttttccaaggactataccagcttcattgcttcgttcaagccctatatcttctggggatatgatttcatatgtacctttgtgcttaagcattccatcctacagaacatagcttctcagcattgcatcttaaactgaaaatcttaacatgtcactacaatataaaagaaaaataactagaacttcactgacaaacttaggttggaatttctaaaaaactaatcctttcaacagtaaaaatggctccttccttttaattaaactaataacaactaaccaatttttttaaatattaaacaacagaaaagaaagaaagaaaaataaatacttaaacctcatattagcgggaccctttatcttggatacttcagctttttaaggagggaagaatcttagttttgataacaaaggtagtatgaactgtaaaatagtagcaagtccttgtaacacaaagtgttcagaataccaacctgatggataccgctttcatgtgcaaaagcattggctccaacaatagccttatgtggctgtacttgcaaccctgtgtattcctcaacctaaaggttattcacaattacagatgatcaaaaatcacacgtaaaaatctgacaaaagttctgaaagtaagctgagagagcataccattatgcttgtcattgagatgtgtcttgtgttgattccagtataaagtcctcccagttgttgatctccacggcattttatggccattacaacctgaagaattaacaaagaaaagaaccgcgaaactattatatcaaataagatgaaaaaaaggacccaaaacataaccaacaaaaatagttatttaaaatatctaagcaataaacttgctcaaaaaagaatttatgaatttttgaaaggaatgacattgaaagttgctcccttgcagaggatgcaaaggattaggatatcacattaagcatttcacttgcaaaaaccaagattttacaggaatgaagcaatgccaagatcaagagaaagtaaagttagaaagctattttgcttgcacttcaatcaatcacaatcgacaaacttgcagtaggtaaagtaccaagtgaataacagtatttggtatggatattagattgaagtctgctaagggtgtcagatacttggtgtgtttttgaaagaaaaaaaaacaaaaactataactttccaactatccctacaatagttagggatcacgaaaccaaagcaagtactatgtaagtgcctacaacgaattcaaacctcagatcttatgggaacaaatcacaattgctatgtaagttcctacaacggattcaaatggtaagtgcccttcccatttgagctacccttcttgggtgtattgtatcagttacttggtacctgttagaatattagctgtatattaggtgtaaaagaattagggtaacttgtatttagtagtttcctattttgttggtagtttcctatttcctagtctccta

SEQ ID NO: 298461 - DNA, 1102 bp, Cannabis indica
aaaaaaaaaaaaaaaacaactgtgtccttatctacacagacagacccgcatcaatagacatttttcttcactcataaatttcataaattgagtgaggtttcacatagatataaaacaataattgttcccattcgtaatcccaaacaaaatgatatatgaccgcactataaaatcccaaacaaaatgattcatttagacaaaataaataactaaatatacaataaataaaaacaatgagccaatatcgcctcctggggtttgggagagaagatggggaaccatatacactacagctcgagctgggaataagataagaacccacaacaaacagcctgaagacaacccccattttcgattaataaacaaaaaattaaattccaatcctaatcaagcttttcacccaataaacaaagcaaaaacaccgaaacaaacacatccatatagaacaatacactcagcttttaaattatacaactatacacatgcatatgagatatgcatatataaacactagacagagagagaagacgaaggaaatggagcttcgcgtacctataaaatgggataaaatgcagagagatttttgacagtgaattttgtgggaagctggaattagggtttctaaaaggtttggttttgttctttctctcttttttttcttgtattttttttttcttttgttattacaattttcttttttaatttaatttctttcttttatctatctctgtgtaatatttctcaatattgcgatttggctaatgtgtctatgggcggttgtgtcccgcacgtgagcctatcaaagaatgcgtacacctcgcacgtgctggtagttagggtatgtggaactgataaaacaaaagataacaatttgacccgcttttttaaaaacgatacgggccgggttatctactacgggtttgacccgttacggttattggggggttgagatacagctttaagatggatggcgagaatgagataagatgcaaaatgaccttaaatttaacaaaataattacataaggtactactttttaaaaaaaaaaattacatttttacatttataatttttttttatatttttacgattttctataaaa

SEQ ID NO: 298462 - DNA, 2502 bp, Cannabis indica
atttcttatcaattttcctttttgactagagatcttttatctttgtttgaagtttttcttagagtatgtttataagattaatactagtacatacagcacctctatggtggttatggctgaagtgtagaactattactagtgaaattatacatctattctttatgcttgtttgttttgcaaaaaagctgatttttcttttttaaaaataatgagattggttgattagattgcttccatgggatgataaacttaaaggttcatgttacatatgaaattattttgtttggattttcctttgggatgtaatggaagctgtgatagtatattgttccaacttccgatatagatttttgcttatgagctggtttataaacctgcagacattgtcttcacagtatctcctcgttttatcaaagcataaccctcgctgctgttgctagtatctcatcattataagaaatctcatgaaatctttgttaatttaaagttataatttctgtttatcaagaattgtaatatgaatggagcatttaactttgtttaaatattttaatgtaggtaaatccaatggactctgtgtttcccaaggtggtcgctttccaccattctcatcagacggaaagcctccaaaaaaggttagcaggggatccaaggatctgactctttgcagggtgttccgccagaaaacttgctgtgatgtggctcagacacaccctgcattgctaaacataaggaagctcgcttctactggggaggccaatcaagagtgcttgcaattgtgggagctattagaatgttccatatgtagtccacaagttggtcttcagccaggacctcctagattgtgcagctctttgtgtgacagagtttttaatgcttgctctgatgcttacttctccatggaggcaatgacacaggtttataatgtccctcaactgttggattccaaaaccattagatgaatacatagatatatttatgaaatccgaaaaggttacactttatgtaggagttggagggtttatgggaattgacttgatcgggtatttatctgatcaatttgaggatgtctcaaatctacatctctgctatgctttgacagctacccatgcataatttatcaactaactttttcctattgttgaagcaatgatttcatgtctctttatggcataatcaagctgttatactattttctttgtgacgccttgacaaaaaccagtgtctgattcgagtttgtttttcaggttctagcaccatgtggagtaaacgattttgtttgtggcagggcttcacagtgggttcataatggcacagaactgtgtcatgctgcaggatttgctgttaaagatgatctggttggtgaatcttgttatggcggcaaagccagtctagacttaatttctgattcatggaaagcttcacggtcgtctgcgatgcctcagaaaactggggcagcaggcatgttagatgatttccatcagtgggtgctggaaatggcatttgccgatagagtttcgtgggctgttggagggatggttcttacagctggattactgtttttgaggttcgacactttcctactgtctcccttcaaatttcaaatgataaaaactttcagttttcaatctttaagcatatttgttttcccttcatcataaccaactatttctctgcatattctttcatcattatcaaatatcgacagttttctaattttcctttgtaatgtgcaaacatcattagagttcatctgattgttgacttaaaaattagtaccattgttatatactcagatttggttttttcctatgaagcaaacggaaaagtcacaaccatcgtcagaaactagctgctatacaacgcactgctaggaaaatggaaggccaaatgaaccagaactatcctggttaccaagcaaataagaaggcaagtaagagatgatttttctaaatgtgaacatataattagttaatcaattttcctctggaaatatagtattaatttactggtctagcatagttagttgagttattgtaacattaaaacaatttttgttttgactattttattataagaaatcagttcagttgtgtttaataatggtggaagcaccagttgaagttcacttcccaattacaaaatcgagtttctcgtactcattgatctgaagatcctttcactaatgttttcattatgagtggtactattttaattagttctacacaaatttttggtggataacgcttgagacgctggtaaagagacgagagtttccattttaactttttaaccatttaactattttagctaaaaaaaaaatagagaatactactctttattttttccagctaaatagaaaaccatttgctccaatcatactctctaccttaattagtattaattattttaataatattttgtaagttgaatttgccaaatataatttaattttataaaaatataatagtactttttattaaaatactattaaaaaaattt

SEQ ID NO: 298463 - DNA, 7212 bp, Cannabis indica
atttgttgttaatttttgtatatgtattgttatttttgtttgttttttgttgttattttgatgttatttttatgtttacttttatgttgttttctgttaattttatgttgttttcgtattgtttttaagaaaactgtaaaaatgtaaaaaaatattttttgaacataaaaatgtaaatattttacaaatgccttatgtaattattccattttttttttctttgataatatatagtttagctaattgttacatgataaaaataaaaataaagttaatcgggcttaatcgaagagcccatatgatatgggctattggcccaataacagcaagaagaaataggaaagacgttatgggtgcttggcgcgtaaattggaggttgctgttgaagagtggtgaaagacaaccgatgtacgaagatgagtttgaaattgaagccagaagaattcttcggaaaaaaccctaaccaaaatggaaccccaaagacacagacactggacctcggcgatgaaagccaaattctatacatacccaggttcatgagctttgatcaggcgtggagatttttcgattacctcaacaatgaaatcccttggacccgacccaccattcgtgttttcggaagatcatgcctccaggtctctttctctttctcaccctctgaatatgtaaatgtcaatttctgtagtaaaaaggaaaaaaaattaattttgaacaaatgggttattagttttataagaacatatctatgattggttggtatgtatgtatgtttgggtttttaggtttcgctttgtgaattcgaactctgcttacatttttatgtagcctagagatacttgctatgttgccaatcctggattaccagatttgatttacagtggatatcagccacgtgcttatagttgggatgattttcctcccttaaaggacattttagatgctgtaagtaagaaggcttctctttcttaattgtctaattagcttcagatttatcatgttgagttcttcaatcttgatattatcccactcatatgtctatgaaggttcacaaagctattcctgggagtagtttcaacagcttgcttctaaacaagtacaaagatggtaatgactatgttgcttggcattctgataatgagaagctatacggatcagctcctgatatagcttcagtgtcttttggatgtgaccgtgaattcttgttgaagagaagcccggaaacaagtccaaaggtatgttataccgtggtctcatctcttgattattttgatatttttcctctgtttgaaagagaagtttggacacaacattttcatttggtgtgttgtacatttcctttttatggtagatcaatttagtatggtactgttttctgcaattaacacagctaattgcttctatgttttgctgtgattttcagaaaaaagaaatgaagaagagccagccagcaaacgattaaagaaaagcattaatcaagttgaccaacactctttcacactcaagcacggatcacttctagtgatgagaggttacactcaaagggattggcttcattcggtgcctaagcgtgcaaaagctggtgcaactcgtattaatcttacatttaggcatgttgtgtgatggtgtttggaatcaagggataatctcatttcatctgctgtgcttgttttgtgtatcacctgccgtttttggcatttggagcatggcttggcagctacgaggtatattatttttagttttgtgtaacacttggtgtctgctgatgctattcacctttacaattaacctgtctgattaagctatataacttgccatatttctatgtagcttttgttgttgattcatcccttgttattggactttttacttatatgttataatatactaggcgcttttcattccacggcagtagactgacattcttattccacaagttttattcaatttgaaacacgtttccaatctttaatatgcaaaccaaatgtaagaaaattctacatttataggaatgggatcatcattcctactttttctttttttttggaaggccgatttcattacaaattatttaggaatggtgtcccagttttattatattattttcaatagaatcaccattactaaacatgttttaaaatttctttttgaaactagaatcctgcccaaccctacaatatttggggacctagagacttgaacctccgatcttatgggagcaaactacatgtctcatgatttgagctacccctcttggctagtatgttcagaaaatttttatttggattgtacaattgaatcataattaattagtttggttagctgtgataataatattaagtgttgtgaattcctaatttaatatattaataataataataataataatttacatttactagttcgggtaagatagtaattttttttagaatcgaaaaaatatttccgtagtataatattgttcttattcaactagtcgtttctgatgtttagtatggaaaccatatatagcaagggcgattcgtaattatttttatggaaaggtaattcaattcttaattatttatatttggagtggtgattccattcccatattttacctttttgaatggaatcatcattcttattttttttttggaacagtaccggtttttttttttagaatggtgattccattccaatttacttaagttggaataatcattcatttttctaataaaatcaccatccaaaacattttcggaaattttaatttgtgaaatgaaatattggaatcattaacttagaattctaatattaattatttttaaaattttgccttttaatcccttgacgttttaatttataaatggatattgacgtgaaaatcatctaaactctatgattagtaacacttatttatataaaccaattttttagatgataagttaaaaaatatttctttttgtgagtgacttcccaaccttacaaacctaactcttcaacctccctctaagcctcaagacccaactcttcttttaaatttctctttcttgcctcgaccttgccagatctaattctctctcccgcaactcttcgtcaataccaccacggttggaggggttcgtaggttcattcctggattcgttgtggtctagtgggtttgttgtagaagaagaaaaaggaacgggggagatctgatggttctaatcacagagcacttaacaaagcattttgaacgaaaaggataaatagctaatataagtaagatttggaggattttactattaaaaaatttgtttatatgactaaacgtcactaattatagaatttaaatagttttatagttactattcttactaaaaatttggtatacttgtgtgatatgtataccgtaacacttatcagaaagaataactaactaataaaagtgaggatagaataatttaacccaaaaaaattattttatgcagttaagtatagtagagtttagttattaaaatgttgaattatagaaattacggttctctatttcttgttgttagttttgacagagtggagacgtatctatttagcattccaaagtagataaatgatcgaacgtcatcatttttattcttatctcgccaattacaaacattaaaattaatacaacttaataacactacgaaaacaaaaccaagaaaagaaaaacactacaactgtgatcagatcacatcccctgttctttcgcctaatttctcattccattaataaaaaccaaaactcgaatcatcccatggctccatcttctacttcttcttctattgaaccacgaggtattatatttctattttaatcagcctttttatttcttcttattcttatcgttaattatggaagatccttgtttttaatattctatttggacatagatgtttgtatagtcggtgttgcaagaacccccttggggggttttctcggttccctctcctctttctcagctactcagcttggctctttttccattcgtggtaattcaacgtgtttttttttttttggttttaaagaataaaactttcactcaatttggtttcggaagagtattcattgaaatggcttccctctctctttgcagctgcccttaccagggcaaaagtggatccctcacttgtgcaagaggtcttctttggcaatgtcctcagtgccaacttgggacaagctccagctaggcaggctgcccttggtgctggtatacccaattctgtcatttgcaccactattaacaaagtttgtgcatctgggatgaaaggtgactgatttaattataaaaaataaaactaagctttctaatttccatttgtgccatttttttttaagttaactggtgatcacctttttttttttttttttcgtttactttgtttagctataatgcttgcatcacaaagtattcagcttggttccaatgacattgttgtggctggtggaatggagagtatgtctaatacccctaagtaccttccagatgtaaggttagaccattttgcctctggaacagaataaaattggaagatgaatagttaattctagtctagttatgcttgagtgaataggaaaaaaaaaactctagtctagttatgaaatggttcaatatgcttaaattggtcatgtatggaaattcatcattaacaactcaattagaccatacatgagttttggatctattgctgcttcacttgattgaaaagtttatgtttttatggtacttgattcaacaagcaagactttctttgatgaaataatttcattgtgtatttgtctaaaccctttcatttacacttttataaaccattatgactcattttgttaccagaaaaggatctcgattaggacatgaaaagataattgatggcatgcttaaagatggcttgtgggatgtctataatgattttggaatgggagtttgtgcggagatatgtgctgaaaaatatactatctcgagagaagaacaggtattattctgcaaaaaattgttcaaatgtcaggtctaggatattatgatagtacacgttgttcagaaatcaaatgaaccttctcaaacaaatatgagttcacttcatttatttttgcacaaggtagtttattaatcattcccaaaactttgtaagtagttggaagagacatagatgtacgttggataacaataagactgtaaattttcagtgttcagtttcatttaatatgtttcatcatatcatgttagcttgttcttaccatcagtccctggtgagctttaattatttttttgcttttatgggtttttttaactgcaggatgcttatgcaatacaaagctttaaccgaggaatggctgcacaaaaaaatggtttatttgcatgggaaatagctcccgtacgacttactgctttataaaactattattttatgtttgaaattaatttaaaatatccatcttagttcacaattttctgtaggttgaagtgcctggggggcgagggaagccatccataattgttgacaaggatgaaggtctggaaaaggtatgtacatattatagaaatagtaaattgttcttttgacagtaaattacataagctactgttgtaatttctgttatttttttcacagtgcaaatattaaaattatagtcagttcagtatccatatttcttctctgcttgcccatttgaaagacagttttattccataactagaagtttcttctctgattgcttttaggtactagggatttcctaaggtccattcgtttgttttttaagaatgggatatgggtgatttttatactaaatggtaaataccaaattttgcaatacttgcttcatattgtttttcttttgtatctcttcatagttcgatgctgcaaaattgagaaaactcagaccgagtttcaagcagaacgggggctctgttacggctggcaatgcttctatcataaggttctcccccctctctctcccccaacataaatataaaatgtagaattgtttcaagtgtggtaatgcaatttgatatgttgttttaagcaggcatgtgctgtctaaatattcatatacatttcagcaactggtttagtaattgtgattcttgtagtttatactacaacaaaactggtttattttctagggttgcagattttaagttgctttaatatggtttggttcttttatcatgaatagtgatggtgctgctgcattagtcctagtgagtggagagaaagcgcttcaacttggattgcacgtaattgcaaagattaagggatatgctgatgcagctcaggtactcttacaaatgtattggcttcctagttctattttactgttgctgaaacatagctcaaagaagattatctttgcaggcacctgaattcttcacaactgctccagcccttgtgattccgaaagccatttcaaacgctggtttagatgcttctcagattgattactatgaaataaatgaagcgttttctgtaagattttagtacttataatctctctctgttcctgatttagtaagcattttttttgggtttcattcatttatatttgttcttttcctctccaggttgtagctctagcgaatcaaaagctgcttggtctgaatcctgtgagttaggagaaaactagatcatttctttcaagttggtgtagcgcgctataagtctaaaatatctgctattgcaaatctgatcattcctacattttctgcatttgctatagtcattcatctgtccactttcatttgattttcttcattttgctcaatatccttatctacatttttttcccttccaatttccgggtatttcaggaaagccttaatgtacatggtggggctgtatcattgggacacccacttggatgcagtggagctcgtatcttggccacattgttaggggtaattttaatttataagattcccatccctgctctgtgtagtttaatgttctaatgtcattacatagttctctggttttgtttacgtgttctcttaatgatttaaaatcataatccatggttatatttatggatacattctctacatatagacatgtgaagtgatattcttttaaatatctgttgagagtttagctgcggtggaaataaaagagttctctctggtgtatttaacttgttggaattttggaaatgaataatattgttgcaggtactaagacataaaaatggaaagtacggggttggtgccatatgcaatgg

SEQ ID NO: 298464 - DNA, 1954 bp, Cannabis indica
catgtcatattgtaatagtacaatagttataactaactacttcctaataataataataatttttagaaagaaaataaaaaaaaaaagagggcaaataataataataatcaatggtgggttttgatgcattatctattttctcatcaaattttctctctctctaaaataacataatatataaaaaaggtgtctataatgaattgtctcaacaaccaccaaaattaaatacattatctcgggccgggcttgacccgctaggcacaaagagggagtcgggccgggccgggccgggccaaagtgatgtcgggccgggccgggtttgtggcattcctacttgcctagagcacaataattccaaactccaatattccaatagcctagaccctacttcttgctcttagtaaaatctttattaaagaatttccatggatcccataattataattcccctttcacaggtaaattgtagaaatttaattgattctcttaatcgtagattggggaaggactacaatctaagaccaataagtatatatagaatggaagatagagtttatcataatacacctactagcaataaagatatttcttttgtcatttattattctttatgaagccacaaaaggatttctttcaaatagtctcttccacaaaacttataatgtgtatagctgagaagctatacaaagcctgagaatttactcatgagagaaatagagagagaaaatggtaattattagagttagtctcacattgttaatttttggaaataaattatcatatgggctactcttctcattaccaattagttttgagttggtacgccatgccccttaatcacactttatccaaattctatcatggtattagagtcgcttctaatttgttgtgagcccaaagtgccgccggttcaaaaagatgagccaaactaaaaacttttgctatttttcctttaacctccatttgagactttctaccaatgtgtgtcagtttctaagttggggtctttgacctattttaaaattcacaaatttgctgatgtgtatactcacaaatttccggatatttggccttgtaggattcttccaaatgtcacgttcggtcctatggtgtcttaaaagtcgttctttatacccacacttttttgacctaaacgtgaagatggtgtattatagttagtctaatattattaatgtgtgaagataaattttcatatataagatgaatagactactcctttcattgtccattgattttgtgaaaaatcaccatacaccttattcaccttaacgcaagaatccaattatcccatttggagtgaatataatggtaaaaattattgtcaaaatatcattcatcgaatttatcctgcccacataagcctttcataattatatattcagaataatccactccaaaagcaaaagtcacatgattcgggaatcaaagtagatttccataaaattatgtttgcccaaattcgtggatatattctaatataactttttatgtatcttattatatatatataggtagcaagttttatgcccaatatttaaacggaatatagtccgttgtacggaatggtaggtcccacgtactattaaaatttttattattttttgtgaatttttttatttatttgacaaccgattgttgtaggtttattcaccggttgtgaattttatttattaattaaaaaataaaaaggtacgaaaaggtacaatcaagttactatttgtggtagttaatagtacaaaagtactgtagacagtaggtccatgttgtcggagtgaagttatttttatcttttcattccttcatatcttctcttatcccattcctcgcactatgacgtggcggctgttgggattttatgccctaaataaaattcattttaatctaatctgatttgttatcaataaatgataagaagccatttatgtttacatgt

SEQ ID NO: 298465 - DNA, 6010 bp, Cannabis indica
aaaaataatctaacatcctgaacagataacaaaatctagcactaaagaatacccatcaaaattgacataatggttgcaaattgcattatattttctctaaaagggttcgtcatggttattgtacacctcacaaaatttaaagtgtgacccaaaatccaagtcagatacaccaaacccgaaacaagaaaattatttttaaatttataaataatattttttgaaaattaaaaataaagacagagagtgctgaaatctgttaaatattttattttattttgtaaaaattgaatttggttttttgttttttcgttctgatcctaaaaattcagaatatttattttacttaccctaacgctcctcaaattgaaagttttattttggtagctttggcccaaaaatcaatcaatccataaccataccatatcatagcttctcacgcgccgcttctttcttcttctcctccttcttgataaaagctttggtctctttcgatgatgaaggatttgaattcggatctgtttgacctaagaacggagatggacacggctgagtttcctcggagcggttcatcgtcttctgatgccgatttcgccttcgctttcaacgatagtaacttctcagaccgccagcttaggatcgagatcatgggtgagacagctgagactaggctagagtccgatgcctgcaccagcatcgctgattgggcacggcaccgaaagaggaggagggaagatattaggaaggaaaacggttagtttttttttttcttttcttgggtgccttgtttcttttaagtttgagcaaaattgagagagatggggctgataatgttttcagttttgaatttgagtttaatatatgcaataaaaccttgaattatcgaggaaatgaaagatttttagaaatgaatggataattatttgtatgtatcaaactctttagaaaccatatattccgtcaattgagctgaatttgtttagtattgtatttgcaatctgaccacatttttatttgaagtaatccctcctacctgatatgtgcgtgtaaggaaattttctctattttgttgtgttggtgaaaacagtgtcttattgtgctttgctgatgatgtttggttttcgtttcaattgtatttttctgtttcagttgtggatctaagcggctgccctgaagaacaaatcttgaattgcaatcaaccagacatagatgattgtgatggttgtgaaaacccggacgaggacacagttgccatgattgaggaatcaccttcgggtattttaaccttttcaaattcaactagtttatactccaagtaattttgcagttttctaatcaatggttcattctggtgtacacattctgttgctgaattagtatatgataaaaggtttttttaaattttttttcttatttctggctaattggggtattttttggatttttgaataggttttctaattgtgttgtattataatatgtatagaggctcttttatttgaatcatttggtggacttatgtagttataaaagaatacgtattttttaaccaaaagcactttactatcaacaacacgaggacatacattctctaccctagaatcacaatacattcttctctttttctcttattttttactcccttctaccaccacactcttaattttaagcttgtattctataggcgatgaaggtgcaaacagcaatgagtcagactggaccatggatttttcaacagttttgagagttaaaacattgcatatcagttctcctattttggcagccaagagtccattcttctacaaggtgaagtacttgacatattagaaaatgttgtatgattttccattatatgcttgctatattagtaaatgctttttcttatatccttgtcttacattgttttagcttttttcaaatggaatgagggagtcagagcaaagacatgtaaccctgcgtattaatgcatctggtattttgagtaatctttatttgttatgctacatttttttgttgcttatattaaatatatgaacttctacacatcttgttgaagtgaccttaaatatctatggtttatattggtggtgcagaggaagctgcactcatggagctcttaaactttatgtacagtaatacattatcaaatgcttcagctcctgctctgttggatgtgctaatggctgctgacaaatttgaggttgcatcatgtatgagacattgcagccgtttattgcggaatatgcccatgacacccgagtctgcattgctttatcttgatcttccttcgagtgtcttgatggcagaagctgtgcaaccgttaactgatgcagccaagcagtttcttgctgttcgctacagggacatcactaagtatgttaacattttaccttaacaaattttaatttattatccccactttctctttattataatttatactttaagttgtttggtgaaaaagtagtcacactgaaaacataagaattgatttgaagtgtcataagggcaactaaaacttcccccagttttgcttaagttatctttttttctagttgggtggaggaaggagttgtgtcatttaaaattaagatttcttttcttcatattgaatttatttatgcaatagtactgtgatgtgctctggtcacccaagcacaactcagatatagaatcagcaataaaacagtaaaacaaatgctgaaatattcatagaagggttggtattattgaactgaaccaaaggaaacaaactactaggcctttcagactttgatgcagagagagaaatctctaatcatgcataccactgccctcttatactctcctataaatatatatatcactcaaacctacccctccttaaaatatgacccatgtacccttttctacttcctgggatctaacatacagctgcagtgctagtaccatgtgggaatgtctttttgtgctttctcctattttaattttttttggccttattgctaaaagcttttttgttgatattttcacattttgcaatgtacatcaatcaatatttttacatttacttcctacacaacagatggttaatttgtaacttctattcttgtgtgatcttaaacttgcattcttattgttttatgctgttatacttgcgaaaagaacgaccttttttgttgtacataacagtgatctagttagacgtgggtggaggtggggtcgtatgaaaagttttctttttaatgtcactctgattctgcttatatttacgtctttttctggccttattttttatggtagatgctgtaatataattaagcctatactgtatgtgtctaagctatgttacacggtataagttgaaggcatctgcatctctgggattacacattcacaacatgtcattaaacttttacaacagaatttgtttcattttatcagatcccacttgctcttttttttttccgaagcttatgtagatttttgaaccaggtttcaagaagaggttatggctttgcctcttgctggaatagaggcaattttagctagtgatgatctccaaatcgcatcagaggatgctgtttatgactttgtgttgaagtgggctagggctcaatatccaaaacttgaagaacgaagagatgttttgggttccagactttcacaatacattcgctttccgtacatgacttgccgtaaactaaagaaggtcctatcttgtaatgattttgatcacgaagttgcaaccaagcttgtgctggaggccctctttttcaaggctgaagttccacatcgccaacgagcaatggctgcagaggactcttcttccttgaaccgtcactatgtggagcgagcttacaaataccgtcctgttaaggtggttgagttcgaacttcctaggcagcagtgtgttgtgtacttggacctcaagcgcgaggagtgtgcaaatttgtatccttcagggcgagtttattctcaggcattccacttgggtggacaaggtttctttctttcagcacattgcaacatggaccagcagagttctttccattgttttggcctatttctgggaatgcaggaaaaggggtcagtgactttcgctgtggactatgaatttgccgcaagaacgaagcaggtgcaggcaaacctggcaaaccagcaaactgaggactttgtaagtaaatacaagggcaactacacatttactgggggaaaagctgtcggttatcgaaatctatttgctttgccatggaccagtttcattgctgatgatagtcctttctttataaatggtgtcctacatcttagagcggagcttacgatcaagcactgatttctctgttcggtcaagtgttttagaaggaatacaactactctgccgtgtagctctaaccattttgtttattttatttgcctgtatgctgtatgtattgttctctaaatgcaaaatggaataactagataatatatggcacacttgagacccctcctttaacaaggctggttaatttactagaaatgtttatttatatatttattattagcttcttcatactcaatgctattttaagaatcgcaaaggaaaatgccccccgaaactactattttcttacattcatatcactttcaattggtattaatttcgagttttatattcatcgtaactacacaccttcacatgtgcagtaaaaactacgcattgtattaaatttttaaattgggtaaattcttatttagtaacggtacctattatatttaggaaaagatatttcttaaatttcaaattaaattttaattttattagcactaggaaaatttttaacggcagaaaaataaaaatcttaaatgtgtttcattttttcctaaaattgctaaatgtatatggtgtctaatatactatataaaagttgttatattgttgttaatgcagtttaatatattgtcctacaaactacaaaaacactataaaaacactacaatcacatcaaccgttaattaaaagtctttcaatattaggacttacgagaagcaaaatgtgttgtgtcgttgatgagtgtacatttgtacatttattcttaatcaattattagacgaattagcatttattaaaactttgtataaatttgatatgttttttatagtgtgcagtattgagcataaagtgatgaaattatgacaaattagaaatgaactgaacatatatgagcaaagtgccaaaacaagagagcaaatgagttgagaaacaagtgaaaatataaaaaatagtgcttggtgctataaattttcatttaatttcaaatctaaatcttactcttattattaattttttaatttttttttaaatttattgtcttactttatttaatatatttaccatacttttacattttgagtcagacatgtcgattcacttttaattcgtgtctagttttaccaactctaacctaatttataaaatttatctcgtgttcatgtcatgtaatcgtgtcaaaacctatttccccatccaaaatcaaaatgcctaagagcaaggataagggagggaagaacaccaagcaggggaataatgaggttgactatggtaagtggaataatgagatgcataacgatcagggccagaattacaaacagggtccttcgcattcttggcaattgctgctttgaggccttgcatagtgtaacgtgcatgtcaagatgacacgttacaagttaggtgatgcccacatgttggccaagtggtgtggtggtcaagtggaggcgcatgttggtatgcatactggtggcatgctgatgcttagtttgtacggtagtggtgttttcgtaaatattttcaatattgtccagattgggacaaaacttggtattcaccatttatctaggtctacgaatacaatggtacaatcggatttgagaaactatataatttggtatatggtgatgaccatatttctacagaacaaaaatgatatatgttcttgggagaaggctaaaagcttagaatgctctttaagggggaaatgcatggtgtcag

SEQ ID NO: 298466 - DNA, 3581 bp, Cannabis indica
ctccaaacacgattaaaactcaattaaaaatatactaaaaataacctagcactagctttgttcttgttaatgatgtcattagttagttatattagttttggttgttcatagtttgttagctttctattttgtatattctattagttagttacaataactaacttcactcttgtatacattgagctaacagctccctatcaatacaattatttagattcatcttcttactttttgttctcactatctttctctctttgtgtctaacatggtatcagagtagattttttttttattttctctctcttgcatctgcatattgtcactttgttctgtgttcttctctgctcttcgctatgacaacttcttctacctcgactccgaccatgtctggtgctctagctgctactggcacttcttttcatccagtggtgttttctcataagctttttgtcaagcttgataacaacaattatctactctggcgacctcaaattctttcaacgattcgtggtcattagctttcagactttatctctgactctatctctgtcgatgaagttcctcactaatgaagattgtcgtgatcatggaatcaatctgttgtacagtcaatgggaataacaggatcaactcctctactcgtggttgctttctcctaggtgttttaactcatgttgttagcaataaaacctttgttcaattttggcacactagaggtatattttgccactcaaacctctgctaaatttgattagtttactaatcaattgtaatatataaagaaaggatcattatcgatcatgactatctcatttgtatcaaatctgtgttggatcgccttggatttgttagtcactgtgtcactgttaaagaacatgttgcagtgatcttcaagggattaccaacagaatatgacacctttgttatctctgtcaactcaagaaatcagccttacactgtggatgaaattgagtctctccttcttttgtaagaacatcgtatggaaattcaccatcgcgatctagattcaataaatcttgccacaaattgttcttctcgtaacaacaaccttactcttactggatgtgaaaccagataatgttcccattcttcatttatgccctctggccatggtcgtggatagtggaatccttatgttgttgctcctcgtggctcaggacaatttgcttcatctacagcacaaggtcgtgcctcatctaagaactcattagtgcaacctcctttttcaaacaatactggttccaccagctccaaactagtatgtcaactttgtgctagacctggacatatttctgctagatgctaccaacgattcaactttgagctccctggaatgggagctacaaatgttgaacatctctcagtaaatattgctccagctgacttggttgttgaccctgcttggttccctgattctggagaaactagccattgcaccccaactaagcctacttttactcacaaaggaatcatactttggacctgatcaaatccacatggatgatgaggcaagtataaacatcaaggtgttgttaagaaaatctttcataccccttacacttcaaaagaacttgcacttaatcatctcttatatgctcctcaaataacaaaaaatctcattagtgtatctcagtttgtaagagacaataatgcttactttgttttctatcgtgatctttgctttgttaaggatcaagtatccaagatcactctcatggcaggacaacttaaagatggtttttatgtcatatacagtctaaagtttcctcttctactaagattccctcattctcccaatctacttaatctgtaaatcatgctcaaatgagctcttgtaatgtttctagcaaccaatctactatgttttctctttggcataatagatcaacacttccctttgctaaagttgtaaagaaatttttttcacaatgtaacatttctggaatcaataaaactttaaaaactttgtgatgcttgttgtaaaggaaaaatccaccaatttcctttccaaagtccgatactatgtacacaaaaccccttcagttgagctatactgttctatgggattcctcaccaacgccttcttctaataactattattagtatgtacattttattgatgcttttagtagatacatatgggtgttcttgttaaaagaaaaatttgaagcattgtagacttttgtaaatttcaaaacacaagttgaaaaagagcttcagtgcttattaaatccattcagtcagattgaggtggggagtatagagcctttgagtcttaccttgagcaaaatgggatttctcatatattcccacaacaccaacaaaatggtattgtagaaagaaaatataggcatctcgtagaattttccctcactcttttggctcaagtttcaatgctcttaagttttggggatgaagctgttagaacctcaaccttttttataaataggctgccctcaccaatgcttaataatgacaatcccctagataaacttttcaagagacaacctgattacacccaactaagggtatttgggtatgttatgtgtacctttatagattatagtcttaaacacaatggctacaagtgtcttgctcccgatggtaaaatatatatatctagagatgtcattttcagtgaacatcattttccctatgttgaatcttagtactacatcttctcacattaatcacaacatgccaaattcgatacctctcatactccatcacaatgacttattctttctacttacatctccacttctcccacaaatattgtcactccctcccactccactcccatgcatcatttcaaatggttccaatagtactgatgttgaaactgcatgttctagcaatacaagttctcacactacaggtttcactgttgatcttgttttgtctcccactacttacggttcctccactttagctcaacaccagctcccttatttgtcaataatcactctatgatcactagagcttaagaaggtatcactaaacccaaaacctttctcaccagtacaattcctcacaatctcaaagctgctcttacagacactgtgtggattgaggcaatgagtactgaggtagttgttttaagatgaaaagaacttggacattagttcttttaccttctggtagaaaggccatcacctaaaaatggatctataaaaagaaggaaaaccttgatgcaacagtatccaaaagcaaggcaaggcttctagcaagaggatttcttcaacaatatagccatgatttcaaagaaacctttagtcatatggtcaaatctgctacaatcaaaaattttcaaaatgttgcactgttctacaagtggtcaataaagcaactcaatgttaataatataattttgaatgggaatttagaagaagaggtgtatatgacccaacctcctagtgctgattcagcaaattcccatatggtgtgcatgttaggttatttttactattaattttagattaagtttagtatatttttaatttagttttagtcgtgtttggagcattttcacgcttgttatcttttatttttgcagattt

SEQ ID NO: 298467 - DNA, 3877 bp, Cannabis indica
tggattacattgaaatagaattttatttagggcataaaacccaacagtaacatgttatcatctccatccaaaattatgaaaatgagttaacatggagtatgggagtaaaaagcgtagcctggaattggagtctcagggaattggaagtaagcaactgtcttaccatattttaaagttaacatatttactaagccaatccaggttggccaaattttagaagttcaggtttcgaaaaataattaatcctagattaatcaaaatcaaagaggtttaggcttccagataaaagtcaggttttaaatttaaaactgaaaccttaagtctcaaaactttagatccagaatctcagatatttggaagcaagtaatacttgtaaatttttttaaagtaagttgttgaaattttttgggtctaggttgttggcgccgggatctcaaggaatctataagtaaacaatttgtgaaaaaagtttaaatctaagcatataaagttgaactcttaaggtccaggcctttggaactagaaccttagggaacctggaagtaaactaacttagcatctaaaaattcattcaaattttagcgaatacttaatggatttaaacaatagtgtaaataaaaagcaatctagtatttacatatgaaaagccctgcagcaagggcataaaaagattgtctctacaaaaataaacagggggacccttgtccccctaaaagcaagttcaaaagcataaataaatgtagattcaaggcttagctggatcatctggttcagtagaggaattatgcttcgccggatcatttgatggaactttggaagccggatcttcatttgaggccaagagtttactagatttgcactgtctggaagggtggattcaggatcatcctcttcagcatcctcaacagcttttgttgatgcatctagttccaaaatctgctttaagaacatctctttctactctctgagaatgtctaagaccttgttgtcaatcttccaaagctcgtaaagtgtgaccactaacgaatgcttcaaggcctctatctttttcgcctcagtctcagtcaacctctcttccagttaagttttctcttcttcaagcttcttaacatctaccttaactttctcctcgaattcctaaagagccggctccaccttcgcgagcttcacatagaagtcaacttctaagtcttttagcttcttcaaagctccagcttcaaactcttttgccttcttttgaagttcctgatggttctgaacctgtctctccaaagtagagatgagaattatcttctcatcaagtacttgagtttgatgatcataatcttgggaagctttgctcaattgttgctcaagggcctcaactttcatcttaactctttagccttctcttctagattaaaagctcgagagttagccttggtgtatagctccttgtacttttcagcacaatccttctctttcttggcatctgtcttgtaggtggctacaacaatgttcaaagtcaactcgaccctttgcctaaccaactcatctgtttgagccttggcttcgtttagggccttgacaacctcttatcctttttgctcagagtaagccctctcagccttcatgacctccacctcaagagtcagcttgttcactaaagtagaatacctctcaaccaatagatttgtctgaaagagaaaatattaaacataatcagatacaagcaaaaattgttgaaattattatcacataaagtcaaggtgtttactccgaaagtctggtgcttcaagcaatcagatataaaagctgggtctccactagccactgtagcacatctcttaaaacccaatctgctgaaagttgtagcagtttggtctgagacgtccgccacaaatggggcaagatcagaacccactcttggttgaaacctttcaactatagctggacagtcaaagatgggaagtagaggatttggactctttgccaagtctgcgaactcaacaccttttctggttgaaagtacggtggcctgcttccgtacatcaacaacttctgtatcgaaccttctgcttaaaaatttatcaatagtgtccagctgggcacgctcttgtttggacattgtagaaggacgaatgggtaaaatcactcgcagaggcacaagaggtggaagattagtcttctatctcgacatctgggaggaagaagcagttgattatttttgttgcgaaggctgggggtcctagatttcccttcttgaacgtgtggtctgcccacctaatttctcagtcgattttttggcgatactccctaagaaattgtcaactaagcacatttggagagtaagtagattttttgcaaaatgaaacatacaaatattagtattatggaagcaataaacaacaaaccatgtgaaaaattagaatattactcaagtatggttcataccattaattctaacatactgcttggagaggtccccattgaatcttacatctagaatcgaaactctcaaggagtaatcactttggacgattagattgggaaaaacgagagtcatacaaaacgaagataaaacttacatctggaacaataagggttccggacaaaggaataaaaatttggctagcgtttttgctggaaggtagattttccaaaaaaaaagcgaatgaaaaatctagttttcactagatactaaatctgtccagagtagtacccaaaatgtcctatttctaccaaacagtcaaaatctagtcgaaggcctaagttctactcatcaaacaatagataaagcacatgcagtccctaaatggaatactaatttgaagtatttatcaagattcaagaagttaaagagaagaaaatcacatgttgtagattttgggcttgcaaggaggtgcggcctcggagaatagttgttgatgtcaaatgatgacttcaaattgaagtctgccaaggatgggcactcgggacgatcaagccatttttgcatagcaaaagcttggtcgatcaaagaatcaatctcaaagttaagatctagcgtttataattgcctcggggatacaaataagcattgggggtggtgcgtctagatattcacgagctctgattcgaagtagaagatgaatggaataattgatatcatgctccaaatcgcttagttctttgtgcaactcttctctgtaagtttgaaagaaatttgaatttgggtaaaagtgatgaacaatagcatttcacaggatttataccttagagaagcaatttgcgtgatgtacagatcaagggcttagatttatttttaagaaaaataaaataaatctaacaatccgagaatgccatcgatcaagcatttaatgtaaaaaaatagctatcgaattaataatcctactccatccacctcctcgataaatgttaatcccacgaactattggagtgatgccacaaatcttcctaattcaaaaattaaaaagttgtcagccacctataaagttaatatagaattcctaaaggttttatctttaacctctatgtatttatccatgcagtatgaagcaagcctccgcaacacatgtggggggtaaatgtaatccgtattttcggcaagaaacacatggagtctaaataataaatatagctcagatacttcatgcccaataattggcccaattggcatcattgggccaaacctataaaccatccgtcctttcgagtaaatagcaaacaactcgtccaggcgaggttccatctagcatggtcaatatcgggaaggcatacaactgtatagccggaagaagctatctgttgggttttatgccctaaataaaactcatttcaatataatcatatttacttattaatatagatcagaaataacatttaatgttgcatggtt

SEQ ID NO: 298468 - DNA, 4022 bp, Cannabis indica
tgtcagaacacacctgaaaagacaacacagacatactatatgataatatagttccattaagcacgcaattaaattaatctcattattttacccttctcgggtcataattaccaaaatgcccctggctcaccaacgggatcttaacatattaaaattcatattaattcacatatattaaattatataataatataattcctcaattattcataattatctagtcagggttttgctaatccatttctaaattccagggtgttacaggtagactcgaaactccttgattttttcgatattccaccttgtagaaagggtgaaatatcgaagtgtgaatttcacttgtcacaagaagtagctctcgtttactatgaaaaaatagtcataggtccagatgaaattagatttcaataagtataacctagcgcactaggccagacgtcaacctgggcgctgagtgcttctcgggtgacttcccgaggctcatatttatacttcaaaggcattcgagattgaaaacgaggtcaccttctccatttttgaccaaaattagaagaaagatcatagtagaatttgcatttgaggagtagaaacatttcaacctgggtgtagggcctagtgcctatgtcaacttgggcactgggtccctatttcaacccccaaaagatctattttgctcctcgagatcacttgtatcttctttaattctgaaaacaaaaaagttgcttggaacacttttcgagaaaaatgactagaaatagcccaagttgaaaaaaatgccaacttgggcactaggcccagtactagtgtcaaccatggtgctgagtctatctttttgcccctggatggttttgtttggttgccaataacactcgtatctcaatgatttgtgaaacagagaatatgactggtagacttctcaaaaaaattgattggaagtagcccaggttgaaaaaatattaacctaagcgctgggcccagtacctaggtcaacatgggcactaggtcccagttctggctcataaatgactctgtttgttctccaaaagcacccatatcttaactattgacaaaaatagagaatatgccatgaagatttcttttgaactgatgctagaaatggcccaggttgacaaagtgtcaaccaaggcgttgggtcctcattgtagtccctagatcgattcgtttcttacattaaagcacttgattctttgactaatgtggttctacatagattagtggtgcatgttctttaaatggataaacaatttgtttagctgtaaaatttcttttattattttttagatgcttaatttattcgttattaaaatgttaaactctattttattattattcaatgattatttattattttaaaattatataaaatctgatacttaattatatcaaaaaagatactgaatatcaataatacttttgtacaattctcatataaatatattgccactactgctgaattctgtagccaagttaattttttaaatcgtaaatttattaaattaatgtccccgaaatataaacaaatagaatggcataaaaaaccaaagaaagaaaaagagatgacaatattttatgttgtaaaaaacaaaagaataaataattatggaccgttgatctattacgaccctttctcgtatcttaatcgcccctcgaaatagcatgcaggagggtggactacacgtgatatggtagcaagtttgcgtcagtgcctcgacaagcgcgtaggactcattcagtcggcgccatttgaagttttcaacgaatcgagcccacttagaatccagcaactgtgaaccataaaagggtccacgtattcaaatgactaaaataccctcttaccgttgcgatttattaaacagtccactttgaattgttcccagtttctactgttaccagcaccaactggtttaatagccgccataaagaattaccaataaaatggttgtttaaccctcaaacgtaaatcatgttaattatttattttattttagaaatttattatttttatttaatttaataaaaacatttgtactctcttataaatctaatttcatgtttataaaataaaatttcattcattcaaaataaataaaatttcagcatattaaatcttttaaaaaaatttgtagtacacccttttaatatttgtatttaaattattttctatgatagtgtacattatagtcatttaaaattatttataaatttttataaaattttgtataattaatagtataaaaaataaattccaacaattacttacaaagcatataaaaaaatatagtcgcgcataaaataaaatatttaaaccttacttttggcactataaaccattcgaaaatttttaaaaatttaaaagtaatcttaaataactacaatatacacaataaaaaaatagactaacataggttgagggggttgtgcacctttagctaatttagataaaaccgaaataataattgtaggtttacaattttatcaaagaagctaagttgatcctcactacactaatgctctattcgactaatagtttaggggccataacttggtgatagacctcttgacctatagatgactttactgcatcttttcagtttgaaaggagattgattcacttgaacaaggtaaaggcaatctcactatgaagtgaactgtctagggaacaaattctttattgatgatatcgtttagaagcttcccattcgagtatattggtatcaacaccggattcaagtggcagtcatagcatgctccaacccatttctcatgggttctaatacttctgtgataatataaggtccctccctctctcattaggagtcttcaatgttgctttcttggtcaatatcttcaaaagacttatatgactcattttcattattgctcccctattgctaatcattgttggaaataaaaagacaatcttcgtcactaccccctgtcctgagttatcttgggaagtaaggggagattcttcgtcaatgctctcccactcgagatcatcttgagaaacagtaagggactcatcatcactatctccctgcttcagttcatcctggaaaacaaaataggagtctgttttagtggaagcataaggtgttgattcttcttcactttcctgatcaaggtctacttaagactcaggaaatagataagcagtgtaattagttgcttctggttgagaaactcctttgaccttcttgacggcttcttcgagcttgatgaaaccatcaactctgtctagaaactcttgaatggtgtatactgatttgagtttcaagtctttctagaatggactcattactgttagtctagctgtcaatgacatgaccttggcgtcttcactgagtatctttatttccatggttgcctccaagaattattgtaggtaatcctttagaggttcgtcttcttgctgcttgatgcagaccaaatagttaggctcgattggtttgtgccttgatggggaaaatgggttatagattacttgcttaagtgtctcctaggaatcgatagatcctggagaaagcttgagataccattgttgtgttgcttctaatagtgtggctagaaagatttcataacaagaatcgtccttaatgccttgcaggttagtctgtacttcaaagttgtgtatgtgagagagagggttttctttgccaatttatggatgccacactagatttctaaactttgaggggatctctagagccttgatttgatctaagagaggagaaaactactctcgatttaactcgtactctgttggcttaaaagtaatgatacccttaaccaaagcagtaagggtatcaaattcggccctacacacatcatgtgtggtgatgtgtgtatcagttggtcgcttcctactaatgttgttaggtaggctattttttcttccaagtcgataaaaggcatttattgacctagaccatgtggttatttcctggtcgtctggccttgctagtaattgtggggatttatcccgtatgatgatagagtcg

SEQ ID NO: 298469 - DNA, 1878 bp, Cannabis indica
ttcaatttcaagtcacttgtttcatcatcatctttctaatgccattttcaaaagggtttttcctcctttcctttagtttcaagatatatactcatcatataccattaaaattaaagcaaagcatcaaaagacatgcaagcattccatagatttacaaatattcaccaataagtggaaccttttggataaaaaagatttagatgataaaaaggggtgggacgaaagagggagaggcgaaaggcagagattgaaaacggtgaaaggttttttttaggcccaaaattttcttttctcatccaaggtcttgctggacccaacaattcacatgcatattatgccctttttcctttttttttttagtttgtttttatttatttatttttctaccatggctgctccaaaaagaaaaaaataatcttgctggtcatctgccgttaataatatttgacagataaacagtgtgaaagtgaaagatacctttttttatattattttattttttttccttatattattattattattattattattattttttggtcttctcggttaactaaaattccttaatttaaaacagaaatgaagaaaattttacacacgttagaaacagatcacactggacccggaaagtctttggaggttcatgggagagtatctgatgcttcaagaacctacagaaacgttactatcaagataaacctttttcttcttctaattttgttattatatttagggcacttgtctactttcaatttatctaaaaagtttaaaacttagctaaagtgaaaaaaatattgaagttggtaaacaaattagaataagcattgctacgaggcactacagtatttaatattaccatgaagtacaattttataattagttagtgattttttataagatttattaaattatactaataataatattataccaatattaagtatcattttaacatttttcaagtggaataaagttaccaaaaaaaacaacaaaataactcaccaattagcattatttattttaatatatatttgtatttatatatgaattgattgaattatggtctattttattatttatttttttttcaaaaaaaaaaactaaattcttctttttcctctaagaaaaacataatgactggaccatccatccaagtccatcccactccttttaattatatatattaatgaattaatagtttcctatatgtctccattaacgactttagatactataataatatagaaatttactttttcttctttaaaataaaaccaaaactttcatggaaaagctgatctctaatcatgctttccaagaactttatcatcctccaccagaagcccaaaaataatgttttggatactatagctattctaataaaagaagggtctaattgtcacattatagaagttcgataatagaacagttggattgagtgagaatatactgttctactcaatgaaattaagtctcatgaggaattttttttccgcatatcatacgtgtatgtgtccccacccaccctttcaacttccaagttgagaaaacattttttgtctactagtgtatgtatactcataattcattcaccttggcactaatctataagatttggaaaagtgattccactttctcattgataggtacagccataatatgggcaaatataagaatctttacaacagattttggagaataaaactcttgttaactaatgcctaagaaataacagtaagattagctaacaaatgaagtagattaaatatataagaatagattaacagaattgaaaattggtttaacaagaggaaatgttatattatttttaatataataatatgtagattaaaatgtggtaatatatattattat

SEQ ID NO: 298470 - DNA, 5878 bp, Cannabis indica
tttgaaacttcgatcattgtcggccaaaaatatccttttcacaggattttcttagatagactttgcccctagcatggttgtcatagaatccctcatgaactttattaaggagttatgctacttcctcttttgttacacacctcaacaaaggtagagagaaacctcatctatacattactccgtcaaagatcagatatcgtgcaacattcctcatcatcttttgagctttgcttttgtcacttggaagctttctagtttcaagataagctacaattggggtcatccaggtaggagtatcgtccaccattttattttttttgtgctggtgatactacggtcttttagaaataaaattgggactaagtctgccttgtttgtcacggtgatgctcgccaaccgtgccaatgcatcaatagttgcattttcctaccttgaaattaacttgatggtgtatcctttaaactaagccaggaggtcttgaatttttctcagatacaaaatcatcctttctcctcaagccagtgttccctgaagatgtgattgaaggctagctatcactacaaatgtccaagaattcagcacatactttctgagaaagttttaatatggcaatgagtgcttcatattctactacgtcgttggatgttgtgaatccaaactttactgcttcatgcagatgatgccctaggtgtaatgggggttattcttgaactagactgttgatcattggatgattagtttacatgtaatttccataccggtctttcataatttctctattttggcaggggatccttttctttctatggcttggtgtcattttctacctttgttatttcattgcccgcgtactcggctacatagttacctagggcttgaccttttattgtcctcggttgataagtaatttcatactatcccaactcaattgcacatttgagtagccaaccaaaagcatatggttttttcaataccagtatatacctggatgaggtgggcatggaagtacattattatttccttgatgtcaggagtaagcaataggtcaatttctcaatcagagtgtatcgaatttctacatttattagcattttactgagagagtagaccagatgttaggtgttattctcttctttgataaacacgacgctcactacaattttggttactgagatgtatattcccaattcttctctatccaagagctttgataagatataaggttgtgcaagttccttctttagctcttgaaaagcttcttcacactccttgacctattcaaactttttgcttctacgtaggatattagaaaagggaacacacttatcctttgactttgacacaaatttgcttagtgtggctatccgacaagttaggctttgcagttccttggattttgttggtgatttcatatccagaagggcttgaatcttttctgagttggcttcaattcctcaggtgttcataataaagccaagaaacttactcgagctaactctaaaggaatatttgaggggattaagtttaatgttgtactttatgaggattttaaagcattcatctagatcctctatatgcccccaacctttttggatttgatgagcatatcttttatatacacttccttgctacacctaatttgatctttgaacatcttattaactagcctttggttggtagccctaacattctttaatctgtgtggcataaccttataacaataggcgtccatgaaacttaggatctcatgacctgttgtagagtcgatgaactggtagatccttggaagtggaaaaaagtctgttggacaagccttattaaggtcagtgaagtgaaagcatacccgatatttcttatttagtttaggcaccaatacagggttggctacccaggctgggtagaagcttcaattatgaatttatttgctcagattttttctacttcttcttatctagatatcttcttttctactgtatgggatgaaaattgggatcaatgttgagggaattagaaatacaattggaccaatcctaaccatgtcttcatgcaaccaggcaaggtttccttgggtttgttgagtgtgtccagctggatgctcttccggcctgtgttgtggatcaatggggatgtaagtactttttactagttgttgtccagtgatttgataggctctcatgatcagtacgatgtggtgcttggaacaattatcgattgcctcttgctgggctctcatgatttccatctattgattgctccactctttgcattggcatctttgatctgtgaaagcaaaatttatagctgctcgagtattttagtgatcgtaatgaagattgttattatgcttttacattttccctagaggagcttgaaaattctgtaaatcagtgtcatcaatgattggcttttgagtatatgtagtagatggaattctagtactgtggtagtttgctcggtctaagtactggtggttctagtttctttcatgcccagagtgagcccagctagaggggtggtcattccatgtcctgttatttaagggctcgtcaaaggttgaggagtaatagggttcgaaacaggcatgactagatctatgtgatttgtaggtgttttcacattaggatccgtagtcattagatcagtagtttcagtctgatttcccctctacatttgtacatccatcttgtgacctgaaaagacttataacaaagatttgtgtttctttgctctcaatgaaagcaccaaaatattgaccttgcttttagtcaacgacagtgagtaaaatgaaagtgattaagaataattaaatgacaataattggtaaagattaagtaaaaaaaaacaccaaaattgttatagaggtttgaccccttgatgatggtaatagcctattcctctttagtttgtattaattatgaatcgataagtaagaagaccttgatctctcttgaaagctcttacaatgatctctgagtgtttcactcttgaatctataattctttggtaagatttctctcatgtgtttttatgtgaattttgtgtccctgaataatgagatgactctcttatttatagggaagcattacagtgaattggtttcccaaaactaataagaaataaaatgggaaactaattactttttataattacaataagataaatgggaaacttaaattggtttcctttcttccttgctaatgcgaatctatcacatgaatttagggatattttcgtgacatgcaagctaaaaaatatgtgagacatatcttctgaaattatcatctcgcatgctctggtcagtgtattcgagctgcatgtgtgatggaagctggttcggatatttcagcttctgctgagtttgagtatcaaatcactctatatgggccattacaagtagaataattcacccaagttgtaggattctgtccatgtgtcacccaaaaggatgtcacgtcatcttgtacataaattaggataacacatggtagagcttttgggtcccacccctaaggttgactgcaggttccttcccctttgcaaggttcatggcctagagtaattggacttgtgagggaatcccatggaggagattggttacttgaattgttccgattcctctaagaaggattgcagttggtcatattaacggcaggttataagcctgtaggtccacattctcgagtctaagtccttttagatactcgcttgtagattgtttctctgacaggtgacttctccacataaagtggatggcccattggtctgtgttcctgagtttgagtcctcttagatgctcgctcatagtttgcttcccttaggggatccttaatgcctcttgcacgctgagtagtggcatgactaccgagaaaggtagaagtacctcacgcattaaggatttccctttgaatgcttgttcccacatggctagttggcagacgtgggttgtctctaactctaacaaagtgactttagggggagccgttctatagctggagtaataagcttctagaatttgttgagcaagtttagctcttctttcctcttgtttaagatgttctgcttcaacatttctccagtgttctgtgaactaggtttcaaactattcatgctacttgtcgagagattctcgtaactagtgttgcaagttagcaactgattggctaagttgttcaacctgagggttgacatcctcagggtcttctagctccgcgtgaggcttatcaggtggaacttggttattgcatcagtaccagtagttgtttatggtcttgggggtcgagctgtggaaccaattctaaggccttcacttagcatctaagatgtagatgtcatctcgacatatacccagcagttggcgtgtccccagtaggaagaccagtgttgatacttctttcaacactcgttgatctcgtggcaacaatcttattttggatcttgagttgtggctcttaataaaagcacaaaaatgttgatgcagaaagctggccaacacccactcaatagattggtgagatgaaatatgagataagtatttaataagagacacacaagatatatagtagttcactccctatgtcgcgacaataatagagctacgtcgactttgagtatttatttctcatgagaattacaagagaattgtctaaataaagagctcaggtttctagagagataaactagagatagatgctcttaccttgtagggacttttatgaatgtgaaaaatgatctaatggagctctccttttataagcaaggaaatctattaaaataataattaaataatgcaagagatatgagaatatcattttgggctaatctttatcgttcatgattctctaatggcaaaaattgactctagatgataatcgccaattttcgaagctcaaattgtgtccgttagatcaattttgtgtaatctaaaaaaattgcactcgtcctggagataaaattttgacttgaaatcttcacaattacgatagtgagacatgacttacaagaacttttaaattcaactagaactgcttcaatcggatcaatattgagtgagttatggttggtttactaaaggcagatcagcaaccgatgcataggctggcattctgatgtcaacctggacgttgtataagtgggaaaacattccaaacttgtatttttttttatgccttagcaatatattgagattacttattcaattttttttcattatggtggagttgttcaacagttctcagagatgtcactttttcataaaatcgggtagaatcgaaacttcccaatttgcgactaattttttgatattccactttgtcaaaaaggtgaaatattaaagtgtgaatttgacttgtcataagttgtagcttcgcttactatggaaaaatagtcagatgctcgagatggaacatgaattcataagaagaacccagtgcaccaagctatacatcaacttgggcgttaggtgctcttcaaatggcttcttggggcttgtcttaatacttctatggaatttgatattgcaaacaaggtatcttaccctattttgaccaaaaaaagaatctccatagcagaatttgtgtttgatgagtggaaatatgtgaaccaagttgtatgtcaacttgggcatagttcccaacccccatgtcaacatgggcgttggcgcactattttggcccttaaatgatctcgtgtggcccttaaattagctatgtattagttagaaatgaggaatgatggatgctaggtattattttggtattttattgacttattaaatctatctatttggtgattacataactgtggggatattattgttcttttatattgatgagtgatcctaattttgttactaatattttcttattaatataggagttaa

SEQ ID NO: 298471 - DNA, 4547 bp, Cannabis indica
aaattatttacttttttaatttatcattgtttttcggacttaatttagtccattatttttttcttgtcgtactgtatcatgtttaagcacgtatttttttgtatcaaattgtacatgtttaagcacgtatttttcgtattaaattgtgcattaaattgtgctcgtacaaatttcgtaccatatcaaaaatccaactcacatttacagcactaagacttagtgatgaaaatagatacttaacattaagattggacatttaatcctaatataattaataattagatttaaaaacttatgatccaatccaactagaatttaactttttaacattacaatcaaatataattataattaaatatttaattttttataattagataagataaaattaaattaatttaatttaattaaatattgtccaccccactacttaattattattatttattgtggcttaagcccacaaattcaatgattaaccaataagacggcccaatccagagcccacatgtcaaaattgagcagaccattccatctacatgttggaagttagaaattacaggatttgtaatcacagttttgggaaaagatattaatcttcaaatgcaaaaaagtaagctataaaattcattcttagttgagccaatctaacatcacattggtaatttgttgcatatatagaaaattacaaattaaaaccaacaaaaaaattgcttagctagattgaaatgctttataccttttttattctcatgatctaatcacaattgaagatttattctctcagacattttcatgatatcggaataaatccggtcccctccaatatctcggccgctcgccccagcggcaaccctcaaaacatcttcaatcaaagcaacatttcccataatatcgacatgtgcaccgctctccaaacccctcccctgcagcaggctcgatggagctttgtgtcggtactctcttaggtaagtagcactacccgacgggttaaatctcgtctttcctcgccacccttttgcacacatgaagcctgcactcaaaaccgggacactctcatcgccatccacaaagtatacaccgctctttaggcaactgttgtctccttggccattcaccgagctatctattcgaaatggaatactcttgcatttgctagaaggagacattttgtatatgtatgatctttctgtagggattccaacaccatagagagagtatatctccatatcaggagcattaggtagcctgtaaatattgagttcaaaatcgtatcgaaaaaaaattaattaatttgtgtgttctgtcccacattgctcgtgtatgagtgatttgtgaggtttatattacacttagcagctaccaaagaaaaacggtttatgctcgatagctatatatgtaaacttacttggtttcaagtggatttgaccaatacttgtaatgtgagtatttaggatcatctagattatcagctattccatgagagaagtgagcctcggcccgttgcatcaatttcggggccacaaatcgcagtaaatcaaaggtgttttgagctgtataggccttgttttcggctacttttatgatgttttctctgcttacttcatcatattccgtccaaacctcaccgctacacgataaattaagcccggaagaagatcgcattccgagaagttcctgccactaaattttttagaatcatgcttataaagaagagagttttactaaaatagttagttacgaaaacaacatagtaaaatgtaaccttttgtaaataaaaatttcattttttttggtaaattatgaaaaaatccctataaagaatgatcaattagtatgtaccttcaaatcaggaggaggaagatgagaagaaggaatctgtgaagctgcctttccgaaagagattactcttccatacttaatgggatctttgattcgaaaaccgatatctccatcactgtgattgaaattagtagtgtcacttgaagagagttttctcttatccaaatcacaactaagtccttcctcaggagaccaatctaaattaccccaaatagtatctccaccttttggcaataacgaaatggtggaatcccaagttcgagaaactcgcatgagatgctcgagcgtttgaagaccgagcatgtcagaatccaaaagccccggggcaatagccctgagaaaagcaacatcttttccctcggcagaaaagatgttacttacagccttaggaactccaagaaaagccggaccgatattcatgaccgctttaatgtgcttagcacaccaattcgggccaccaccacctcccataggggaaggtgattcaacccatttcatgaaatgaaggaaataaatgacccccatagaatgaggaactactaccactttcttatagccattggttacatacatgagctcaattttactcttcaatctacttaaagcttgatctctaatctgtataattaacattcactaatttaattaaacaatcttatgtattaagaaagataaaaacagatttatatactaacctctgtattttggaaagataatctccaatcataggcagccatgtacatgttttttccttcataaccaattttggctaaattctcaataagaactgcccaaacaaagtaaccaggagcaaaataatcagctgcaacaagtcctggaactgctcgaactcgaatcccgggcgggtcaagccctgtttcgttgtgtagagataagtgctccaaccaacacaaaggcctataaaatttccaacacattccacaaaagggttcaaaaattaagtctttacaaactgttactttcagtcaaatcaacatttgtatcacactagattaatgtttcatactttcattctaaattgtaactcgttctagtaaaactaccaatatacaatcatcttcaagtaaaatttgtataaagaaaaaaaatccaaactttttgaagatttcagtgaaagttcttccctaaactgtaatttccaccccaaaatgcaaaatggtacaaaaattcagtcctaattgtaaccaaaaaagagtcctaagactataatactaccaccccattaaaggttcaaactttcattctaaattgtaactcattatactaaaactaccaatatacactcattatcaactaaaatttgtacaaaaatttcagtactaaattgtaactaaaaaagggcaaacctcttgaagatttcagtgaaactgccaccccaaagtctcttcctaaaaagtccctcggaacaaggtctaccttcccaaagctcaaggccaccagtgacaataccagggaccaaaacaacaggatgaagaggtgtcaagccctctcttttgagcctctcccctggtgattcaggtacctgaaaaccagtcattgtaggtggcaaacaatggaagagaaacaacagaagccaccaagtggtacacatatacccaattaaccaacaacaattatctatacacctccattcctttggttgcttcttcttcttcttgttattattactcctcctcttcttctcatcatcatttaaaacgacaccgttttcatctttttgggctgttgttgttgtagcaccagaagaagattgaaaccccaaaactggctcaacaaaacataacttcctgaatctaagaacagaagaagccatagttacccaaaaagagtcaaactttacacaaattgagaagaacaagagcaacccatcaagccaaaaataacacaaagatgaagcgttacaaagaaaaagaccacgtggtgaaaaagaagaagaagaagaagagtatagtgtaaagaatcatcacaatcaagaaaaagagaaagagagagaaggagatagcaaagccagttaaggctagctttcttttctttctaagtgtggtgtggtgtggtgttaaattcaagtagtgtagcagtggttgggtcacacctagctaaggttttggttcagtgaaacgacacttgtctatggtgcttacatgcaaagttttgatttttatgtatatatttatatttatatatatatggtaattggtatatcaccgtttctgattttggtgcagagagagagagaaagtctgaatttttattttatttttttgtttccaaaatgtatggtttcgattttggagtggagtgagttctttgatcatcacgtggaacattaaaccttttacatttctttcattaaaaacctctgtgtcttaatccccgtaaaccaggggtgtcacaaaagaggaagttacccatttttctcttaaattaaaaaaaatatggaaaattctacctgcacctccttaaaatagatatattgatgcactcttatctgttttagtatccgaaataattttttagtcaaattttttctcatgtcatgtacgttatagctatttaagacatcctgcaaaattttaagaaattcggaaaagtttaacacgctaaaaattatgtttaaacagtgtgttgcacgcttgactattttattttatacgcgtgtaaaatagactgtttgaacattgttt

SEQ ID NO: 298472 - DNA, 1106 bp, Cannabis indica
gtctaggtccggggtcggattcgggttcaagtcagaagtcaggttcagcgccagggccgtggaaaggggatttgggtccggttctggtcgtaatccaaaaaattgataaacaaaaaaaactgtttaaaaaaatattgaaagtgatttttttttgtttttaaaattttgatttctaattataaaattgaaaagtaaaaacagttttatagaacatgtttttgaaaaatattttcacttttccacttttaaaaacagaaaactcattaaaaaagtgttaccaaacgccacctaagcgtgtgagaaaaatagtcaacacgagaaaataaagaaattataatatttgaattagatttttagtggggttattttcttgaagaattatcattgaatgactttgtaatattatttttgttgatagtggattggaaaatattgttgtaagtcaatttcaaatagagttacgtaaattttggtgttgattttgaacttttcattcttttttttaagccaaaattgtgcaatagaattttttttcttttgaataaaattctaatcctttaaatatatatgatattggggtcttttgaaaagcttttgagtaattttgttgagagtttaatgatatgtttagtatgtgtgtaatggtaaaatttttagaactcttaatactcttagcttaaaataagatttttcatcactacattaaatattatttgttatatatattttttttttaatattttatctatatactgataatttttatttaagagtttgggaacccgaagcgcacgcctaatttacttaactttatgatcggcccttatgggataagaaatggaaataaataatgaatttacctacactaatttaagattaacaatctcttaagattgaagaaattatgatcacttctatttattcttaaattataaattatgatatttgctctcattttacttttttttttttttttttaatttagggtgtgtttgaaagtttttgtataattattaagtcaactaataattatactataatttaaaatagtgttcgaatatgttagtaaaataattagtaattatatagaaaaataataatttttt

SEQ ID NO: 298473 - DNA, 9232 bp, Cannabis indica
gcggtttgagaaattaaaaaaatcacatgtgtgtattagtttaaaaaataaccgaaaaccgcaccacccagatggcgaatacccctacctacctagcaatccctttagttatgaaggagattgaataaagtatttcaatagccgttttaatttgggcttgtatccaaacagtccggattgatgactccacccgtcaatcagtaaactgtaatttcattaagatattactttttttttctttcgttctttcttcttttggttttctaaataaaaggacctgttttagttaaacaaccaagaacaaaaaccctagtacttttacacatatatatacccacgccctgcccttctctcttggcttctctccacatagcttttctccctgcgtctaaacccaaaccctggccatttctctccagtttggcgagggtttagattcggtttattgttgatcagtgttttggatcatttgttgtttcaatttcgagttttgactcctctagagttgggatatggatcttcaaagtctttctattgtgcttcaggccgctcttagccccaatcccgatgaacggaaagccgccgaacagagcctcaatcaggtgcttagcctttttattttatctggtttcttctattttttctcgtgcccaccatatgggttttagcctgaacttgatgtagtgattgttttgtagattctgaattttgaattgagatgctttgttaattatgggtgtttgatacttctacttgtatatttttgttggtttttttattattctttttccctgccgagattgaaagagatggttagtttgtgtgcgcgcgctagctcgccttggtaacgtgaaagaagatgcagtttaatggttttatgttgtttatgtgaatagattacttttgtttcctaatagcttaattggatctttggtatttgggtaatatggaagagtttgaaagcaatattttttaatgcctagattgtttgcattcgagggaatactcttaagttgctgatccttatgaattttaatatttgttggtactaatagctttattgggattgtttttcctaatggtattgatgtttactgtccttgcagtttcagtacacgccacagcatttggtgagattgttgcagattattgtggacaataattgtgacatggctgtacggcaagtggccagcattcatttcaagaacttcattgctaagaactggtcgccccttgaaccaggtacattgttattttgtgttgtttaggtagtttccttattttaaagtattcatttgttcatcacttatctgttgatgcagacgagccccagaaaatttcactagaggataaagaattggtgagggttcacattcttgaatttgttgcaaaagttcccccattgttaaggtgatttttcactattactgattttctgttgtttcattcattatggttagtttgttttcctattaatgtccagtacataatacatattacatttgcatgggcatcttttagtgtggttcgttcttatcatttatgctttacttatggtaatggcttgttgtacagagttcagcttggcgagtgcctaaagacaattgtccatgctgattaccctgagcagtggccccgccttttggactgggtgaaggtcaatttattacaagatgactctcaagtctacgcatctttatttgtcttgaggatcctatcaaggaaatacgagtaagttgttgatttttatctgtttattattacttttccaaattatctagtaacttacatagcactttcattagctctctgtttgacaccaagttttagtattagtgtaaaattttagtgttgcagtgggtatttcatataaaacctatcagctatgactatgtaccaacagaagttgagtagcgaatataatgtttatattgtataaatcaatatgatgttattcctgcttaagcttttattgtgatatcaattcttctatgcaacaggagtaaacctgtaaaaattattttattgttcatatatcatttcccgcagatttctttgtttactttttgaaacattgggtaatgtattagtacatagattatcaaggggaagtatttcatacttttgaatatgtgagaatgaaatacatttcgtatattatttcagatcctgtatatttttgcccttaactaataaattatgtcaataggttttctattcttctggcaaccattgtcttttgaacctgtgttgtggaccctagtgccctatcagacaaatattttttactggataggtgaaaattgggatgaaggattaatcgactcaagcattacaagcaaaagctttttatttaattaacactaacatttgaaaaaagtgtgttgtgtagttgttgttagtaatctgattgttgatggtcaatgttgcattaaataaatccttatttttctgatttggaatcttttcatttaaaatccttttgatctatttatatatattatttttattttaaaatttcttatattcttaggttcaagtctgatgaggagagggtacctgtccatcatattgttgaagaaacgtttcccagtctgcttaatatcttcaacaagcttgtccagattgtcaatccaccagtggatgtagcagattttatcaagcttatctgcaaaatattttggtcttctatatatgtgcgtgttttgctttaatagcttgtcttgtgtctttctagaaggttatattgagaaaagttaattttaaagtgcctacttgtccatttctaattaaagggcaagaagaaacaattatgccactagttatctcatattttactttctagtaaaaggcacctgctatgtaatactaataacatacataatcatttgactgaagattttcatattcatatgtcactattaagagtaacgtatgtgtttacatatggttctttggtggtgccaggagtagaactcttaaaacgtgcatgttcttttgtattttgtttgaggcatagtatttttaggtggtgccattagtagaactcttaaaacgtgcatgttcttttgtattttgtttgaggcatagtatttttaggtggtgccaagtactagaactcttaaaatgccattaatcaggcgtagtttttttactcatatcttttaaataacgattcacattatttatttttgtgatattcatactgatatatacatcttcttttctagttggagattccaaagcagctatttgatccaaatgtgttcaatgcgtggatggttttgttcttgaatgttttggagagacccgtccctgtggatggtcagcccgtagaccctgacctcagaaaaacatggggttggtggaaggtgaagaaatggactgttcacattttaaacaggctgttcaccaggtaatgttttgggtctggtacaaattgaaattaggacctagccttgaatcaggaggattaattctttgcaacccatttttacataaaaaactactttcaggtttggagatttgaaactgcataatccagagaatagagcctttgctcaaatgttccagaaaacttatgcagggaagattttggagtgtcatttaagtctgttgggggtggtacgtgttggtggttatttacctgacagagttaccaacctaattcttcaatatttaagcaacaggtagtgtaactttatattctgtagattaaatcctttgtgttaatttattttgaattgtttatggattcatgtggttgtagtcttttggataagtttcatttatggaaacttagaggagagaattggaccatttcgaaaagtttcatgattctgtcatttttattgtcactaattttgagtacaacatcttcagcagtgattttatttatttatttattttattgttcaaggaaatcaattgactctattttggataactcatatatttgaaccacagaaggcttaaaagtgaaataaattctctctaggcactacttctagcacatctttgtggtttcagtactctacttctgactgtctaaaattgctattgtggtgttgtggtgttgtagttgtagtttgtagatttttatgctagaaatatttatgagtaataagcaaattgtctgcacaaaagtagtcccctctctctaaacatgcttttattctacaaacatgcagtatctcgaagctaagtatgtatactcttctgcaacctcgacttgaggtcattctttttgagatagtattccctcttatgtgcttcaatgacaatgatcagaagctttgggaagaggatcctcatgagtatgttagaaaaggatacggtaagtgtctgaatagtttattttttaaagtttgattaagcttatcatttttcatcaatatatgtgtgtgtattaatatatattattattatcttctttgcttccctgtagatattattgaagacttgtatagtccaaggactgcttccatggactttgtcagcgagttagttaggaaacgtggagataatcttccaaagtttatccagtttatagttgaaatttttaagaggtacttttcaattctgtccttagccaaatttgaacatattattatcgattctgttagggttttgacttttcattcactgagcaggtatgacgaagcaccggcagaacacaagccctatcgacaaaaagatggtgcccttcttgctattggagctctctgtgacaaattgcagcaaactgaaccatacaaatcagaacttgagcgtatgttggtgcagcatgtattccctgaatttagcagtccagttggtcatcttagggccaaggtttgtttctttcaatttttcttttgtatccttgctgtcactatttacttaagttgattcttaaatggaggcagtattccactgatgacataatggactttgtttattattattattaaaaattattttagacggttttgttttttaatcaggagtttagttacatattattctgaactttattgtatatgtcaggctgcttgggttgcgggacaatacgctcatattaatttctcagaccagaataatttccggaaagcactgcagagtgttgtgtctgggatgcgagatccagaacttcccgttcgtgtcgattctgtttttgctttgcgctcttttgttgaagcttgcaaaggcgagtatctgtctgctgttccttcactctgtctgcacatatatgtatatataaatatcgtcttaacacttgtacgttgttgtgatttttcaatatgcagatttgaatgaaatacgcccaatccttcctcaattgcttgatggtatgtggtttataacttctactattagagtttgtcaaaatcatgcaactgactgagtttgcttattgttgtcccagagttttttaaacttatgaatgaggttgagaatgaggatctagtgtttacgttggagacaatagtggataagtttggggaggagatggcaccttatgcccttgggttgtgccaaaacttggtaatatatgcatcattcattttagatacaactatactggagtatgtacttttatatattaaaaaaggaaaaaaaaagttgaaacattgtaattccttgtttgtaggcttctgcattttggaggtgtatgaatacagctgaaaccgaagaagacgctgatgattctggtgctttagctgctgtaggatgtttgcgtgctataagcacaattcttgaatcagtcagcaggcttcctcatcttttcgtacaagttgagccaactttgcttcctataatgcgtagaatgttgacaactgatggtcaaggtgtgtgtctgtgatattgctttcttcaatgctattttattgacctcatcgtctctattcttctttctttcctgccacttgctttgaagggaaatagaccatttgtgactttatgttgctcaatgcaagtattgtaaaatttgcagaaatgctacacatggtttctttagaagggttgactgcaaaatagaattaaaactattatgaaagatgatattttttctttgatcatgcgatcattcatcttgtagtacgcaatccaaggataataaggcatcattgggttgaaatcggcaactgatgatgctttacaattttgacaatcttgatgcattaatacttgaaactggtatactactttgagtttattatttatgatcaaaataacatagtgatctggtttagcaataggatttgtaggtgtttaatcatgtctataatgtctaggcagtgctcactttattgactcttctttttttgttcttttttttgactaatatagttgtcctgatcaattactgcagaggtttttgaagaagttttggagattgtgtcatacatgacatttttctctcctacaatatctcttgatatgtggagtctttggccattgatgatggaagcattgaatgattgggctattgatttcttccctagtaagtatttgtgttttatctattatattgcttgtagggacacttttccttcttcctttcatgcaactatgttttaggtgatgcccatttgaagagtgttatatttcatatctacaacttttatgtcatatctaccacctatttaggataactttttagtttccgtccgtaggattgttattcatactttttagtaacaagagacttgtttggcactttgtttaggaagaaaacaataggtttggctcttcgtttagatataaacaatagtatctttcaggatacttacttggattgagtgtgttttattttggctgtccgtgggaatttttagaactaaggatttcattgtgttctctttttccgattagaacctttggtataattttagattttattatcattttcgttgtagtatgatatcttatcatctgctgtaaacctttcagtttttcccttctaatatatcctagatttcttgtagaaaaatggtagtggattaaaatattatcttggcaatgcacatctgaaatttgtggttcacaggctttagcttgttcaataacttgtatccagctttatgttttatgatatgtataatattctccccttctttctcgtatcgaaccatctgttatgaacttgtatatgtaaggatgaaatgtcatgcttaagatgtttgttagatgcaaagtcaaattaggggaagtaagtaatgcagctgatggtagcgacctgaagttttatttgttatatttctccttcatgagtcatgacaatgtttgtgtgttatatttgtgcagacattttggttcctttggacaactacatatccaggggaactgcacatttcctcgcttgtaaagagccagactaccaagcaaagtctatggaaaatgatttcatatgtgagttcacttagtcataccttggtatcctattctgttgtaccgtgataaacactgttccaacttttgttgtatgctaaaaatccctcaaagaaattttgtctctttctatgtttacagctcatggcagatacaaacatggaagatagtgacattgagccagctccaaagctcattcaagtagtttttcagaattgtagggggcaggttgatcaatgggttgagccatatctgagaatcacagtcgagcgtttgcgtcgatctgaaaagtcctacttgaagtgtctcttaattcaagtggtaattatgttttgatgttaatggatacctatattaatgatgcccgctcatcaaattccaaagtaataaaaatggaaacaaaagcaatagtatgggtggtgactgatgtgctatgatcaatgtgtgtttcttttttctgtacttaatagacttaaaatactgatcagtcatccacccatccatagaatttgaaatagttgtcaggctatagcttatcaacgctataagtatgtggtgacatcctcctgtggcatttgtggctggtgcttttctttttttgctttcttacaattgcttgacatgcagtggtgattgtaataatcttgttcttttgatccagattgctgatgctctttactacaatgcggcattgaccctcagcatattgcagaagtttggcattgctacagaaatctttggtctttggttgcaaatgcttcaacaagttaaaaaaagtggtgtgcgagctaactttaggaggtatttggctatatgcactacattcatttcctttatctgcacctcattatgctttgtttaaaatatattaagtgtgtataaattttcctgttttagggaacacgataagaaagtttgctgcttaggattgacatcactattggcacttccggtggatcaattatcagtggatgcgttggagcgagtttttaaggcaacccttgatcttctaattgcatacaaagaacaagttgcaggtgcctctctctctctctctcgttatttattttaattggattctcctgcttatgaaggcagcaaacttacgcatattaggcataccatgagcaatcaaattcgagacatcctgccagtgttagtgtatattatgtattattgttgttaattgttagtttgacatggaagctacattttctactttatggatagcagaagctgccaaggaagaagaagatgctgaagatgatgatgatatggatggttttcaaagtgatgatgaagatgaagatgttgatggttctgacaaggaaatgggcttcgatggtgaggatggagaggaagctgatagtgtaaaactacaaaaattagctgctcgggtatgtaactgtattatcagttttaccttgattctctgatgtttattttccttgtatcaatcaaaacttgataccagttgaagtaaggtaagataattataaaagtaatgtccaataatcaaagagacaaacgtagaaccccaatcaaacatacataccatgcacttctctgcactcttcattgtatcagaatgatatctgcagcctacttctagaggaaggaaaagtttcttattttgatatagggtatgttttttctattattatcttatctgaaaatcatcgagggaaggaaaatgttccttggagcatctccattgggggttgcctattggagtggtcttgccacatatgcaatgtggtccaatttttaagagtaattttatgtgaagtgttgctcaatatagacaatggttacatgtctttttttttaatttttatttattaaaaaaattattttt

SEQ ID NO: 298474 - DNA, 1207 bp, Cannabis indica
aggtcaactgtgcaggtattatatttttagttgtatagttatttattattttatatattatttttacttgaatgtattcaaagacaccacaagatgcatctaactttttaattaaaaaaatatttaatttgagtgttattaaatataataattataaaatttattattaattattaattttagtttcaacgaaaattactttttaatttttttaaaatattatattatttttttttattttttaaataataatttaaatatatatgataatagaaagattattttttacatatgtacaatgagtttaaattgtacatatgtaaaaaatatcccaaaatgtagacacgcttttattacaattcaattttaaatcactacatatatatatatatatatatataaattcaatatttgagggattcttaaagcatgtctgaggatatcttgggatagtgcaagttactaaaatgattatgtgattagtcatggtgaagtttaatgatgaagcctctcgtgatcaagtactggaggtaggggtccttcaattcgacaggaaactggtaatgtaaggccctggacgactcacctgaaggctgttaagatgattcactcggtgacattatggatcagaatatattacgacttaggcctccaatatttggagaataggagtctgagtgctttggtcagtacaataggaaaacctattatagttgatcaacataccaaggagcgtacaaggatacaatttgctagagtccttgttgagatggaaatcacagatgaccctcctcgattcatacgtttcttaaatgaacatgttcagttaatggagcaaaatattgactataaatggttgccagtcaaatgcaaaagttgctctaattacggacatactatggctgaatgtcagaaatgtgagaataagaaggaagaaggtgaaggcttgaaaaaagcagaaattaaagagaaaaaaaccagcaactgctaatgctcaagagaagaaactagcagagaacaaacgacaacagagtaaagattggattattccaaagaaaacattccttgtgaaataagataggggtctttctctacttaatcatggatagttgtaatgtagcttgttggaatgtgatgttggaaattattttaccaggatcttagatctactcacaagtatgttgattaataccctaaatatgaactt

SEQ ID NO: 298475 - DNA, 1423 bp, Cannabis indica
cctttattagtttaattgcttctcctttcactgtttttattgtttttctagttttaatctcctcttaatttttatatagacaaatagaagtaatgatttaattttaaagtacttaactacaatcctcgtgggatcgacctcactcttgatgagtttactacttgttacgatacatacactggtgtgtgcaaaaataccacaacataaggagactttacgtgcgcctactaggtctatttttaaaaagaatccctctgagctctcgaactcagttcccttggaggagatgtggcctcaggtgatctcttcacctcaaggtctgcaagaggttgtagaccaattcctgtccattggctccactttagtgactagtgtggctggtcatgtccatcatgtgtctctggtagtgtctttgacaacacttgtgccatgtctcaggctcaagttcctaccgttggtactactatcattacctctatccttcctaatgtccccatcttggtctcctttgttattactcacattgataaagagaaaggcattatgggcaagattgtcctagattcagggcccttgctggccctagacctttgattggtggtattagcattggacgtaccagtcaatctcacattaatactattgtgggtgttaaaaggtcatttgctaggcagaatgttcttgtgggtgctttcatgaaaagtatgctgaaacatgctagggttatttacgataataatgaagctgtggttcctgctatttctcttcagagtgaataggcaggtgttgcttagcaaccctgccaagaaaaatgagtctcttgagttggaatgtctgaggtttggggagtcctcaggcattttgaaatatctccattttttgtgaaacaacattagcctccttttcttttcatcatggaaagcaagttgtagtcttgtttggatagtaatgttaggatcaagctatcttttgatagtgttttttatatccctatgactggttcaggggaggtttacctcttttttggatgaatgtaattaatttgaatgttttatcttactctactaatcatattgaattctttgtatcttttgattataatattaaatggcatgttacttgttttcatggctctccttatgtttctactaaatctgatacttggactcttcttagtcgtctttataatggttctcatttagttccttggatgataattagggactttaatgattacctctctgttcatgataggaatagttccaataattccgcttcatgtgccatgattaattttcaatcgttttttaataaatatagcttgtttcctttaccccatataggaagtagattcacttggaagcatggttaccttttgtagcgtctcgattggtgtactgttaacaaattctggtctgaggct

SEQ ID NO: 298476 - DNA, 2733 bp, Cannabis indica
tttcaacttcatttaagagatccttactggcacctcttaatagaacagtacaagctttcggatctttgcaatcaataatagaggcaaaaaactcatcccctatcttcttaacctcgaacaacccagctcctgtaccaacatcagactcttgtagttcatctactctgttgacaatgacagcaccacaggccttggctattctattattgtctgtcttcctcaacctcctaattgcactgataccagctttgctaagataatgacatgccaagtcactaaggcccttctctgtgattaccaagtctggtttgaacttaattatctgtgcacaaaggttctcaatatattcttcttccattttcaacaggactccccaatcctcttcattgactagttcagcatttgtttggttctctccttttttgtattcaaggggagaatcaagaagtacgatgcgagggttaacaatctttctcctcattttgccaggggcaacaacatctttgttgaacataacccccctaagaactttggaatcttccaactgcccaccaggtatcttctcaaccttaatgtacttcttgatatcgacttccctcagcccttggccaagatcaacacccacagtggtggtagcatcaattgccaaatcctatgacaaataaatagctcaagattaagaaaaaaaaaaaaaaaaaaatgtgtgggtgtccatttgccaaaatacgtatacacccaacctcaaaaaatctccttccctcttcgaacaccaaaatatgagaagagaattaaagtattttcgttaactaaaaaaaagcacataagatacttacagcaatcagatctccaaactggctagtgaattttgtacctatacagctcttaaccagccccaacattgttgcgcctgataaatatttccatgaattatttatgtaaccatacacaatcagataaagatatccccaattaaaaggaaagtatcttaagaaatgaagagttcaagaaacatacggtcctgtgtatcaatgggcatagctattttgtcaagcacatcaatagcatcctctagagctttattgtaagctgaaaatcaattaaaacatgtgttctagataattaacataatgaatctcaagcaataatttttagcaaataccttttatatagcattacctctgcagataactgtaggatgaaaatgtttgtcaataaatgcttctgcaacatggagcatttcaccagctacagtaaaattttaaatccagaactcagtgacagaagaaatatgacatatttttgcgtacaatattgaccatacaggcatcaacaaacaacaagagtgggacacatcagtacttcaaaattgtgaccatttttcacattaaccatggttgtagagattacagtattgtgattctcagctaagtttgagcagcaattactgaagtaagatctgaactttcacccactcaagatagaaacattaactcaacctattcccattgtacactcacaacttaccaagaacaataacagatgttgttccatcccctacttcttcgtcttgagtacgacttagctcgatcatagactgccagcaacaaaataaaggcaatgctcatcaggggtagaagaaaaccaaaatgaaaaatagttatgtagtgaaatggggcaaaacatatgttgtataattgtatattgtacctttgcagctgggtgggcaaggtccaattcacgaagaatggcatttccatcgttagtcaccacgatacctgtaaccaatgcggatacatagagctcactatataaggctactgaaacaaattacaatcaagcttcccagacaagtaaaaaaactcaaaaataatacaataattaataaatatatatcaaacaagtactgaatatataaatcatcatccatgaaaatgattttacctccagcagcatctagcagcattttcaacatggatctgggacccaaagttgtacgtataatgtcagcaacagcctaacaagatttgaaatgggtttatattggtaccattaaaaattagagagaaaacaagcacgcaaactatacaataccttggaagcttggatgttggcatgttgcactttgcttccagattctctcttgagagaatcctctgctcatcaaaattgagaatgtatgaggctaatcaatttcatttcactataaacaaaatcatctcatttaagaaaaaaaaaatcaagagcatagagaaacttacttagaacaagaactggtgcgtgcatttttttaggtctgagatttggcctcaaatgcaaatgaaagcgagagagactgataagaaatttagaccataaaggagaacagttagctattgggttcactcagagagtaaaagatcagagagtgagaatgagaataccctgtataactgtaccttttgacgcgagaatgggatttgaggagttgtgcagagttgagagaacaaagatattagggttcgtatttttggaggggagggggtttaacattctccaattgaaaactcgtactgataagaagaccattttacccttcctagctttttccagattattcaaaattaaaataaataaataaataatcttatatgctaaaaaaaacattcaagcataggaaataaggtattaataagaatgctctttccttataccatggtttttttttttttaaaattaaactcttattaacaagaa

SEQ ID NO: 298477 - DNA, 5365 bp, Cannabis indica
tttgctaatcattttcttaattctgggtattacaattaaccaccgcatgctttgaccggagttgaaccatggtagggaggcagcaactacccgctctccaaaccagattcttcatctttgggcatcttgaggttccaaactttcttccagaatttattcaccaaagactcctctaagtttacctcacctttaatttcctagatgagtttatacgcgcttttaacaatgtataaactagataattcaccacacaaaataagatgatcttgagctggtgtaatattgatagggatttgaagaatcagttctctatcacgtggataaaaaagatcattcaacacatccaaagcccattcaagcccatcaaatgtcattagattggcaagactcggatgcgaagaagtaaccaaaggatttcctttatttggtagccacgggtcacctatcacattgatacttttaccatccctaactttccaacgaacaacactagccacaaggttttgagccttaagaatactccgccaaacaaagcttgggttggagcctatagctattgtaagaaatgtgcatgtagggtaatatcaggctttaaaaacacgagccactaatgattcaggtttaaagattagctgccacccttgtttccccaacattgccagattaaactctcttaagttacgaaagcccatacctccctccgttttgtgattacaaagtcatttttacgacatccaatgaataccagtattattgcttgaagatgactgccaccaatacttggatataagactctccatatcacttgttacctcaagaggtaatagaaagacattaatggcataacttggaaccgattgagcaatagactttattacaacttcgttaccagcttgagatatgaacttagttccccaaccttgaagtcttttccgaactttctctttcaaaaacccaaggcggctgttttattacgccccattgaacttggaagacccaaatataggctccatccaacacagcaaccatacctaacaaacaacaaagctgatttctcattgtctcaacagtattggagctaaagaatatagaagacttagagtaattgaccttttgacctaaagccaattcaaacttgtggagagcttctttgatttgagtagcctctatttctgtagccttgcagtataaatagctatcatcagcgaataacatgtgagaaatcctcggagcaccattagcaactttacaaccatgaagccactctctttgttcatacttgcgaagcaatgaaaagagaccctcagcatagagaataaaaagatatgtgaaagaggatccccttagcggatccctattgagggagtaatcggtccaacttcatgatttccatgaagaaccttgtacctcaccgatgtaacacatttcaaaaccagtcaaacccagctttcgtagcatcgcttcaagaaaaggccattaactctatcgtatgccttgctcatatcgagcttgagatccatgtaaccttccttacatttgcgttttcttttaaagtaatgaagaatttcaaacgaaaccaaaacattattagaaattaaacgacctgagataaacgcactttgattttctgaaatgatggaatcaataaacggcttcatcctattaaccatggcctttgtgataatcttgtacatgacattacaaagggcaattggacgaagatcggacataagctctgaattctttttctttgggataagcatgacattggcctcactccaaccatcctccaaagtgcactaatcaaagaaataaagaacacattgcacaaacattgtgtcgcactatagagcaacaccattggtaaaaagttagggtcattccatttggacccgagcttttatcaggatgcatctaaaataaggctttcttgaattcttcttcatcaatgggttggcataattccatgttaacactgtcaggcactaccttattaacacaatcaatcacctcagtgcaacaagtgtttgcagaaacaaacaaaccatggaaatactcggacacaacatcacataatcctgattcccaaattacccaattttcgtgatcatccttcaactgctcaatctgattgttcttttttctactacttgttgccttatgaagtaactactgttttggtcaccttcgtgcaaccaaaattgttttgctctctatttccagtagctctctctctgatcaagggccttgaatagctttttcttgacctcattgtaacattgaaccgaggtcacatcccgttttccatggagaacctttaactcctttttgtactcttttatacggtgattaagcgtaccggttatctcttttccccactccttgagtttttcagcacacaaactcaacttatcaccaaagttattagcttgaccattttcccaacaatctttctatatgtcaatacataacggttccttcaaccaggtattttcaaagcgaaaacgaagatttggagaaaaattattacaaaccatgggtcaagataaataggcgaatggtttgaagttgaaaaatctaaatttaaaagagtagctgaaggaaagacatgcagccaagataaagtgaccagagctctatccaaacgaatttcaatcctgtgattcgtgcctcttcctttctcccacgtgaacggatgtccttgcaactctaaaccagtcaaaccacactgctttaaaacaccattaaagcccgtgagtagtcgctgtgggtatggtcgacccccctcttatcctcctatctgactatattgttcacgcctctgcttacacaccacgataactccgaacaagaaaaaagtacgaatcagattctatgtgtcccgccttctattatgatttggatccccgtatagacccgtaagtctccaattaccaaactgagttgagttaattacaaggtctatatgatgattagagtagcccaacaaaataccatcctctgtatttttccataaaagagcaagcccaccagccaaacccattgcatccacagtaaacgcaacctcaaagcccaaaagtctatcaaacccatcaacttttgctttttgatatttttgacatttgtcatgcatatctaaataaaccatacactttaattatttttgacagttgtccagccttgtggaagttgtaagctatccgatctaactcagccaggttgtaggctgtctgaccttgcacaggtagggtgctcaaccttctgtaggcaagctataggctatttgaccttgcgcaggtaggctacctgaccttttacagacaggctataggttgtccgacctactagtcatcctaccagggtcttgtcaatacttgtgtatctttatctttgtcaatcttaaatccattcagatgtgcttgttatcctcacttgttcccttataacagacacaaaatggagtacatgtctcaaatgttccttttttctggggtattcctcaattcataaaggaaatttatgtgaaaaaaagatggtcgactgtatatagctcaaaatgttgtgtttgatgagcactcatttcctgcgttgacttcaacacctccacaacaggtacactatctatcacatttacattttactactgcaactttttctacttctaagtgtcaacaatagcacactaatgctcattttatgcctgttgtttctaagaaaactataccctcacatttggccacttcacctaggaccaatcccattatatctaccattcctactccatccatatcccttcatatatctccatcttaacctcctgctactgtcacatcaccacaccaattgacctcagtttacaaccctcttcttcctaagttaattcactcccacactctcccctaatacagatacctatacctaatgtttcagagcatcctacctccactcaaccacaatttgtattacctcaaccctcccataaccagtctacataagagacaacattacctgtcccgggtacaagtaaacatggcatggaaacaaggtcacaaagtggcataacaaagccaaaattttacttggcaactaggtatcctttacttgaatctatcttgcatactgaaccaaaatctttcaatgcggcaatggctaaatcctcactagaatggtgctatgaacaaagaaatcattgcccttgtcaatgaaagacttgggatttagtgccttatgaaaaagatatgaatgtcagaggttgcaaatgggtacatagaataaagctcaactcagatggcactccaaacagctacaaatctatacttgtagccaaagggtacttacaaacagttggaattgcctttgaagagacatttggtcctggtgtaaaacccacaataatttgaattttgctgtcattagttgtctctaacaattaagatgttacacaacttgatgtcatgaatgctttcctcaatggtaacctgtttaaaactttattaatgagtcaaccaccagggtttgaagatgctacataccctaatcatgtctacaagttaaataaggccatatatggtctaaaataggctctaagggtctggaatgagaaacttagacaaactcttatctcatggggttttcaaagtttaagggctgaaattctctattcattttcggctctgattcctctctaataatcttactagtatatgttgatgttatacttgtaatagtccccaatcatgcaatgatatccaagcttatctctgatatcaacaagtctttttcactcatagacttaggacaggctcattattgtctaggggttgaaatttacaaagatagcactagtatgtatctctctcagaccaaatacattattgatcttctagtcaggctacacatggaaagtgctaagtcctctccaaaccccaccagtgcagcagcaaagctcccattacatgatggtgaaccttttgctgatataactttgtatcgaagtaccttggggcacttcaatacttgtcccttactagatctgatgtagcctttattgtaaacaaactcagtcaatttttacaagctcctactcacctacattgggaggcttgcaaaaggttactcaggtaccacaagggcattgtcaaggatggtatatgtgtaataccctagaattaagaaatggattagcaaaaccctaattagataactatgaataattgaggaattatattattatatagttcaatatatgagaattaatttgattaattacatggtaagaccccgttggcgagccaaggacattttagtaattatgacccgggaagggtaaattgatgaaattaatttaattacgtgcttaatagaa

SEQ ID NO: 298478 - DNA, 2020 bp, Cannabis indica
aaaataatttccaacacaaatcccatgtatgcttcatcatatctactgtagcaaatagctcttaaatgaccataatgtctgcaaacttgacaagtgggttttgggccattggatctaccaccttaacgtcttccagaggtgcttctaccaccacaagtgtaatttctcgaccacctcctccttgattctggtagtttcctcgacctgtattgttggtgcttgggtgatttgcaaagtttgcattgggtgaaataggggaacgagtaggtttagtactgctgttgaggcttagattttgaaggtgctccctcttgttttcaaaggcaagtagtatcccctgcaactttttccgggttattgatgaacgagcttcaatttgcagaacaatcgacagatactcaatatctaagtcagaggtgacactagatatgagttgattctcaagatatggttcccctaccaaagcaagagagtctgcccatgccttgttctgcttcaagtagtcttccatggaggttgagcccttgcgagtgatctgaattagagtacaagtatcatctattctagattttgaatgagctccatgtagattgtcgagagctttccataatgcgactgcatattcacaacccattacttcagttgcgattccttcaatcatcgagctatataaccagcccattaataattggtcactgacaattcaatgctcgaacactagactgatggtgatgacaccaaaaccaggttctccatcttttgtagttggagctcaagtgaattctacgagataaggttccatttacaaagccatcaatacaatgtcctcgtatcacagttgacactattgttttctagagaacatagctcttttggtcaagcttctaaggaaatggctagttcaacgtgttaaacgactgagtgtaattctgttgaggaacaaattaagactgttgagcttgcagcacttgctgcagctgtggtggtggtcagatgagtctgagagtgggacgatattgggcagacttttcaatgctctagataccaagttaaactttacacaattttgataaaatgattttctcagctcaatggaagctgagtgcttcatattctatttatactctaaaagaagaatacaagctctaatagaaatgtgtcaagtggccttaatattagtaaagaggagaccgacactaatcgaaaaatataaatctaaaaacgatgtaacaaactcattacaaccacaccaatgattacataattaacactatttaggaagagttatttcttaacacggtgtcagatgtattagacgttgattaaggtgatctggttagggagaccaaccaaacaataatagagagcttctggttgaggatgagaccgacagatgaaatttaacacaccaaccatatggaggttgatacacttttttgtggtacaaactaagtaaaaaatatcctttatttgtagttgatcttttgttatatgactttaatttgttattttaatcttgtaagcgtgtgtgaactacttatgaatcgcttagaggatgtagctaaggcccatactcatcttgtacagcctatatatgagcctataaagacaagtctcatgactttattatttatcaagcacacatttaagtgaaagaactcaactggcttaagttcatctgtttttttttttctttttttcagttcagttctgatttattattatggctttacatatttgtgattgaataaatctgtggtcaacatgcatcatgattatttactatatgtaatttcctagttaataaacatcaaatctataataataattaattattacttaaaattacaccaccatcacttctagttggagacgatttccaaacattggaattaattttgaatttgttaacagttagttttagtggaatatagaaattttgtagtgatgtatataaacaggggcggacccacattgtagtcgcctcccctgaaaaaaaaaatcgagaaaaaaatgtata

SEQ ID NO: 298479 - DNA, 4725 bp, Cannabis indica
gactattgaatgtacctatgtattatgtctttggttcttcaaatattttaaaaattctacgagtcctctaagaaaagcaatgaaaaatgtaaaaatgcattatagagagatttgacatttgttcctatcctatacagaaaacaaatgtacatgtctatgtgagcatactcatcatactttgggctcaagagacactagggtgcgaagatcattgatcccaatttctcttctatcctttgatccctgtcttccaaaagcttcttttgcaagtctcctcttacgttcttgtaattccagaattctttcttcgatgctgtttcgagaaattaacctcacaatcttcacatcctctgtttgtccaattctatggactcggtccatggcctgatcttcaactgctgggttccaccatggctccaagaagtaaactctagaagcagctgtaaggtttataccagttcctgaagcctttagacttgcaagcaagattgttggtccatcttttgagcttccaaattcttcaataactttagcccttctctttgcattcatagaaccgtctaatcgcaaagtcttgaaaccagcttcttctagtaggcttttcaagtaagatcaacatcttcctgaattgtgaaaatactactgactttgttgctgagttttgatctcttgatgccacaagaagtttcagaagagcagacacttttgaagacataaatggccttgaggaggatgaatcattatcagcatccgaagaagttggtggagcagaaaacaggtcagaagtagttgtaggacgtcgacaaagagggcaagaagacttggtgtgctttagagttttcaaaatacaagcatggcaaaagatatggccacaacgagtaatcaccatatcagttgggggtgtaatgcaaatcggacagtcaaaatcttcgccgtcttgcagtacctcaacaatcttttgaagcagctctgggttgttggatgcatctgctcagaaacaactgctgttagtttgtaatagtaggagcatgtgaacaatcacagcaaagaaacttgcatgaaatcatttgataattgaaatttcattcggttagagttaacattcacatttagttttgtaggcagagccctaaacttaagttgctaggtacctagacctcatgagagaaaaccgttagtcaaaccatctctcatggtagaactatgaacaaatgtagaccattcctactttttctagacaatgatagtacaatcaagtgactttcaatgttttcaaaagtatacagaaagcagtatagactaacagcagagattaattttgctgtggatgcatctacaccaaaattagtatctggtcatcaatacaaaaaagcttctgtttcttgtttccattcaactattttgtaagagttgaggttccaaagcagtgcaaagataagtgaaaatgttccataggacatcttaattgcctctagggaaagacaaataatgacacatcccaaacaaacaatggcagtcatacattgcccaatctggcaatacaacactgactgaaatgtggaaactgattttatgcatcaattcacagacatgataaattggctaaatgtaggacatagcatgtgatttagtttttttttctctagcatgacagacatgataatagtcatcatgtaaggcagtaagaactcttttctttttgtacagattattattatgtaaagtagataaaagaaatgcattaaaaatagttaggaattaaaacaatccacaagctgcgaaattctttaacaccacacaatgaatgtagcataaaaactcttaacaatcaaacatgaaaacagaaatgatacaggcacaccaaataaaatatataaatatacaatatattaatacaatacagtacagaagttagtggaatctggtgaagatgtaaagctgcataactaacaaaaagaaaattaagaaatgggcatacaataccttcaatattattagaaggagtcaaggatttaatatttgaagggcacaaggctagatcagtacagatttggcgaagtcgtagaatattactcagtacagtagtatagttgcacatgggaccaccagcatcaatataaccttgtaaaacattctttgctactttttccatctgatcatacacttcacgttcttctgtagaaagttcaagataacaaatctctaccgtttttgttggcaatcctattagtccattgtcttttgttcttctcaaggaaatggttgccattaaaacctgaaaccatttaaagttatttagaaacaacttgaattcaaaaacatttataaaggctaatgttttgttttattccatttctcaagtctcacaaaataaatactagggatcaattatgtttctctatttagtacttcaaccagtcaacaatgcaaccttcccaaagtcataaccaaaaataaaagtccttacacaggcacgtgctaaaagggttaacattcaacctggtcctaaaaagacaatacagcttaaaaatcagtcaaacagacttaactttaagtatgcatcttattgtctccaattcataatttcatgacacatcacgaaaaactatggtgatattcacttgtgatatgcgtgagaagagcagtccagtcctagaaaaagtatctttcatgtatgtgtacattaaacatgttgaactctgggtgagataatatgaagatggattatatacctgcagacgtgagagccccttttcgtttccctgagcaagtggtcgctggactaagctttgccagtaactcttgacagaaaatggctcaaaccgtaaaaatgccatcaaagaaaataaatcaaacgagtcattctgaataggagttccggtgacaacccacctccggttagccttcaagtcacaaacagccttactctgtaaagcattagagttcttaatcaagtgagcctcgtccaaaataaccctccaccagttaacttgcttagcagcagacttaggccaagaatgctcagtagccaatgtactatatgttgtcaaaacaatatcgtacttcttcagttcttcagcatcattagtcctatctccataatacatatataccttaaaacttccggtcatggtgtggtctcccaactgtgtgatccatgttgaaaaaacagaaggagggcatacaatcaacgttggtttacaacctgaagacttgtcaaatatcaaactggtggtgtccccaactttttgtttcttcttcgaccttgtagtttttttgctgggtcttcccctcttgcctttattaccgcccaaaacagaaacttcctgaccctcctcgccaacttcatcgagcttatcttcatttccaattgacaaaggaagactactactaacactgccactactggaatatttatcaaaagctatcaaagagagcaaagttagagtcttacccaatcccatatcgtctgcaaaaatcccacctcgcaaaggctccggtcgagaattggtttcgtaattcgttaacacattcacataacaaccatttttgtcttcccaaaaaggaggcaattcacgggaattttctctttgggccagccaccataacccttccttctggtgcaagaaaagctctgatttaatggcttcttttgggggctccaatacttgcaattgccccttcttgctcaaattcttatccaccaacttgaaaatcttatccaaactcttcatccccttcttaccctttttctcctcaaccaccatagcctcagagagtgtaaaagacacgtcgttatccgaaatcaactgcaaccccgatcgcaatattgcatctttcaaagcgggaaaggcttcaactttagcgaaaatatgaatttgacaaggaatcttgtacctgttagcggcagcttttcctttggggacaatgccttcgacagcgatagagttggaatcaatcaaaggcgccagtacggctgccacagctcgctcaatgtggccgacctgagccattcttgtgttgataactctaatggcgttggaatcgtaagggttgaggggttcccgaatgagaccaaccatttctcggccattaatagtgcccgagtagtacttcatcccaacaatgttggcgatgacaaaaccgagcatgtaggtttcggaggaagaagagagggactgagagagagtatcttgggaagaagaagaagaaaagacaaaatcatcttggtcggttgggaactctcgccactgatggagaagattgatgaacctcattgggccgtcgtcctccatggctcgtgtttgggtgtcgaagaaatagaaggcggtggggttgtggtgtgttccctcttctctacaattttgggtttttgaaggcggtaggacgctttcaaatttcctttgtgccttatttctcaagagatgtttacatatatgcggtatagtatagagagcacagctattgtttttcgtgtcttaaagatttgtgattgtaaagtttatttttatttttattttttgattttatttaagtcggttctaggtctgaggttggattcgggttcaagttaaaagtcgggttcagcgccagggccgtggagaggggatttgagtctgggtctagtcgtaattcaaaaaattgattaagaaaaaaaaaactgtttaaaaaaaatattgaaagtgattttttttttgttttaaaattttgatttttaattataaa

SEQ ID NO: 298480 - DNA, 3420 bp, Cannabis indica
cttgcccgcaagggatatggctctgataccatgttgagaatcatggggttccatcacaaaaccaattggcaatgagtggagaagcccatgttcttatatatgactcaattctctaccatttattctatatgggacaatgtccacaacagttatatatagtacttaaggaagtgatctatttgttgataattattgagtactttacagttttgctaaaacatgccctgtgctgatgtgatacaattaatcaactttactgtatctagcaatatataatattgttatgtaaaaacgtaggtggttccacttcatcactaagttaggttgtaaaatttaagtatttaaggaaagaaaggagaccggtgatcatgcagcccaagcccaactcgattaaatttttgtaattggtgacatatatcgatcgcgaagtgaaatgaatatatacatgcatgatacaacacacactcaactcaatagatgtgcattaataatttataatactaaagttaaattaaaaagaaatttgttaaaacataattaaaaatttagactattttttaatataccacatttaaataaatattttaaatattctctaaatactctaaaattcaaaattacccttacaattcaaaaactctcttctcccacactctctctgtctaacttccttccctcactctttgttattcccagcccaaaccttttaaaccccgactgttcacgagctccgaccgaccaagacgacccacgaccaaatcttccttcagccaggaccaagactacccacaacccacgaccaagacgacccacgaccaagaagacccatgacatctcgcgaagacccacaatgacccacgagaagcacctaagacaacccacgactaccaccacaccacttccggtgaaacccactccgaagatgaaacgtaggacaaaatcaaggagaatatcgcgaaactacaaagagaaatcgtgaaacccaaagtcccaacatcttatgagttctcaactctttttttttctggtttttgatgatgtagcgaaacatcgctaaatgtcgcgaaacatcgcaaaatcatgaaccatctctaaatgtctctgattcacaacactgcttgttttctgtatttttttctggtttttgacgatgtcgagaaacatcgcaaaaatcgtgaaaacatctctaaatgtctccaatttacaacatcgtgaaacacatcgcgaatatcatcgctaaatatcactaaatattgcaaataatcacttaacttcatcactgacctcagatttgttttatcattgcaaatgcatcgctaaatatcataaaatatcacaaaacaccagtaaaccagaagaaaaaatgcaaaaaatgagagaggccgtgagagaagatgacagcgaggccttgcgaccaaggttcttggtctgtgtgttcgacagtaggggttctaggtccgggttaacgccgaagagtgagagagaagtctttttgaaatgtaaaggtatttttgggtggaaaaaatattaaaagtatgtatatactatttttaatttggtggtatattaaaacaacatattttatttttaagcatactaaatcaaattttccaatataaattgtttaaatgaaggtatgcatgtttatagtgttctacaacaaactaattaatttttagtcagaaagagcttcataatgtccatagtggatttggaagtcaaaagcttctaaaggtaaatgaaatattctttttgtgaagaaatgaattcaaatgtgctggtgtgaattctgttatttttcagtggtccattcactggacaagtgtcatcaccatcctgcagctcagtattgataatttccacaatgactgagctgttagaatgtaatatggatctatgattgagccattagaatgtaatgatgggatcattgtaccctggatattctatttttttgttattactttattgacaactgtattcaagccttttggtgctcatgtgtgtaatgcttcacgatttcttgcttataaatggaaatcaaatccccaatattaattgagttaagatttatcaaatcattttttttttctaaaattcaacttggtcacagagcaaagatttccaaatgttgacagactcacaaaaccctgccaacactacccttgctaaaccctctgctacagctggagcatcaatagttgctggtgctagctcaagcaatcctcaactcaaaacttcagtacctcatcgtacccttaatcaatctttctctctaaacttgataggcacaactacatcctatggaagactatggtctcaaccatagtaagaggtcattgattggatggttttttaaatcgctctaatgtttgtccccctcaatttgttgatgcaggagctgtcatggagagcattgatactggagactcgcatatcatcaacctggccagcttatgaaagctagatcataaatgatctgttattgatggggtggttatatagttctatgacaaaaactataacaactgaagtcatgggagtcaacatagcagtaagactatgacaagctcttgaacaactctatggtgctcattccaagttaaaaatggattagacaagaaccttgatcgaagtgacaagaaaaggaaatacaccaatgacagaatacctaagacaaaaaaagaaaggatgggtagatttgttggctctagttggagaaacttaccctgaatctcagttggtaacaaatattctctttggtcttgatgttaattatctcactattgtgttataaactgaggtttgaccaaaaactacctggcatgagctccaagaaatgccttctcagttttgacagtaagatagagagactttagactctttcaacaaacaacaaactacctaacactttttcagaaccataaaccaatttttctcataaacctcaacttggaggccaaggcagaggtgcaaatcactactctcacaaccatggtggcagacactctatcagaggagaaagagcttaaggtaaggagagatttagtggcaaacttgacaattccaaacccacttgccaagtatgtggcgaatatggccactcaaatacggtttgttacaatcgttttgatgagtactatatgagatgagatccaaataacactgctcaagacaagaaaaacaacccatcaacttttgttgttgttgagatttatgccttaaaagtaagtaattaatggataatatattagagaatatataaaatacaattattagataaataatatattaattataagagtataattattaaatatctgaaaattttatatatagagaaggtataatcttataaggatgtacaaaaaaattaagattatacgatatgaataaaataaatcagtagtgtattaaagt

SEQ ID NO: 298481 - DNA, 6705 bp, Cannabis indica
gccaattatgtttttgctgtcaatgctagtgatatgggcaaatgtgacttgttgtcatttccaattacaaaaaaaaataaataatactaattttatttattatttttaatattttccggtccaacttattaaatacttatcttgttttttttttagttggaaaactagagaacttctcttgagttttggctctcaactaaaatatatacaaatacaactataacaacatcaccaaatactgaagctttttacagtctgaggaagaagaagaagaagactcaaatgacgagttgtatgctgtgtaagcctctgcccttcctcacacccaaaccgattccaagctacggtttcaaatcatcaacgagatcgcttaatggcggtgttgggtgtttatttgtaactcatgccacatcaaatacgaggccattcagttctagggtttgtgttgtccgtgcctcaattgtcggctcctacgaaaattcctccggtttcatcaagcgcatggaacaatcctggctaatttcacaggtaggtttaggaaattgtgaatttttattgcttgattaaacctaagagatgttaaagttatcgtcttggttctgttgccggcgttaattgaaattagctaggttttagtttttcattaaattattaattgatggaatggaatttgaatatcttagattttttttctaattatatggattgcttatgtatttccatatccatatcctatcttgtgtaacttctttcaacaaaagtggtgatatgtactttgacccgaaaggggttaatggaacaggttctatgggattcagagtctttgatgcatcaataatcttttatagcctgactattattaagattttgtgacttttttaggtgttctggtttcgaaaaatgttagctaatcacacccacttcatacaaataactaagatgtttcatgttggaaccagaaaccttaacactcacctctttcctttctcaccacaccaactgagctagctccaatggagttaaataccctttaatttcttaggtgatgatgttgtaatgagaacagagttgttattttgtagcttttgtggagtatgcaagattgtttgaatatagatttgacttgttaaataacatctgatttttgtttgtttttagtaattaattgcatgtaatatgaataataacgagtaaccacatggaaagtaattcttttcttttttaaaaagaacttcatctttaggcactaaggaagacatcattgattttaggacaagttaggtccatattcttaacctgaataagatggtgtttgagtttttcctaaatctctgatatgtttaacagcaaccaacgccagttgcttgttcttcttgcgagtcaagagggcataatgaatgcaaatggtgtgccggcacaggcttctttatccttggtgataacatgctctgccaagttccttcaagaaataccacttgtgtaatatgttctggaaaggtaaactcacagtagtactattctttcatctttagtggtcgtgtattgtgctgttctatattaaataattgtccatggatatggtttttttcagggagcaatgtgctgttctgattgcaagggaacaggttttcgagccaagtggttaggagaacctcctattcccaagtaaacaccattctttctcaacctgctgaaaggtatggagttggatcatagctgcaaaaacatcatagtaacctgattctatatctgatatcttaaagtcttgtattgtatttttccgatcaaagtttgatcgtactttgatcgatacagttacttacttgaacctaaaacttcaattgtttaactttgtaattaaagaatcaattcacaacatataggctattaattcataatcttgaattggagtatagttgctttcccttgtttaagtttttcatgccaaattttgctttcggaatgtaactatgtattctcaataaacaaaactaactgtaatgaattgtcaactttgataatgaaaatcaagggaacctttatagtacaataccatggaataagacttacaattttatactcaatgataagagaattttattttgccttctcttgcgtgtcattgtagattaataggaattacatgacaaaagggctattatatttaaaattggaacaatgtttgaaaaaaattgtcaatataagtactcttgaaaattttatcaactttggattaaagtatagtgtcacatatgaacaatcatactacagaatggaaaaatagggattaatattattagaaacccacatccatttctgatcagaaactttgaaagaactaccaggtgatggagggagaaattcgaaagtggggggaaagttgtatacaaattagtttagggggataataattatataattttttttacctacaattatatacataaatgtatataaattttttttgggagggctacaaccccctaacttaacgagtggttccgtcaattgctattcatcccgagttaacttgattgaatcttctcccgattaagagaaatgctaaagggtactgtctagcaccctaatgatgtgtaatatcgttattggtgcaatttaatgttggattctacttgttttaatttgatatttattatagaaaatcgctaacaaactatagaataatactttttttcatggtgatagttactatgagtgtctaacaatgctttattattagatttgatcatgattacagatttgaaaaaagttatgtgttaatatatttttttctttcttgctgtaaaaaattgcttctctttaaggcatattcacaacacttctctttctcaaaaacattaaaagatgaagaagaagaaaaatacaatttgttggagccattcgaagaacagagatatcaacaaacagacaaacaaaacctaaatgagaaattttacttaattgtgctaatatttattttatttttcaagatgaaacaaaataaatacttatggcacgtttactgtacagtatttataatcagaataaagtaatgtaacagaataaataaagtaatcggaatcaataattataatatgttgtttactaaaactaattggaaatggaatgatagtgaggttcataagaaactaatgtccagatttgattagcaattaaggcatgaaattcatgactcatagcagcattccaagtaggatccttaagagcagcaatggtagatttaggctcagttgacagtagagatttaggcagtttgtgtttcgtggcaagatacgcttttggtttatgaatctcattttgagctctagtgcgcatatgatgtattctctgaggtgcgcatattcagaggaggcaaatgaagctgacttagatgcagcagaataagacacatgttgaccaccaatagctggtgactcatgaacagatgctgctggtgaacttggtgaagtgtcctgagtcctgactagaatgcaaggcaggagcttcaagatgaacgacctcaaattcagaaactgacttagaggaagaggcattagcactattcatgtcgacaacaacaacattcgagtgaacaacaatattcatgtcaataacagcaacattcaagtgaacaacaatattcatgtcaacaacaacaacatttgagtgaacaacaacatcaatattagagtgagacttagggataccatcattaggagaaagatacagaaggtatattagtattaaaatatattggactagtatgaaatgtagcagtgggacaaggagcaaaaaaagaaggtacttaagaggcagatattgatgaagagacaaaaatgggataatgtgactcatgaaaatcacattgcgagctataaaaactcgataaatgcatatcttattattataaaaattattattattaataaattaaaagatttttaatatgttttgccgtgctttttggacttgttgcgtactgtgtttttcaggcttgtttattcgtgcttacgtgtcatgtctttcgtgcttttcgtgtcgtgtcgtgcttaaggacatatttttcatgttgtgtcgtgataatttgtagcatcgtattgtttcgtgcccgagcctgtattttttcgtgcctaatcgtgttcgtatttttcgggctcgtttcaatttcgtgccatgtcaaaaagttctgtctgtatttatagcactattcatacccgtgataaaacaaaaaacatacttttcacaaataaaaatttgtaaaacaccttctccaagctgtaaatcaataattttctcattctcttaaattaaacaatctgaaattataaatcacaaaacagtaaaaaaaatttaatgagaaacaaaaacacaaaacacctaattttaagaaagaaagaaaaaaaaaacctaaacaaagggcggagagagggcaacaaaaaacaaaaatacattgatattccaacaaaaaaaacattgatattccaacaaaaaaaatatataaataaatatatatatatatatatatttattacatttgctagagagggggacaaatatggagagacgacggatagagggcaggcgaagagagagtgggtagagcaaggggagggcagagagggatgaggtgggtttgtcgtggactgccgggcgtgagtggcgtggttgtcgtcgacagccgacagtgagctagctgggcggagagggctgtggagagagaagaggaataaataggaaaaatggagaaacaatttttgattagggttttttttagtttataaaattttattagcgacggagctcaccgttaataatataacgattttatttattattattatttaattttttaatgttagtagcggcggggttcgccgctaataccgtgttgctaataaaaatttaaattggatgagcagaaattttcttgcctagttattagcaacagaccgttgttgtccgctattaatacctctatcattagcggatgatttagcctgtcgctaatactttcacgactattaattatttttgtggtagtgaaatctactatacgtaattgttgaaagggattgtagctggcgaacccatgatttcattcaaagaggagtagaataaaatattgaaacaatacaatatataaatgtaactatatatatttatttagaaggatcggacacctattttcttcaatataattaattttatatatatatatatattaacaaaagaaaaaaaaaaaaggcataggcaagagcaccttcttgttcttcattgggttcgccactgattgatatcaagccttggaaggaagttcgagatttttttatttttttttcattgaagcgtttatatataaataacaattcacaatttgagataggatcctaagatccttcatgatcacttgaattaggttgaattggttgttgagaactttataattatgttgctaataaccttaaacattttttcaactagctagcttatgggttgtaatttttttaagaaatggcccataatgttggtagatgggcattggagttgaacattatagtgttgagctttcttccatattgcttttctttgtaattaatctgttgtaatctcctagtttgcttctattaatataatcatatccaatatcttttctattttcttcctttgctttgctcatatatttaatatgtatatgcacatattattggcctttgcctagcattaaagggcagtgaccattggtgtaattggagagaaatagggaagtgaaaactaggtatatcatagccccatgcatgcaactatgtatgaaattatgtgaataaataataataacaaagttttatgttttcaatatatataattaataataatatatatttattggttatgatattgttctgagaatttatatctctttgctcacgttttgaacaaaattcgcaggccattctttctgatcgataaaatttcaatttccctagaatcaaagaatgtagtcttatttcctaactacaaatatataaaaaaatatactcatatactatataaaaattatatattatttatcatgaatattttttgccacttgtttttaccaacctgcatctgcacgtcatatgatgtatgcctatatatattatatacatataaatatatattagaaaatgggcacttaaataccatattagatcataataatattggccatttaatgttatttgacaatgttattagtgttttttatttatttatagagaagttaatagagtcgctttttgttttgacatacaaaactcaaactatgtggattgaggttaaccctttgtgtagattttattttacagcaaaacttaccaaatcctttataatccctttataatctcttttgatgaatgaactttaatttcaaaaaatatatataaatatatacatcaatttggtttcttagatcgaggagagaaatttaatcaaagaaagaaaaacaaaataatggagaaatatataatgccaattttgaaattggcattatataattaggagtgtatgttggtcgatttggtcgatttacgttacattttatttaacttaatgtaaagatcgagttactaaaatctaagtgtatcactacaaaaaattgctacttttagtgacaactttttagtcacaacataattttttgtgactaaatgtgactttaagtca

SEQ ID NO: 298482 - DNA, 4509 bp, Cannabis indica
cataaggcttgaaaataaatatgtaaaaagtttcaagtttcaacaatacaataattagtgggctttgggctaggccttcacatattggacctaaataaatataaaaattagcatttttataatatgtggtgcggtgtagtgcaatttgaaccatacattaataattcaaaagtacaaactgcaccacaccatgcagttcagaaaaaattcaaattgcgatcgaaccgcaaagaatttcaaaccctattttttacggtgtgagcattttgagcgatttaatgaacatccctagtattttgtgaaggaaatggaaaaaaaaacaagtggtgctgcaggggaagctgaaatatggcttgtatcagattcaaggtcccaacaccattcacaaaattagtccaagtgtcttcaatgtctcttcaacaaatgctcaacctaaaatctgtcaatgtagtttcaagtcttttttctattgttgcgaattctagtatgtctacttcttgtgtgtccaaaagagatttgtggcataggagactcggccacccatctccaaaaaagctagatcaagtgctaaatagtacacatgtgaaaattcccttaaacagaaaacaaaagttttgtgagacatgtaagtatggaaagtcacattctctaccatttaaactttaaaattatagagcaaaagcaccattagaattaatccataatgatatatggggaccagaacttgtgatgtccaatacaaatttgagattctatatacactttatagatggtgccttaagtgcttttgtccagttcaaaaatcttgttgaaaatcagtttgatgccaaaattaaacaccttagaactgactagggaggagagtaccaagcattctccaatctagttaaagagtgtggcgcaacctttgaccatccatgtcctcacacctctgcccaaaatggcagagcatagaggaagcatagacacatggttgaaatgggtttaacactattagcacaagcttgtatgcctttaaagtattgggttgatgctttttaaacctcagtgtatctcatcaatagatttcctacactaattatgaatggcaaaacacctcatgaagtattacacttaagaaaaccaaattacacatttctaaaaacctttagggcagcatgctatccctgtctaagaccatacagaaaccataagttccaaattcattccattaagtgtgtcaatctaggttacagtgaatctcacaaattatataaatgtttaagctcaacagccaggctttatatctctcgaaatgttttctttaatgaggatgaatttccatttcaataaggctttatcaatctgaacaacctgtcagtgtcacagcccctaatagctagtttactttgcctattcacagcagtaacttagaaagtgtctcaccaactgaacctgaaaacaccaaacaataatctgatacaaacagtttagaagctcactctgtagcataaccagatcaatccaccaattcaccatccgaaagtcaagtcgatttgacaagacaactgtttatcgacttaaattttaatactgttgatacaattaatttgaattctcaagcaacacaaggtgatgtaaaacaggttcaagttgattaacaagagatgtttaaagcagtgttcaagggtccaaacatcccatggtaacaagatcagaagttggaatacataagccaaaggtgtatctctgtaatactaagtggagagaaggtgaaggggaacccaatttagttcctgaagttctaaagcacatggagtggtcaaagtcaatgttaggtgagaacaggtcactgataaaaaacaagacatggattcttgttccaccttcacttgagtacaacatagttggaaataagtgggtttttaaagaaaatcttaatgcagatggaaactttcagaggtttaaagccagactagttacaaaaggttttcatcaaagacctaggcttgactttggtgagactttcagtcttttcattaaggcctctataatcagaattgtattggaaattattgttgcaaaagactgagaagttagacaattagatataaacaatattttcctaaatggaaagcttgaagaagctgtgtatatgacacaattagagggctttatttatcctaacaaacaagacaatgtatgtaaattagagaaatctctccatggtcaaaaataagtacctcaggcctggtttgtcgagctcaaaataacactgatcaagtaggatttccagcactccaaagctgatacaacattcttcatatataggacacctcaagtcatcatcatggcccttgtatatgtagacgataatatcattacagataacaacattgcaaagcttcaaaaattcatcacaaagctcaatcaagccttctcactcaaagatctaggaggtttaaactatttccttagtattaaagttaattatagagataactctggaatgtatttatcataaggaaaatatgttgcagcttctaaacaaattcaacatgaagaatctcaaaaccctgtcctacacctatggttggaggaaaacctctgtttctattagatggaacaaagcttgaaaatccaactgagtatagaagcttgattggtgctttacaatatcatgtccacaccataccaaacactgcgtatgtagtgaataaactaagtcaatttctgaagtgtccaacaacaactcactatagtgctgccaagagaattctataatacttgaagggaatgcagcatcatggcatccatattaaatacagtgacagtttaaacataactggttattcagatgcagaatgcgggtgttgtcacgatgataaaaaatttataggtggctatcgtgtttattttagagacactcatgtctcatggtctacaatgaagctgtaatatcttcgataatataaacatatttaatttgacatattttattaaaaatgtaattatgtggagatttcagtaggattataatcttacttaagctaattacgagttaattagtgaaatataaataaaagaataaataatgcgtaatttatgaattacgaagattttatcagattatgggagtattgtagatactattttcaaaataaaatattttacgggttgggcggctgcaaaaactcgacgaagtgatcagaaatgtcacaaaaatataagatgaattgtattggatttatatcggattaatttagaactctaagttaacggtttgacaagaattcatagaaaagagtaaattacccttaggttttattttaggtttaagttttaaggaagggcaaaatggtcattttggtggagtattagaatttttcctttagtgctttttaaattgaaccttaggattaattaaatatttttttttaagttttataaaataaggataaatgggaataatgaaccaaaaagtcaaaggaaaccatcttctctctctcatctctcgacaaccctataaaccaccagaattggagaaatttctccatcatatttacctattcttagttgatttagcaaggtttaagagttgatcaagcttggaggacccgagatcgtcgagcgtaattccactcaggtcggctcgcacatctgactattggactgaggtaagaaaagttttatgcaccgctaagtggttaaataagaagcaattataatcgttagtgcctcgattaagatcgagattaatgttatgtattttttatgactcgactgtgatcgaggtgatgataggggacaattattattgtttgtgactcgattgtaatcgaagtaatgatgagaaatgattattatcgtttgtgactcaattatgatcgagggaaagacacaactattactattgtcgtgaatgaataaagatacggtcattatcgttatgagtaattactcgtgaaactgcggataggtttcttatttatcgtttgttgtatcgagcaacaatagtgacatacgtagctcgtggataacaaggtggtaagtgtactttatgaagtaccgggattgtcagattacgatgttgtgaaatggattaagtgtgttattatgtgatgagttgtaatcaaacacattttgttatagtgtgagtaaatgaattttatactgcttatgaaattagtcacttttcttgtagagtctcagtgactcatgggatgtaagaatacgtatttatagagatgtaagattagagtgctttatgaagcactgagaatatgtagttatgtattgaataaatattcatttaatataacgatgaagttgttgactataaggtgctgtgattttctcatgttgcgtagtatatgtgattgtataaatgtttaaattatatagatatgcatgatggatatgtgtgtgagtcacgactatatatatgttatgagatgtgaatatatgcgtttacaatacttttgatctaataacttttcttgctgagtcattgtgactcacgagtgcttc

SEQ ID NO: 298483 - DNA, 10779 bp, Cannabis indica
gaaaaaattctttgcatttatcaaatgaccgtgacacaaagcggtttaaagctaccctaccagtaagtctcaagagttctttgggctttgtacaagatcgcatctctactaaagcttttattttggcggggttggtctcgatgcctcgctggtttagcatgaaaccaagaaacttcccagaacctatgccaaagatggatttgagtgagttgagtcgcatcttatactggcgtaagattcttaacgtcaaatccaaatgagcaacatggtcgatcgcgtgttgagatttgacgagcatgttattgacatatacttccatggtctttcttagaaaatctacgagcatcatgttaactaattgctgatatattgtgcatgcatttatcaaactaaaagacataattttataacagtacaaacctcaatctatgataaaaaaaggtgtgctcttggtctggctcatacatcaaaatctggttgtatcccgagtatgcttccatgaagctgagcaatacatgacctacagttgcatcaacaaattggtcaatgcttggtaatgggaagttgtcattaagaaaagctttattcaaatctgtgaaattgacacaagtgcaccaagattcattaggctttggaactaagatgggattagcaaaaccaattcggataaaatgactcattaataaatccacatgcgagtaagcgatcaacttcttcttttaacgcttggacatacgaatggttgattcctgtgtaatacacttttgattttattgaaagagggtacctcgcggggtccattttgtggtgacacatgatctcagacaatattctaaccatatcttagtattttcatgcgaaagcatccagattctacttgaggaaggtaatcaacccttctcaatgttgcataatttgtttagatctaaccttcaaaaattttgaaatatttaaggatcaataggtacctcaattgtttctttagcagcttgtgcagtgttcgtgtaattgaggattttgggatctatatcaggtttctcaacatggggtacttcctcaattctgaatgactcatatcgaggtggtggagccttgatcatgtaaataatattactcaatttcttcttttctacgatattgagtgcaatattgtaacattcccttgaattagattggactcctttcactgaacctacacccgcatgcgtaggaaacttcatcgtgagatggtagattaacaataccttctccatctctttcaaaatgtggtggcctatcactgcattataagctgagtgttgatcaattactacaaagtctgccatggacttcactgtcataggcgcttctctgagtgttatgggtagtttgatcattccctttaactcgatagtatctctcatgaaactataaatgctcgaggtcactagtttcaaattttttttcatgtagccccatctgcttaaaagcttataaattcagtatactgactaaactaccattgtccaccaagatgcggtgcatattgttgcctccaatattcgtgacaatcactagtgcatccgagtgagggtggtgaacccactcgcatcactttctatgaatgtgatgtcatcacattccttcacatttgtcagtggtttctctctggcttccttcacataccaatcctgagctttcctcgagtctccaccaatgtggggtccatcgatgatggtcaaaattttgtgaggagccctagaaccacttgcatctttatcttggttagctctattcatttggggattggctttacattccttcttatattggccaaaatgacatcgacgaattaattcttcgattttatcatgcaaaaaccagcattccaaggttgtatggccaatatctttatgatacttacaaattattttgcgggtccctcttgttgcggtttcccctaatggaggacagttttttgaaaatgtctgtatgctcctcaatagcatatatgcagttgtgagggattcttaactcggtgaagttgacaaatcggggaccccctttgcatttgggtgaactttctttttctattggggactttgctagcttctggctttgacatctttttgggctacatcttgggctgcaccttggattgcgtcctctcgagattttccttgcagactcctggaacgtgccctggttgttgaagaccgattcttttccttatctttctctagttctgctaatgaattctcgattcttttgtgagactcagccatggcaaagaattcaaccaacgtctcaggacgtcatgtctataattctttcaaaaagtcgattcatggaaatacccctatgatgagcttgcacactagcaaagacttaggggccttttccaactttgtaaccttgagattaaagcgctggaaataatcctgtagggtttccccttgttcttgtttaatgtttgccaaagtggtgtaaggcagtttgtaggtcatggttgcttgaaaatgggtcagaaacaagtccacgaatgtttcccacttcaaaattgatgcttctggtaactgactaaactagccatgtgtgttatcctccaaatttgtagcaagaatttgatatttagccaattgagggactcgatcaacctccataatagtattaaacttatcaagatagttgatgggattggtcgtacctttatacttcaacgacttgaagagtctgaaacccttttggagtcgagcttgccacacttcctccatgaagggcaaggtttcatgcaatttgtaaatgggctttctctattgctcgatcattctcagagctcgcaagagattctattgatcaattcctcttggaaggatggggttgttaggagatacgacttggtttcctgttggtaaagtagccattgctactatctttttaggtacccccacatcgttgagcacagctggtgcaagtggtaggttgacgacattttttgcattgtttgcatgcgtagggggttgccctctgagtgggacaccttgattggccaacaggggatcacagggttcctcctctacgtcacatttccttagagtctaggaatgtgcgagaaatgcttcatcgaggcaatctttcagatcacctctatgcacacgatatctccatcatagtcttgtaaaaactaattatgacgtggtgtaagcgctaagagtgcgattgtcagaccttgaggacagtgattgagactcatggtcattcacctcaagttgagtttgtgcacgattgcatgggttgcatcgaccattatcttctccttgcggcctttgttccttgtgactaggttgctggttcgagttacggtcagtaggccttttacgacgtgtggggtcccaaacaggctggttcaaattgagtccatcagggttgttttccctagaatgttccttgtggttacgaggaacactagttttattactacgatgcctattatcattagttacatggttatctatgcaacgacttggtgggacccatggtggatgtcgtgcacgagtttggtttcttcctgcaatttctacctatagtgcctaaatttgctcctgcattgctgtatattgtgaagttatcagttggatgatgccatcagagcctaaggtaggtgttatcggtagaaattgtcccatagtagctgccggtgttgaggtttctccaccatggcttgagaatcgaggaaacaagttaaggggagtcacattggcatgccctactcctcccataacaacacccaataggggttgctcccccttcaaaaattggaacattgatgtgccaatgttgttgtttttgtttgtctgtttcgtagccatttcaattctcctccaaaaatctttattaaaataggttcccacaaacgacgccaaatgtcagagaaattttgataataccaaaaagagcgagtattcaagtttagataagaataatcatcgttagttatggaagtactcacttagaattgcgagtactcaaagtctgggctacgagatagacaaaatatacagaaatataaaagagacaatataaattatagtggttcagtcagagttcggtctgcttagtccacttttagtaagttctcagcttggtttattagatgtatatcacccttttatatgcaaagcaagagtctgctaggataacataactggtcaatcaggaccgttacttcaataattacatcattaaataagaaaaaacattttagataataaatatacgaacagttttgcatgttttcctattccttgattgcagcaacgtatgcgacttattagttcacaatttgaccattcgtatcctacacacgagttctcagggctctatggtgttgtactcccataataggccctgaggctttgtttagttgaacattagcgaccacttgatcacactttttggacattccgtgtttacaatttagagccagcgagctctttaactaatcgttgaaaatactagtaagtcataccacaacttatgtaaagaagcgatctttacttgtcacaggagagatgcactcgttcatcgcatatcacagatatgcgcgaccagtactaacttctcttgatcatcttgattctttgatcatgtcagctatgcgattagaacattgtctcagtcgcatctttcggcaagtaaaatcatgcgaggtcgattctatcagaaccgtattattgacacatcatcactttttctttaagggatgagtacacgtctcaacttagcacgagactagactcgtatttctaggaggtaaatttgcacgataatactatatttgtctcttagttgtttatttaaattatatttatcttattaattttgttgaggtttgacctcttgaactaggtttcggttttgacagttagcatactcctctaactaacttaaatgtcttgacagttaaattagttatatgctaaccatatacctataaatgaatacctctcacttgcgtacagattgagagagaaaattcagagggtttagagagaaattgagagttgtaaatggcatctcttgtgtttgtttgagaatgtcactagtgagacacattgtaaggagcaagactccattgtaacaagggtttcttccctgttttgtaacctctttttagatcaataaaagttcatctccacagccgaatcaaggctactttctcccgtggattaagctcatgatcacattgattgtgtagcccaaccacataagttcttgttgttgtttagtgctttcattagttggtgcatttactagtttatgttatgatttatgttgtggttttatgttcaattcatgttcttgatcattgtgcattgttcttagtttttgttggttcttgtttggagtttaagactccacaaattggtataagagctgaaatttctctcagcaattcaagaatcgaatctattctttaaggaactcaccaagaagatcaagaatgtccaactaaaattttgagattgacgagttcaatggtgccaatgattttggcctatggagaattaaaatgaaagcattgttggttcatcaaggtatttcagatgccttggatacagaagctctagcaaccattgatgacaagaaaaagaagactaaaatagaaaccaaagcacacaatgcaattttgctgagtttgggagatgaagtgttgagagaagtttcaagtgaggagaaagcattgggattatggaataaactttctgagatttacatgaaaaagtcattagccaacaaattataactcaagaagaaactctacactctgagaatggatgaatccaatgagttgggaagacatcttaatgactacaacaagattattctgcatctatgcaacattggggtgaagatccatgatgatgaggattaagctatcattctactaagctctctgccaaaggtttatgaatattttgttgacacgattctgtatggaaagaattcactcaccatgacagaagtcaaggctgcattaagttcaaaagagattcaaagaaagggagatggcaagatcgaatcaagtggtgaaggtctatttacaagaggcagaagtatgaaaagagactacaaaggaagcaagaatcatcatggaaatgggggacacaagaaaagatctggttcaagaaacacaacatggaaacaatgctattactttaagaaagaaggacattttagtgatgattgtattgctctcaaagccaagttaaaaagagaacaaaataagaaaaacaagtctaagggagaagctgatctagctgctgatggatatgaatcagctgatgttcttgttgcctctagtatgaattttggtgaagaatggatcttggactcaggctactcttttcatatgacaccaaacagaaagtttttcagtacaatgtcagaagagcaaggtggaagtgtcttgttaggcaataacaaatcatgcaaaattgaaggaattgggtctgttcagatgaaaatgcatgatggtgaaatcagggtcttgcaacaagtaaggtatgtacctaaacttaaaagaaattttctttcaattggtgcttttgataaaaattgttacattgtcaagatagatgatggaaccctaaaagttactagaggatcacttgttattgttaaggaaaagttagaaatggcatatactatcttgatggtcacactgtcactggttctgcagcaccagtaataatcaaatcactagaaaatagctttaagatgtggcatcataggctaggtcatgccagtgaaagaggtttgatagaacttgaccaacaaggggtattcaaaggtggtctaaaagacaagttagaattttgtgaatcatgtgtattgggaaagagttgcaaagtgaaattttcaaagggcatgcatacaactactgagaaactgagctacattcattctgatctttagggtccctccaaaattcaaacactggggggtgcaagctacttcatgagtatcatagatgattactcaagaaaggtttgtgtattcttgttgaaaaataagaatctagcctttcaaacatttgtcaattggaaaaccatgatagggaaataaacaggatgttgcatcaaggttttgaggacagataatggccttggattttgtttagatgagttcaagagctattgcataagagagggaattagaagacacaacacagttgtcaagaatccacaacaaaatggtttgactgaaagaatgaatagaactcttcttgaaagagtaagatgcatgctgaatagtgttggtttggagagaaagttttggggagaagcattaaaaacagcctgttatctaatttacagatgtcctacaacaaccataaactttaaaacccctcaagaaatgtagactggtcaaattcctaagtatgaacatctcaaggtatttggatgcacaacctatgctaacataagacaagacaagctccaacctagagccattaagtgtctatttctaggttaccctgatggaatcaaggggtacaagttgtggtgtcttgaacttggttttaagaaatatatcataagtaaggatgttgtgttcagggaagataagatggccatgaaaatgacaaaaaatcaaactgaaattgtctctgcaaaagacactaattcaagcagtttacaacttggggtggagccaattaataactcagatcaaatacaagaataacagatgaagaaagtcaagacaaatctgatggtgatcaagatgatcttagcaactatcagctggcaagagatagagatagaagagaaataaggacacctaatagactaggatatgctgagtttatagcatttgcactcactgttgcagttgagattgacagttcagtcccttcaagttattttgaagttgtcaatggtaagaatggtaaggcttggttacaagcaattcaggaagaaatgagttcactcaagtagaacagaacttgggttgtggttaagaagcctgatagaaaaaaaaaaaaaggtgttggctgtaaatggattttcagagaaaaggaaggtgattccaaggatggtacaaagaggtttaaggaaagattggtagctaagggtttcactcagcaagtgggtgtagatttcaatgaaattttctcaccagtagttaaacaagcctcaagaagaatgattttgtctaaggctgccaaatttgatattgaagtggatcaaatggatgtaagaacagccttcctacatggtaatctagaagaagagatctacatgcaattacctgaaggttttgaaagccaagacaaagatcaggtttgtctctgatggtcttaaacaagctccaagacaatggaacttgaatttgatgaatacatgaacaagattggctatattaagagcaaatatgacccctatgtgtattttgcaaacaaaatccacctactggtgtatgttgatgacatactggttgttggaaagaaaagatctgagattgacaagctcaaacagctcctatgcaaagaattcaaaataagggatctggggacagcaaaaagaatactaggtattgacctcagaagagaaaggcctcacaagatcattctatcacaaagtaattacctcaagaaggtgcttgacaagtttgcaatgatcaactctaaagctgtatcaacaccattagcacaacatttcaaactatccattactcaagctccaacaactaatgctaaaaggaagcacatgaatcagataccctatgcaagctgtgtgggaagtttaatgtactcaatggtgtgcacaagactagatatttctcatgccatgagtgttacaagcagatatttagccaaccctgaagaaaaacactggtctgcactcaagtggacaatgagatacattaaagaaacactgaacactagtctagtatttgatagcagagaccagctacatggagatgtaactggctatgttgatcatgattatgcaggaaatattgacaccagaaggtctctaactggttatgtttttactgtccatggaagatgtgttagctggaaatcaaacttgcagaaagtggttgctctgtcatccactgaagctgaatacatggctgcaacagaagccatcaaggaagttatttggctcaagggaatgtcaaatgaaatggagatagaatctgaggacatcattgttttctgtgacaatcaaagtgccttgcatctcatgaaaaatccaatgtttcatgagaggtcaaagcacattgatataaaattacatttcattcgagatataatcaattcgaagtaagttcaagttaagaagattggaacaaatgacaatcctacagacatctttacaaagagtaccacaagtgacaagtttagacattgtctaaacttactcagaatcaactaaagaaatgtctcctcatggagacaacctacattggaattagaaagaaattcttctattggaaatcattacagaggtgttcaagtgatcaaaccaggtggaatttgttgaggtttgacctcttgaatttggttttactgtcggttttgacagttggcatactcctctaactaacttaattgtcttgacagttaagttagttatatgctaaccatatacctataaatgaatacctctcacttgtgtacagattgagagagaaaattcagagggtttagagagaaattgagagggtgtttgagagttgtaaatgccctctattgtgtttgtttgagagtgtcaccagtgagacatgttgtgaggagcaagactccattgtaacaagggtttcttccctgttttgtaacctctgttcagatcaataaaagttcgtctccacaaccgattcaaggctgctttctcccgtggattaagctcatgattaccttgattgtgtagcccaatcacgtaagttcttgttgttgttgtttagtgctttcattagttgctgcatttactggtttatgttatgatttatgctaccgattttatgttcaattcatgttcttgatcattgtgcattgttcttggtttttgttggttcttatttggagtttaagactccacaaatttattattacaattaattaaaatataaaattaaattaaattaaaaaatattaatgattggtctggcggattaaccaaactaaaagaacagatcaacctattagacaagatactttttttttttatttataacttagatggattgcacgttaataaaaaaactaaaattaaaaaaaataataaaaaatagacgaattgcacttaaatttttctaatttgttctttatactgagtcaaatgaaatgtaatatgaaaagaccaaatagtccaacttctaatataaactccacatatcatatttagataaattaaaggagtgagatgcaaaatagtcctaaatttagaaaattaagttagtaaatgttcttttttttaaaaaacaaattaagaaaattgtcaaatataataaattagctaataaaaattataaaattattttactacatattaatttttttaaaaacaaaaatttataataattaaattaagttatataattttttagtattgcatattaatatattgtaacaaaaatgaataaatatattagatcattaaatatatatatatataagggtgactattgaatggttacatttttattgtagccatatggttacatttttctttaacctgtaatagtaggttactaataggtagactttccttttttagatttaattaa

SEQ ID NO: 298484 - DNA, 2285 bp, Cannabis indica
tttataatgatataaatataatttttcatattctaatcatcaccggtgttaaaaaagttttactttataactgtaataaatatagccgtaaaaacaacatgtgtattcaaacataaaagttgactaaaaatttataataacaacttgaaagatagaagtatcttttttccatttaaaactaataacataagacgaaatgaactatatttatttataaatagtcttctcacctttcacaaatcaaattgagaaaaaaggaaaagaaagaaatggaactaaaaattgtttcaagaatgaacatcaaaccatcttgtccaacaccttctaacctcagaattttcaagctttctctattggatcagctaattccccaaccatacgctcccattgtcctcttctacctaccaaacgacaacaattattcagaccattgtgatcaaaacgacatctcaaatagattagaatctctaagaaaatccttatcctctaccctaacccgattttatccattagctggaaaattcaaagaccaactttcaatcgaatgtaacgatgaaggagctaattacgtggaaacccaagtcgttggcttttctcttcgacaatttcttagtcatcctgggcctgatctcttattggtcaataaactccttccctgtcaattgggttccactgaatcaaatctcacgggagcttacgtggcgaacatccaggtcaacgtctttgactgtggaggcattgctctcggcttatgtattgcacacaaaatcctagacggcgtcgctttgagcacctttattaaatcttgggccgccgaggcccaaggtttcgacaacccgactgggcccaatttcgtggcgggctctctcttcccggctgacgattcattatggctgagtgattgttcaaaggcgatgttcggttctttattcagtaaaggcaagtcgattacaaaacggttcgttttcaactcctcgtccatatcgattctcaaggctcaatccgcgagttctgacgtggaaaacccgacccgagtcgaggcggtttcgggtttcttgtggcgatgttttatgaccgcttgtaaagaaaaaaacggcgtcgtaattaggccttcgttactaaaccatatagtgaatctccgtagaagaacgacgccgtatctaccagagaattctattgggaatttagtctggatgggggtggcgaaatcggacggagttgaggtggaccaaacccagttggtgagtttagtgagagagtcaacggcgagaattgatgatgattttgtgaagagaatgatgagaggtgaagagggaaagttttggatgatgaaatgggtggatgaaataggtgagttgggatgtagtgagggagttgattatatgggggtgagtagttggtgtaggattgggttttacgaagctgattttgggtggggaaggcctatatgggtgagcagtttttgtttgagtggttattcaatggttattagtttggttattttggtggatacgagatcgggagatgggattgaagcttgggtgagtttggacgaagatgatatggctattgtggaatgtaatacccaacttctccagttagctcaagtggatcctagtcctttggaattggattgactgtggcgcctcataattgcttacttggttactgattttaatattatttatttaaataagtacaaatattaaaatatatcaataaaaatttgccactttcttatgctaaaccttagtgaattgtatttaatctcttgattgcatcgattgcacgttaatgatcattgatcagttgacaaaatcaaccatttattaacatgttaatcttcaaaaaggaatcacatgtcctcagcctttattatatcccattcaaaattgatacgtttgagaaatttgacttttttaatgcatatattacactatctcaaatggtagtatcatttaatcttgttaaaaatttacacatcatctaaaaatataatagtttactttttgcactcttatttctaaaaacactagcatgtataacactctttaaaatattataattatgacctcacataatattatttaacatatatcttaatttttaactacaatagcttcaattttttattaaaaaaataatgaatagcatcaatgccacaatatatagcatccatgcaaatttattctgttagatttttgttctaatttttaattctgtttaaatgtctgtggatgacaggttcaactgtttttgcattcattatgtataatggtgtttgg

SEQ ID NO: 298485 - DNA, 6808 bp, Cannabis indica
tatctcaaagttgaacattaactagcacccattctctaattggggcaacttttgccatccctccttttcccaagtattgtccatattattgtactcaacctccaaattttttcactcgcttttcatttttgttatatcgcttcatttgcttctccaacatgtatttttctattgttgttgtttaggatcaacactatattcttctgccacagatagttatttaggatcaacactatatcctttttgcacggaaggaccatcatcgtgatcataatcaaaccaagcactccactcatcatcgcgagctcattccatgatgtataatcctacagtaattggaaaataaacattggaatatacaaaaatatgcatattgatagtcaaaagtaaatatatgataaaactaaatactaatatgtgttcgatgactcatgtattgatagattccttcatccataatccttcaccatcatcacaagatgatatgatattgtccccaactgtgacataaataggcggtggagtgatttgatcaatttggtcactaagcatgagatcatccccattagactcttgattagcataatcgattggttgcattgtgaagacaactaaccggcatgcatctaacggatcactcatgtaatgcacttaacaagcttgggacgccattataaaccaatcagacttgtgtccaattcaattgaagtccactaaattgaagccaaatttattgtctttaaccccattatcattcctaacccaatcacaaaggaaaataggcatccaaaaactactgtaatctaactcccaaacttcatgaattactctttaaatagacatgttatattttttgaacaaaaggaaagtttttattgaaaagaacaaaccaaacactggtcggaggcaacaaccaaccgccacaaaaagaaaaacaacagctaccaactattcactgcgctcaatatattacaatcttttgtcttttgactggtacaatgaaatccaaaaactctagccttaaccatacactctatcaccttgctaagggaagaagctgaattacaaacaacattaaagagacaatcattcctatttctccacagctggtagagagtggctgagaagacaacgttcaagatcaacgaagccaagtcgggtttggctggcaaaatcctcatttgcatttcactgatgttacattaaatagacatgttacatttaataagatttttgacttttgaactagatatatggaatatcttagcaactatcataacaccactattttatgtttttctagatttatcacgggcttgaatgcaaaattgattagtatttatatagtatgattggtacttgagtacatcacacgaaggacgtgatatggaaagtagtgtattggatatattgcttgaagattcacacatttacacatataactattgacatacaaatggattagtgagtaaaggttaatcaatgtatgatgtgtaacaaaacaataatgttaatactacttttttttaaccatgtaatgaaattttagtaaagttcatcttgtagccatttttgtttatgttctttagtcggattagtggtcatatccaatcaaatgttctcttcaagtatttgatggattaattttagtttcaaatgaatattattattttatttaaactaaaaagttaacttaaacttactcaatgtatggttggacctcatcaatattttacaacacaagccagtgtgcttcttcacgatcatctgggctttcactacaaagagaaataccagtactccctctacttatttccctattgacccgagtagggcaaaagctaacagctgtaaaatctaacaagtagtttgagcagaatttaatcgtctcttcaacgatatatgattcaacaatacaaccttcaggcctacttttattattcacatagccctttagattttcatgtatcgttcaaataggtacatccatctaaagtatataggtccacacaacttcacctctctaacaaaatatactactacgtaaacaattatttcaaaaaaggaaggcgagaaaaattattccacataacacaaaacttctagaatttctaaccaaagattctctaacttagaaagatcaacaactttacaataaagagatttgaagaagaaacaaaacctcattattgcatatctaactttcttaggaaacacataatggatactgacaaggagaatgagttgaatcaatatattatgattgtgagatttcagaccactcaaaattagtttgttcacatctacccaatctaagacatttgaggagtacccttcaggttccttcacctagaagatagaacctgcaatgccctgacccaaagggatgccacgtgtgcttttttacaaatttatttataattactctattaatttaggaaaagtgtggttcaattaaaaactttctgattaaaatataatatacctttcataaaaaaatgccacaaaaaatacagggattccctggttattaattctttcacaacttgtttcaagactgttattacaaaagtagagtctcatttgcaaacatagttaaagggttgatcctgtcccatagaaaccgagacaccgcagttgatatgtacattgttggtagacctcttactcatggccgaatcacagtttctttcgtccttacctgcatcacgaaacacccgtgagtcacaaagacttagttagaaaagcatgtgtatacaaacacatatatcatgcattgcgagaaaatcatagaaaaccatggctaacatcctatcattatagtaattggatatttatcccaaatacataatcacgcatttaacatacaattaattatcatataagacaatcctagtttgaagcttcataaagcatccttaccgcttgttgtccacgagctaggtatataactatcgttccctgttaaagcacccgataagtaagaaatttatctgaagtttcaagggagtaattactcgtttcattaacggtaatgaccgtatctttcctttgattataatcgagtcacaaacgataataatcattacctagatcataatcgagtcacaaacgataataattgttacctactaacatgcttagtgatgcatagaacttttattacctcagtctaatagtcaagtgtgcgggccgacctgagtggaactacgctcgacgatcccgggtcctatgtgatgacaaccaaacccgataaataacttatgcaaattccagaaacaaaccctaatcatagaactggacatatctaacttcccactagttcggtataattcaaacatcactaaaatactctgatccaagctttaaaaaatacactagcgaaaatcggttttgaacctaaaataagggtttccccatgctggcaaaaccggttgagtggtttctctatacttataaaattggttaaccagtttacttgcagaaaatgggacactctgcttttgcaccaagaatccaaccaaaacgcctccaaccctactcaaaccttccaaaacagctcaataccataaatacaatgtatttagagcaccaattcacaacaattcattcatttgaacaaaataacatagctaagtgaactaaagctcattaaactccatctaaccaaattcaagtcaaacaacccctatgtctaacaaattcaagctgaaacaaacttttaatcaaacctaaaatcaggttctaacctcagtttatacctctgccccttgaaatcctaaaaacctaacccgaaacctaaattacaccataaaaatccatagagaagatgaagaacacaccttgccaccagaacaacacctagggtagacagattcagcttacaattagtgagtttgatgaagaaaattccttggttgtagtaggtttctagggcacatagaaaaaagagagaagatgagtttggttggtattttctaagattttctaaccttttactattttaattcttttttttaaaacttaataaaaataactaataatcaactagtattattagaaactcatcaatgaaaaaataggctaaaatgattattttaccccacccttaaaggttaggcaatggaataacctagggtattttggtcatttctagctttccccgatttaacctaatttccaacattttaacctagtctagtataatttcaatacaacgcaacttaattgtcatgacacttctgaccactctgtcaagtttccaaggccgaaaacccaaaaaaatattttattttgaaagttgtatccacaataccctcatagtcaaacaaaatccccataattaacaaattacgctttatttgttcgcctactaatatttcactaattaactcgtaattagcttaagtaggattataatcctattctaatgcccacttaatcacatattttaaaaaatatatgtccaaataaatatcattatatattctaggatattagaacttttccctccatgtaaaaattttgtcctcgaaatttatctaaacaacttgggatacggctcctgcaactgtaactttaactcccaagtcccctttctatcttgttgtattcttccataacatattaactagtgatatagtcttttttccacaacactttctcttttttattcaaaattatgtactgacttttcctcatacgataagtctatttgaaattcaatattctcgtaacgctgtatatggatcgtatctacctcatacttctgaaacataaaagtacatgttgtaaactcaagataacgcagggagtattgctagctaataagctacctggcatacccttttccagacactcaaacagactggtaaatatgggacttaactttcctttctttccaattttcgagttccattcattggaaacacatgaataaagataaaattcccaacctggaattcaatatttctacgctttggactagcgtaggtcttttgtccaatctataaggtaaacatacgaacttgaatctttctaatggcttcactcgttccttggactacatctggtcaaaggtacctctgttcaccggcttcatcccaatgaataggtgaacgatatttccttctgtaaagaattttgtacagtgccaccaatagtactcagataactattattgtatgaaaacttaattagagggaaatacttattccaagaaccctaaaaatctaataaacacgcccgtagcatatccttagatacataaatagttctcttaggctgaccatcaatctgagggaaaaaaaagggagatactgaactctaacttggtatccattgttcgttgcaaactctgccagcacttggatgtaaaatttaggtctcgatctgacacgattgactttgaagcaccatggagtcgaactatttccctaacatatagatcagcgtactggtaaaaagtgagcttcactttatatatcgatctacaattaccaagatagaatcatagaaccctattgttcttggtagtctaacaatgaagtccatggttatttcctctcacttccagttaataatcttcaaaatttgaagtatcccgctggtctttgatgttctaccttgacttgctgacaatctaagcattttgacacatactttacaatgtcaccttttatacttgaccaccaatacaatgatttcacatcctgatacgtctaattgttactggatgaaaggaaaatggtatggaataagacttgtcttgagactccggcctaataccttcgtcaactggtacacaaacccttcctttatatcgtaatagtccatttgatgaaattgagaagtcctttggtgacccggcttcaaactcttcattgtactcttatagttctggattattttattgggttgtcttgattctttctaacaaattagattgtaaatataatattgactagttttccaactacgaactcgatctctgctcttgtcatatccttagcaaaattttgtgagatcctttttaatccatagactcgccctggacccttttcaacttagaaaatatgttaccacatttgcttttccaggaaggtaaaggatctcttagtcataatctttaatcagttccaacaatcgtcgctgccaattccatatcatgtgtaggataccattattcataatccttcaattgcctagatgcataggcaataattttcccatactgcatcaaaacacaacctgccccatgtttagaagcgtcacaatacatcacaaatttctcattagtgactagtaggttaacactggtgcaataattaggctttgtttaaattctagaaaactactttcgcactagtcaatccaaataaacttacataaatttttttgacttaatttcgttaaggatgcaaagatcttggaaaatccttcaacaaacatcctgtactatccagctaatcctaggaaacttctaacttcagttacaaacttgggtcgaggccaatctcaaacagttccaatctttaccgaatccaccaagatacaatctttgttcaccacgtgccctaagaagcttatttggggtagccaaaactctcatttcttgaattagcgtaaagcttatactcccgaagatgttgcaacaccatccaaaatgtttctcatgtgtctccacttgaacactcagttccttaaatccgtgaatgttgtcgaaacatttgtcaattcgaaggatatcaccaggaattcatagtgtccataccgagtacaaaaagctatcttgggaatatcctcctct

SEQ ID NO: 298486 - DNA, 1969 bp, Cannabis indica
aaatcacgtaatacgcctaaggtagttagggtgttacatcttatatctattaacttcttgaaaatcagccagatacttcccacaccaatctaatatatcccctgctcaagccatcttggccccatgtttcatgttgttacggatggaccacaagagaaataataagaaaaagttcaaaatcttcctgatgctagtgattagaaagaccatgaagcaaagtaaatgtatcattatttttaaacatctgcaagtctccccagaattcactttttttttttccaaacctctctgctacttctacatccccataaagcatgaaacggtcgctccttgttcctctagaacacctttctcacacagggtcaactgccattcctcttttaaacaacatatagttagtgggaagccataagagcacaccttctaaacaaaatgcttaacattggcttgtcttttgagctttcttagtaacttccacaatctctccatatgctatatgctgagtgtttgattgagatttcttttactgcaaatcaaaagccaaacgatatccacttctaacaaagtattcaccatttttactgtaatgccacattattttatcatcaatgtcccaagcaccacttggtaggttcataattaattcagcatctttagtattatatactgctctcactaagtcaccatcccatcccatgagccgtctgtcttctttagatccacaacatatagctactgaggaagatatggcttatcataaaattaaaaactcaagggtctgggcagccacagatcttctaatatacggatactctcaccattgccgtatcttattccacatcttatatttgatgcatgcaaatagttcttttttccgtgtgcccaccatagatggtaactccaaatatttgccatgatttttaactacctgaacatccaaaagttgagcaaccctttgcttactaatcgccaccaaagttctaccaaacacatatatagctcagacttatggaaattaacagacaaatgatcaccttgtcttaaccccctctgaggagtgagatgtcccaaaactttaccatttatcaaaaatgagaaactaactgaagtaacacacgctataatctttcaaactcatcgatcctcataccccaatttcatcaacatcataacttggataaatttccgctctattctatcgcatgctttaaccatgtcaggcttaagagccatcttgaaaccattacggaattaaattttacgcatacaatgcaatccttaatatccgattatgggattgtcatgaattaactagccttttacaaaggcactttgtgtatttgagatgacaatttcaagggactgcctcaatttattagccaaacacttggaaaccacttcatagattgtataaactaattggtctaaattcttccaatttttttggttgatcaacctttggtaatacatcactatatataaacattgttacaactcattctaaaaaaaatgttttttcttcatatttaatagaggggccatctacattaatggggcacacaaaacacccatatgttggggtatgatctaattgaggtgtttaaaatatttttttactattcattatatatatcttctataatttgttggaaaaataatttataatagtcaaatcaaagttcaatgtaataatgtgtttcacacgtgtatgtttttttttcatacactgaaaaacaacaataaacacattgtaaaaaataaattatagctcaattttatgatgcatctcataaaagggtccatcaatatattgcaccatttatctctttcagcattttaaaaaatcggttgggttcaaataatttattttagggaaatttatatggtatactaacttttgctatttttttacaaaaatactgccaggcggtatttttacttttttactgtgtttttttataagtttcat

SEQ ID NO: 298487 - DNA, 1381 bp, Cannabis indica
cataaaaaaatcaaatttccctatagtttttacatcatgggtgacaacatatgatcatggcaattggcaaccaagtctaagtagaagctagaaggtgtagagtagagatcactaaatagtaaaggcctgacaaaaaagatgactataacaaattaattgaaggttgttggaagaaagacaaaaacaccaataacatgctaagtaaattcttgaaaaggtgttgttggtcccattttgattattggggtccatttgcctactacatctttctctctctttaattgtctaaaatctttatttctcttacttttaatttacatcatctttttaatgtcataatttattaaatatatattcattttttaaaattaattttagataattcatatagaaaatttatatttattagtaattttcaatttatataaaaaataaattatatgtagataatttaaaattaattttaaacaaatctctaattgataaacattttcccacacaatattggtatacatttttagtctgttggtgtgtaattttcacttgtatgtatgtcaatctaggcgactgtgtcgatttctctattctaaattaataaacagcatgggagaaaaatcaatgaataatcaactcaattatatataataggcgtattctctcggtattaataatattattttatatccacccacatatatattatataattttgtataactaatttctagctaactccaaataaagcgatgaaagattcttataacactattcagtattcaccagaattaataagatactatatatataatccaataataatgaaaataattaattagatgtttctagtcaaataatacattctcttctttcagtacagaactctcttgtagtggaatgaataattattagaaaagagaaaacaaaaaacaaacattaactattaatcaacggacgcaacggattagggtcggtcaatcctaattctccatgagtcactaaatcagtggctctttgagaaagtaatcaccgacaatttacacttgttttctttcttccaagtcaaaaattattacaaaaggtttagtttagtctaactatgggataagttttaagttatgattacacacattaattttttttttaatctgattacctctcaatcaaaattaattattgcgtttggtacacacacagcaacttcagatattcagttttaaaggaaataaaaatatattggaaattctaccagcacactcttaaaatggatacattgatgcactcttatttgttttagcactcgaaataattttttagtcaaattttttttcatggtcatgtacgttatagttatttaagacatcttacaaaattttaagaaatt

SEQ ID NO: 298488 - DNA, 1933 bp, Cannabis indica
tccatttctttttgttcactcagaaattgtaggctacctagcaagcttagttgaatgtctttcctttagaatgagatgactaattaattatggttttacaaaaagtgatgagactaaaagaaaaagcaaatatatgtatggatttaattaaaaccatggtcggttctgaattttagtgaaacttaaaaaaaaaaaaaaaaaacttttatttagaaaaaaaaataatgtataatatttttaaaattagtaaaaagaaattatatacatttttaaaagtagaaaaaacattattttggcctaatattaggttggtccttaacacagtcctaattatgagtaacgatatatgcacacaaaatatatcaaaatcaaatcaatattttgtattaatgtaatagtattttttttatattaagaatctcattttaatcggatataattggttaaaaaatattatcacattattaaatatagtatttaattttgtgggcacatatcattatattcatatttgattaaattaaatatgtaaagctcttaggcatgaaaaaatatattgaaagataagaaatgtccacaaggcataagattggatagtagcacaagaaatctaatctcattggttagaacaataatcaatcaatcaaaatcaaaatcaaaatactctaaattcattattaatttaattcaccaaaaataaaaaacaagtgcgtggaattccttctttctttctttccttcaattcatcaactctttaaattccataacactttctcataacatttttaatattatccaaataaaaccataatggagagtggagatcaatttccttcatttcaacactctcttattcctatttcaaagaagaaaaagaataacaatagtaataatcaaaggagatttagtgatgagcaaattaagcaattggaatccatattcgaatcggagactaaactcgagccaaagaagaagattcagttggctagagagcttggtttgcagcctaaacaagttgccatatggtttcaaaatcgaagagcaagatggaaatcgaaacaaattgaacaagattttaaaaatcttagagctgagtatgacaatttggtatctcaatttgattccttaaaacaagagaaagactccttagttttacaggtaataaacacatttcaccttttctttttctctaactagagcttgttttgaattgtttgtttcgatttttgagcagttgcaaaggttgaaagatcttctcttatcaaaaactaatgaaatgaaaaaggacaagagattggatgaaaaagaagaagaagaaaataagtatcgaaacaccaattcgaaaaatgaagcagaaacaagatttgaagacagaggcgtactaatggcaacaacaagcaattatattgaggatttggaacaacaaggatatgaaaatttagattcattatcacttgaaaattggtataatagacagtggttaagtttctggagtaattagagaatttggaattagaagataattttacttaattagtttttgataccttataaaaaattaatgcagctatagccattgttagttaccaattactatttttattattatttcaagctaacccagattctcaatgtttcacttgaatgagtgtgtttgaatatagagcttattagttatgagattatgaagaaatctaagtgcttattgtgtagatgtatagtatagtagtatatattatgtttttgggtatgtatctatacttaattatatgtaaacaaatatattaagtcacagagaaaagtttatagtgaggttttattttacttcaatgtttgggatttgatactatctttatttcacttcacttcatcatttctcattctattcttaattttggtttgagacttgggttttaaaaaagaaaaaaaaaag

SEQ ID NO: 298489 - DNA, 3902 bp, Cannabis indica
tgaaataaatagacatatcgtaaaccgcgaaaataagtagatagacttagacataattacaagtccaaaaaaaaaaaaaaaactgacaataagcagacttagcaagaggactaagcaaacttagcagaggaataagacaagacttagacaagaatgacataccatgcatttagcttaataaatcgttcaaactcggcaaagttgtgcgctccatgagagcaggactgagcctgaggtagtaaaggcagacaaatgcctcccatctggatcgttcagaggcttggcatttaccaatatcttgttatagccatctctatcatggcaattaagagcattttcactagcaactggaatgcaagcatcccaggcagcgtcaagacctagacatgcataggcaaatgtgtcatgatcaaaggattcacaagcattgccaattcaacaattaattcatggcagtagggaatagacccatggtatcactgaattttgatttgcatcctacatcagcacatcctattacttaacagaaaaactaagctgaaggaacctcacacgtatacatacctgccaaactaatccttctgggtctgccaatgcctctggaaagtcttcatgctgatccaatgttcggagttcaacacatgtgaaattcagagcagcctcatgtttcttaaacattgttgcaattggtgcataaccatcacgatttgcagggttgtaaaaccctgcagtcaactcagcagcatgactggcggtcttgtaccaccaatgtatacctgatagctgctcatcaagcaaaagaatgtttctttaaaagttgcagagctataataccattttatcaagtaaattgaatacagtagattcactttttaaatgagtccagcagactaacctttgcagcgatgcaagttccttcaaaagctaaattggctagagaaagtacacgatcaccatgatcaatcaatgtccgagagtaccagttaaggaaaaatctcccatagtagctgtcatattcacctccatcacggaagaatccagtcttatgtggtgtggaattataagaacccgcattatctggtcctctcgcccaatttgagtgccccctcacttcggctgctttggtcagacttttcatcaagtacttatcatagcactgaactgaaatagtttgcatcaagggaagaaaaaaaagtgcacaccttttcaccaatttaaaagaaatagctgaacagaagtacctgaaattcaccaataccaggatatctccaaccatgttttgcaggataagaaggataccgtaactccccacatggacctagtccaacttcaatctcagagataacaccatcctcaaaaaattcatcaaattctaccctaaagcttctcatgtagtcaaaatagacctgcactaattgtatgatatataaaagacaaaagataattcttagagatgtaactgcagaagccaaatgtgcaaatatttagtacagctaaagaatcatacctcaactgcagtcctgcccttcaaaactcgttctttatcaatgccccatgtaagacattctgtattgcgttttccctctctatcagtgaaatatatgtcaggattgcttaggccaatttccgtaacccaaccagggagtggaatatgtacatcatctcccacattgcctccacattcatgaaaagacataacaacctaaagtgcattgaaaagaagaacatttagtatttagacaaaatcaacctttgagtttttaaaaggcgctaataaaatcaaaagtaacgagaagaaaagtaattatttgcacaatagtatatataagagaacagacatcatactcaaatgcaggtgacaatatatgctaaatgagcatattattaaattaacagtgaatacagattattcacctgtaatttcagatgaagatcgcgtacaatctggaagagttttctgtacccactccaattataaacctgtggagaatgtgcctcaacaatcccccaccagcagtcgatcataacaccatccacgttaatggactttaatattttaagctgattaacaagaccttctggatcaaccaactcagaattcatatcaattgtacccagctgccagtcccccatgataacaagtcaatttggtaaataacattagaggggaaacttagcacagcaagtagaacaagaactgaattcgagaactcactggtagcatcacatatataggaatataaggagttccagcaaaatcacgctcccgaatttcggcaggcttatcttcaacctacgaatgatgaacaaatttttgaaattgatattaaacagtagagaactacatattaatccccaatcaccattgattgattgtggataaagtgaacctccctttccttctcctgatttctttattgcctcattcactacattcaataaataaagtataaaaatttaaatgcagaaatactaaacctggctttgaaaggtggccacagaatcatcgatcaagggatgatcatcctcggttctctcttctcgttcatctttgagtaccgccatagtccgaaactgggtattggtagcataagtaccgtacccagactcgcatttccatcggcgatgacttccagctacagagcttcgaaaccttgaagctaccccaaaagaagccagaaaggtttgcgcatttgaaaaagaagaagaagtcgtagtagctctgaaaaaaccattgggtggtctcgagctacggaaaatctgagctgaagaaatcgccattctagattttcccaaggaaaggaacagactcgaatcttgtcgtttatttccaggaaattttttagagaagaaacgggaaaggattgctttcacttaaaaagactgaggggaagtgaatattttgtactttggcttttttgtggacagcgatggaagtttgaagcttttctctttattcactttctcactattttcccgggaaaattatcatggacgttacacttcaattttcctttacgtattttctacgatattatcgggaatccgaaaagataataaaagagaaaatgagaacccgtgacaaatgaagatggatccaactccaagaatcaggttgatgtggtggtgtcgctcttagacaaaacctcatctgtcgtttctttctttacttttcaagttaagtgtcgtttaagttgaaccttggtgtgaatgtcatagatatttgtgatcgacataaaaaaaaatctaagaagggggtggtaaaatggggtttccacgtggtacgcgaatacaaatacgatataaattttatgagttatggttgaaaaattaaatttgacacaaaataaaatataccaaacatgattgataactctatgaaaatagagttatttatatctttttgggcattaaattagctttgttctcaagtatttttagtttattttagtgacttttatttggttttatttagttttgcataaatattaattttagtatctttagattaaattttaattaattttgttatattttatcaatttgatttagttttccattttataagtgtaatctcaatgttgtgtatttttgtaaaaagattaaatgtacattttggacttattattcaaattgagagaaatgatgttaaagtccataaactcactaaagcccaagtattctacacttaattcactaatggatgttatgtttattgggccttactttactagttgaaaagtaaaaaaaaaaaaaaaacgaaatagacaaatgaaaataatgggctgatcattatttttcttttgcaagggtttattggcatttgatatagatatgtatatatgtgaaaggaaggaggaagctaaaaagaattaagaagcaggaggcggctgacagtgaag

SEQ ID NO: 298490 - DNA, 5220 bp, Cannabis indica
tacacatatttaatctatatattatattattataaataatataacaaatagtttgttgatatagcactgatgtggtattaatcaggtgtaattcaagagtctagatgaaaattacgtacatatataaagatatcgtctagtaacaaattttgggaatatgtgtttgcattcttagatattatgtttgtaagtttatcacctataagctcaatttcagcggacttgagttacttgaatagacctttgtagtgcaattataatattggcttgtttgccatatcagcaaaccatttaaaaaatgaacgaaatacaaatgaagagtcacattcgcaatggttgctatagttcgtggacattttttctagagaaaaaagttgagggggcaaactctagaaatgtcatagtttaaggggataaaatcctacgtatcactctcttttctttaacagaagcagattgttaaggactgaaaaagaataatttacagaaaaattggaggatacaatatcccgctaaagaacaaagaaaattgtaccaagattaaggtatattttcacaagagtgatgctaaacattgaacttgttccacataaaaattgcatacaattttctctgaagatccaactttatcttcccaaaaaaatactccacacagtagttatcatcattaccacccaaatcttttggtgtctttaacgattgcttcactatcttggtacaacttttaatttatatttacatctaacctccgttatgcagaccctcttttgatttttaaattattgaatgctcaatataacaacatagaaatcttctgattacattatagattcgcatgtatactagaaattcacttacattgtatgcagtatgcacacatgtatagatttatattatacatatttatatgtaacaacctattctgatactgtattctagcagcttttactttctacttttctagaatttcaacacaataatatgatacaccaaaatcttatccataatccattacatattattataaggataaatataactattgtataaggatgacacagaaattgatcataaggatggatataactaagatgagaagtaactgactggtcatgaaataatatagttattatttttttttttcagtgcttgctattgaagtgtgaactagagaagaaattatcaactttcacatttcaagaagttgccacttcagaggataatatgttggtcaagcatctgcaagatgagcttaggaactatgtaagttttctgcttattcttacctctgtctaattgctagttggtcttttgtgcttttagtttataatgaatgattaccattatgaagtcaactaacatccacaaattatgttctatactggtacttaagtatttgtatacctgtttcctatcattttataaaatattagctatgttggtatttctagttctatatcattgatgttcacactattttactcagtttctttattttatttttttgggactagtaatgtgtaccaaatttgattcaaatggaatagaaaagaataagaaggataatattaaagtactaattgaaatgcatgaaatttgagaccttggttctctttccccaacacaaagctaagcttttagccaaaatatgcatattgcctgcctttcattctttccaataacataagaaagcttggaggtagtgtattatatagctagcacacttggtggacattataaaccataaacatggagggtccttgttcgaattggagaccactgccttattatattgcaaacgtagatgcaagagtcaaagagatatctcaagggactattttagattcttaagatcttatgttttgaaaacaatctcgatgttattctaatggtaagtgtggtagtcaaggaatatagaagcttccaaaagaagggtatggtattcaaaattgattttgagaaggcttaggatttctaagaatggaatttttgtgattttcatttaataagaagggtttttggaggaattggattcatggatgtctttcttcagtatcttaatgaaggtcccttgttcaaattggagaccacaaccttatttgattggaaagataaatgcaagagtcagagatgtctcaagggactattttagattcttcaaaggagtttgtgtcttgaaaacattcttgatgttggtctaatggaaaaagaggttgtcgaggaatatagaagcttcgaaaagcagggtatggtgttcaaaattgattttgagaaggattatgttttctaagaagggaacttttgtgttttgtatttaataagaagggttttggaggaaatggattcatggatgtctttcttcttaatgaaggctaaaatgtaaatttaaggggattcatgatcttggacaaggaggtctcttatttcttagagcactcacactagacgatgtataagtgccttttctttattttagagtagagacaaaggtaaaaatggacaaaaaggtgctacatcagtagctctattataaagaagcaaatgaagaatgcaatagtgcttctctacatgtagcaaagcactatatattctctaaacgtatgttactattacatataatattttattctttcaagagtactttaacaatgtaattttattcatattttaaatttaataatgtgatagtatataaattgaaaagtatattatttaagtaatacagatatagaatatagagaagctgatgtatgacgtaatgtaaaaatttgaggtaaaatagagatagataggttttggtgttgtattttaaagaatagaatagagaaacttataggattgctcttatccttttactttagttgctagtatattggaatttcctcattttaggttttagagtgggaagggtagaaattaaagtcttcatctacaacttaccatttatacacttttaaagaatctaaggagaaaaaaattatatgtttctttcgtaagtcttctaatacacacacacatatatatacatatataggggttatatacctaataggctaataccctaaactacaaaataaatgtaataaacgcaataaattataaattagttacaaatcctataaataaggaaataatcgtaggaattgatttatgttatttgttaacactgcttattgatgacttgcttgttaactaggaaatcaaatactctctcaattaaaccctttgtgagatcaacaaattgtttatccgtataaacatatctagtgctgacaattcctctgtcaatctcctctttaataaaatgatgaaacacttctaggtgtttagttgtcataatgtatagggttatgtgcattactgatgctacactaattatcatagtaaagctgcatgggggcttcatattcaatcttcaattcccctaagtttaatccatattgcctctcatactttatgggccatggctttgtactttgcttttgcactgcttattgcaaccactgtttgctttttactctgccatgtgaccacattacacgatgctattatacaatacccaaatgttgactttctatcatttgttacctagcccaatctacatttgtaaacacgtcaaccttcctcttagttgtcattttgaagaaagattttttcttggtgtttgtttgagatacctctaaattctatatacatacactgcattgagatgtccttgatatgggtcatgcttatgttgactaaccaagcttgctacaaaggcaatagcatgtttggtatgtgagaggtagataagcatccctaccaactgctagtacttcccttgtcaactggacttcctttaaacattttcttcatctctcaagcattcctgtctcctgtaagagatcaagtgtgtgttctttgggatacgaaaattcctcttttgcttctaccaagttccattaccagaaaagacttgagtgctctgagatccttaacttcaaattcttttgccaacatttctttgattaggatcaactcttcagtatggttgtgagtgacaatgatgtcgtcaacatacataatcaacactgacatttaccccttttacaagtataatttctcggtgagtggacagtagcaacaatagcctttttgagtaggagaataactaaaggaaactatcttgatggcttgaggatcaagtttactcctatgttgggagtgaacatggacatggacaaagccagtgcaatcaaaaactttgactagcagagtatgtgtaaaaacatgtaaatagagagactgaagagtagaacacagtgtcttgaactaaagtggtctattaggaaaacatcaccccaaagatattttggaatatacctttttaacataatggcacaggctatttctaagagatgacaattttttcttttcactaccccatcctgttgggggtatccactcatgagctttgatgaactatccattctagagaagataaggattgagggtgttagtgaattattcagtaccattgtttagtacaaagagtgagactacttatatggaattgtgtggaacattttggaaactttgtggaagttttggaatgcgtgataggttttagacttttttttttatcaagaaattgaattctattaatcacaaacaaaaaagattacacaccagccactcacggcagcagcaaagccaaaaaaagcagcttcaggaatctaacattttaactaagttcctgtccttttctttccaattcagctgagagtaaccattgactctatacataacctcctttttttttttttttttaatacataacctcctttttatcctatttacaatcacatttacattaaaagagcatctattaaagacactagcattcctatttaaccaaatctggtatatagtggctgagcagcaggcgactttagcatatactcctttgtccaagtcctcaatccaatggatcgagtcttcttaatcgagaggacaagtacggcctaaccaggtttgaatcagcttaacaacatgaatagagaaactacacttgaaaaaaaaatggccatgattttcatctgtcatctcacaaacagggcatttgcagttgtccaagtgaggaagcacctgacgtaaattatctacggcttttcctccgctacaagtgagggtttcaataacatgtcggggggaggtcgttctaagaccagcgacctc

SEQ ID NO: 298491 - DNA, 793 bp, Cannabis indica
ttttttttctttctttttttaagtcatagaatctcgtcttccaaacaagtaagaaataaatatatgatacaaaataattaatatatatattaatacctgaagccttgtggtttgtgaggggaattgaaatgaggatgagatataaccttaataaagtccctccatagaagaactttatcaatggcaacattaaaactagtgccgtacataatgggctccaaaacacttctgttggctcctttattattgcttattatttctggcttttcctcagccggcatattgaaaaagtctctacacatctctatcattctcttcattaaactctctcccacaccgtggttaatcagctgatccattttaaatcattaataattaataacactatatgtcccttttctataaataataaacatatatatgaagtgtactaattactatatatgatcatgacattgatcatgtaaaacaaaaatctgtaattatcaacataaattaaatatatatactttgttgtaattatattcttaacctttttccaccgatcgattttttaggtatatacaaacaaatgaccagcaattagcaaaaagatgggggagtcacttatcacatacaaatgtacaaacatataaatatttacatatacttatgtatacatagccagagactccttcaaaaaaaaaaaagaaaaaagacacttgtggcatatataatattatatacgcctcaacgaatgtgaaaattaaataaatatatataaatgcattttaagcttaattttgttatctaa

SEQ ID NO: 298492 - DNA, 1866 bp, Cannabis indica
cacatccctcaaaatgaagtgagggacttcataattggcctttatatatatatataattttactcagtacatcctttggaagaatttgttttaatcatatatagtatatactacaacactcagttgatttatagataaaaataaagcagaaaatgtttgaattttgttcatggtcgctttttaattcaaaatctttcaagcaacatatatatactaagagctttaattaaacattaaacatgaaatttacacacacacacatatatatataagtgttatataattattcacaagacttcactttattgtggtattaattagtggtaattctagactatcctttttaagatttattggaatgtagttgatcaagttactaagaaaaacgaaaaaaggacccatatatacatgtatatattgtttttattcagattatttcatggatggatagcaagtactactacgtacctaccaatatgtaccatattaattataagtagatctagctacaaaaaatttatttataagtaagctaggaaacaaagaattatttctatacagacaaggaaagattgatgtgctgaccaaactattcttctaatacacacccaatttttttttaaagtccctttatgttgaagggtaagtaccaatattattatgtgtattatattagttacagctatattatagtatataaattgatcttaataaattaacttaaccaattttaaattagcgattttattgtattatagtgaattgaactcaatttatttttgtcttaataaattattataaattaggaataaattaacatatatatatatatatatatatataaagttaggaataaatgaggaggaagggaaggtagtgtttgtgatttgggaaactaaagaagcatagaagaatgaatgatgttgcttggtgaagataagtttgcttcacatggtcatcaatcatgtttgtcttacttattctgcaaacaaaacttttctaaattaaactaaaataatataaacactaattatatatgaatatttagagagtagtagtagtagtatagtactactcggctgcacacgtcaatgcgcatgccatactactcgcatatggctctgtcttttttgatgtatatgtccatgcccaactctctcgaaactagctacacttacaaataaatgatgctcctaaagacaagaattaattaaaaagaagaagccattatttaataattccacctgtacacatgtgtgactaacatatacaaagaatattcaccttttttttagggtatttgctatcataaattaaaaaggatagtcatttacaataaaagtacaacttgttgattttaatgatccaaattaccaagttgattatctttaggttgattgatttcaagatatgaattttagacttgaatcgataataaagcagtaaatcacacaaagatttacaagcttcgatctgcactgagaacacatctcagccaactagtgcttgggttccccgaaccagggtaaactcatctactaattctcaatagtttcatattacaatcttcaattctctctaaaggaatctaatacaaacttaacagcaattagtaatgaattaccaacaacaatcaagaatcctgattgttagtgcacaatcccttgtgcaacaactgagttcttcttcgacatttcttcaacctgaaatcccttcagatctgatgacgaagttgacactgaactcccttcagttagaactcagcaactccaggctctgatcattccgccattgatgaccatcttcaagctatgcgatcagacctgtagatacaacaacaagaagcaagatacgacactaactcca

SEQ ID NO: 298493 - DNA, 4600 bp, Cannabis indica
ctctctctctctctctatttgtgcttatatttcttatgtaatgtattaccgttgtttatggttttctctaagatttaagaattgaaaaacccctttatatttatatatatatatatatattgaaatttaggtgttatttgggggttattttcacctaaagtggtatgatttagcatagagatgagaaattcaatgtatccggcgaagttttcatttctctatgtttatgtatctatttgctaccactgtttttcgttttttctacgatttaagaattgaaaaaaaaatccttttagcaatttaattgtcatgatatgtatatatgtatatacattttgaagttagtcgttatgttttattggttatttcacttaaattagtgtaatttaggcgagggaacatagtttcaaaatacccagaaattttctgttttttgttcccaatatataagctgagtttcaatcctatttgaacaattatgccatccttttctggacctttgttaatattttcaatttcttgctcttttcaatttcttgctataatatcgtaaactgtgtaacagttaaaaaaaggttttgaaagtttttgtgatatgatatcactgccactagctgtaagtcgtttggatggaactttcaaaagctagttgctggtagtgtgccaaggaaagttcttgcaaccgtttaagtggattctcctactatatgcaggttatttctataaagattatacgcaacaaaatcacaggacagcctgaaggttacggatttgtggagtttgtttctcatgcagcagcagagaggattttgcagagttacaatggtacccagatgcctggaactgaacaaactttcaggttgaactgggcttcttttggtattggtgaaagacgtcctgatgctgggcctgaacactccatttttgttggagatctggcacctgatgttacagattatctgttgcaagaaaccttccgatctcaatatccatcagttagaggtgccaaggttgtcactgatccaaacactggacgttcaaaaggatatggttttgttaaattttctgatgagacagaaaggaatcgtgctatgtccgaaatgaatggtgtctattgctcaactaggccaatgcgaattagtgcagcaacaccgaagaagaccactggttttcaacagccctacactgctgcaaaaggtatttttcattttgataatttttgttacgattgatgactttgtgattaccatacttatcgtcttgcaatacctgattttaactattctttgaaccactcagtaaaagagaatccatcagtgcatccccagtattcaattgttttgggtatatttatacactattaacaacatatgcaatgtttgcgggaatggtgtgtagcgtatgaatgtatctgtatgtgttcatatgagtttatgtgtgtggtttatgggaaaaagcaaaaaacaaaatcgggtactgagttgttttcccttagatatgcctcgagacatacaccttaacaataagaagaaaagcttcatgaaaattattttatttcatagcaaacagcacataattctataacgaagtcataaaattcaagaaaattactagttaagtcttaaaatcataaacttaatccataaatggttcaattacaaccgaaaaatgataaaggttctaaacttatatagaagacatatatgcatgaggttgatgagagggagggactcagctaagaaggaaagagatgatagatgttgcatgaaagggttagggttattagggctatattttcctgtattttctattaaaaatctgttaaaaaagacctaaactaaagcccattagtcatttagaagtctgaaaatagctattagaaaagctttaagaaaaagccgaaatcagcccacggttgaggcgtacacctcatgcacctcagtacacatcgcctcagaggtgtgtgtctcaagtccacctatcagtgtgtgaggcgtatgcctcaatgacagcagctgaggcgtagcgtcagatacgtttttccaccacctcgcctaccaatttttgaaacaatgcttattactgcctactactattagttatgacttacgagtctgtgacatgcaaagctggaattggctccgttgcatgcttttcctgctctagtttctgatatgctgacctcaacctggtttataaacacacttgttgactttcctgtagcggcatatccactttcagcatacagtacaccaacagcccctgtgctttctgcagattatgatgcaaacaacactacggtgagctagactggactaagtgatgttggttttattttatctcttaatctcacaatcttttttcataacagatttttgttggtaacttggatcaaaatatcactgaagaggagttgaagcaaacatttttgcagtttggggagattgtctatgttaagattcctgctggcaaaggatgtggttttatacagttcgggataaggtctgttcaacacgggaaacttttgacatcacatgatttctttaaatgaaacatactaacaagaactctgtagtctctacgtggatttcttttcttatttgaattcattgtttctgtttctcttttggttgttaaagaaattataagttttctacagttagcaatgttgtgatctctcctcctgtctctagctataaaagttccctttttgtcagacttaacgaagttgttcgtgtatagaggattgaaggtggcaatgcaagttgcatgcagaatgttctatgacttgtttcactttctattgtaatttaacaatatttttttaatcatttttctccactcttctatgatcaagttgcttcttttttcttggaaaaagatatattgcgtattgattttctgaattttcttataactgttatttttgtaggacatctgctgaagaagctattcaaaaaaatgcagggaaagatgattggtcagcaaatagtccgggtttcttggggtaggagcccaacagctaaacaggtgattggtcatgtacttatttctaaaaagagaaaagattttataacaagctgatttggaatggtgcagtgtattttagatggtagatatacatgaaactaaaatatgactaatgattacatacacgggtatgagtttagctttctgatggtcttttaaggacttttacagatacaagaaaaaaatttactgtagattttccctacacctgacaaaactttataccaacttattttaggacgtatctggtggctggggtcagcaagtagatccaaatcagtgggcggcatattatggttatggacaaggatatgatgcgttttcgtatggggctgctacacaagatccttcgttatatgcatacaatgcatatgctggctatgcccaataccctcaacaggcaagttttaaatatgtaatgcatctcacatgatggaggtgaaagcttcatgaatttttatggaaatggttttggttcatattgctaatcatggtgttgagaaattgatgaatgtggctttttaatagcctatcatggctttagtaatttattattcttatttcctactggatattttgtttcaggttgatggtgttctagatatggcagctataggagcaactgtcccagctgtagagcagagggaagagttggatgatccattggctacacctgatgttgacaagtaaatatttcaatatatttgtcatgaaatgcctatctcttgtccatatttttctatcttctgaatccttcatggttgattgctaggttgaatgctgcttacgtcgctgttcatggaagtgcgatgctaggccgtcccttatggcagagaacgtctttgtttacacagcaaacttagatgcacatattcataaccagattcagattggtgagactattgctacattgttgtagaagttagaggatagagcggtagagaaagaatataaaagagtatagtgtcatgttaactgcaaattgaatcagcttccatttcttgattgtgctttttgctgcatcagagtgggaccttttttctgacaataaaattttttcttgttctgctgaaatataattcctgattttattttttatttttatgaggaaattttttcttttagaaaggaggaaaaaaaaactattattaataatttcgtagaggatagtaaacttgtaaaatctactcgtttgtatcaagtgaaagtgacatgccttggtagtgcttcgttgataatttcgtaattaaaattgttttttttttgaacaaaaaggaattttattcaaaacaggcagcaacccaacagtacaaacaaaggcacaacagccaacaaaccagcaaaagagaacagcagcagccccaacccgaaactaccagcccctaattacatcaattatatacttatcttgctttttagaggtattacaagttaagctcaagattctataatgagagagcttccttatctccatgctcaatttaagaggagaggaacaaaccaaatcaaatatgcaactatttctatttttccaaagcaggtaaagcgaagctgcaaacactgagttgat

SEQ ID NO: 298494 - DNA, 4763 bp, Cannabis indica
acataaaataaaaattattaaaataaagtatctttaacaaattttagatataaataaaatttccccttaaaaatataaaaatattagtaaaatttaaaacaaatgagtatataatctaatttcctctaaattatacttaaacaaatttctaatcaacccaaaccaagatagcgggcactgagataatccccccaagccaactctttctatctctctctctctgtatctatcgtcaggcaattgaagaagctatctgtcgccggcgccgccagtcaccagctccaactctccgactccgcatttcctgcctccctcaacctcaaacgaggtatttcttgctctttactgctcaataatttcaattaaatacaatgtatccatatacactatagttatggtttctaggtgggttcagttttgggatttcgttagtgtatgtaacatattcttttttgtttttagaaatctgagtttttatatgaacaacgtatagacattcaaatacatctttgtgtaaaactgcgttgggatttttttttatccaaggatactgatttgctatggataaggttttcatttcaagctcacaaaagatattaaaatagatatgttgtcttccaaattatgagttttattttgtttgggttgaaaaaatttgatattgaagaatggttaatgtgttaggattgttggacattaatgttgttgtgtgagtgaagatgaacacggctcaaattaatgtcttccagaggcccacgttttatcttgtgggtttctctgcatctcatgcccgagtcttaacgcccaatcatttgcatttccatggtttgcaattgccctggacttcattgaagctaagctcctctcccgccccgcacggtttaaattgcacgcctcttttgaagccccgtcgttctggacctgtctgcttatcgaacaccggagctggaggtgacaatgaggtatgtgtgctagtgggtctgctaagcttttgagttttatgggattagaagaaaactcttcattgcttaatgaaatagtttagaaaggcttgtgatgtccttgaagttggcatcatttttcctattagtgataatttttgcttgctatatgctttattatctgtgcactttgctgctctaagtcatgttagaattatatatggatgttttcaaagcagttgtagaatctgcagaccttctgaatgtacttggtaaattgttacagggctctcctccatggaaagcttttgaaaaagtggtgggaaatttaaccaaaggaaattctatagaggatgtgttacggaaacagattgagaaaaaggagttctatgaagatagagacgacggtggtacgcccccacctggtggtggtggtggtggaggcggtggtggtgcagatggctctggtggttcagaggatgaaggtatttttggaatcttagatgaaacacttcaagtcgttttggcaactcttggcttcatttttctggtaatgtgcaacataacttctacttttgggaaattcatcatccagattattacattaagcactttgacacatttgttaatcacattttccttttttatctttcgaaaatggcatttccaaacttaaaggatatagaataagtatatgaaatataagatagaaaatggaaattcaaaagaagacaatttaaagatgtcacctaaggcaaaaaaaaaactgttctgcttagataacactgggtttgaactttcaatgtttcaccacattatttttagcttgaagtggtattgggtattttaaagggaatgaatgaaagactatcatctctttttgaaagatggccccatctcatcttgataatatgattaattaagtatccttatagtaagactatgagcttttgctgtgttgtgctttaacttcttcatactctaacaccacaactttttcagtattagacaacttccagggtcaaaatttttctagatttcttgcggtatctcatttgtatccattgtttgtatatggatttactgcagtacatttacatcatcaatggtgaggagttgatcaagctggcaaaggactacatcaaatacatctttaaaggaactgagagtattcgtttgaagcgagtccttaacaaatggagaaggttcttcaggaagataactgagaaaaaagtatacgataagtattggttagaaagggaaattatcaacaccccaacctggtgggatagtcccgataagtatcgccgcttacttggagatgactcagaaacaaaaccacgtaggccttatcaagattcaactgtgtacgactcttatggagaatcaactgattatgggtcgtatgaggagtcatatcgagatgatgactattgagttgtgtttttgattgcctatggaagttggttgttgatttggtaaaaatatttgtcatgttggccgttgtaactaaaaattgagaatagaggagatcaacatcttaatgtttcaaactttgatgaaaccagtagtaattacaacataaaatacgctgttttgtaggctgtcaagtaaggatttagtttaatatatagctaagcaatttcactggtttgttatatataatgctctatccatctttattgtcatggtttttacttaagctacaaaatggttgatgctaagtgataattaattcgattgaataagggattggtcacaaatgatccttagagaaagaacgatctgttaggataagattggccattttaactttaaattctcacagtctaatgagtgcaagaatgtcaaagtttcatctctaaaaaaattgaaagaggatgggaccattttaactgaactggtaagaaatctctcaatttggttggaaagaccatctgaagaagagggaaatcaagaaaaagctattttctagagtgattgagatggagctgtaggaaagattgtaaggaaaatttggaggtgattagtttgaaatgaagggagtgatcaataggattacaaatgagcgtttgtctcatactctcattcctaaagagagacaactgaacatgaagcttgagaagtggttggatccaagatcttctaagaaattcgccttggtggattccatacctaatatcttgccaagaaattctccaaattcctaaatacattattctttgtgatgcttttcaatgaatgtcagttatgtataattatttttctccatatgtcaaactaaagaaacctttaccattctatgtgctacctatatttgtcaagaacaattatttggtagctttctatgatgttggtacatacaagtatgatggaacataatgcttctatctatttataaaagacttggtttgggagaagttaggcctaacacttgaatgcttcaactagctagctattaggtttattaagcatccaaatgtgtcattgaagatatgcttgtaaccgctaattaatcataaaatgtcacctcatggtcatgtcgaaaaccactagtgtctaattgcaagaacattgctataaggcactagtgatacttaacactactataaagtcacaccttacgaataattagtgatattctataataattattatattaaattacgcaaaattcaatatttaacatttctttaagcgcaatgcacttccataatttcaaagcaaacttttttgtaacttcaatttgctattaatctcaaatttttatttttttgcaactcggtaactgttgcacaaaaatagtggttttgtaataatctctcgtaccaatttttttaaaaatatattttatagagcacagcctagttttttttttcttcaataaaaaagaaaacacagcctaacaaatatttaacaataatgtagacactgcaattttatcagatagaaaataatttatccttcaaaaaaaaaaaaaaaaaaaaataagttgtctcttgagattaactcagttggcttggttgggtgtgagttatttctataaaaatatatctcaagtcctttaacaaatggatctaaattgttgggtacgtagccaaataaactctttcataaattgtatttacaatttttatcaacatcaaaaaagaatatcccctcaaaagaaaatatatatcataataaacaagaataataaggttctattataatcaaatgttctttgatctctatacaaacaaagagtctattagcactatacagtgttgttattgttgttgctctgaggctttcctaacttaacttggtccttggttcctctctctagaggttttggtctcgattcgtcactttcgaatggcagtaccactacgggagccacgggcaacatgtcccaccgctgctttaagaaactcctgaacttcttcaccatttcctttcgaaacccaagctctcgtgtgaagagatcagcgatcagaaatgctagaacatacttgaaagggaccgtgaggagaatgattgcgccagccaacaaggcaaaagcaacttcagaagtaacctgaagagaattaagtgaatatttaagaaccagattgttttgttttctttactattaacaacaaattatgttgtttcctacttgtatgaatgggaaaaagaaaaattaaacaaacacagttactctggtggataagtttcagtctaaacttgccaacaagtataaaataatggtagcagagacatatatttataaactcaatacattaaaatgggtaaataccattttagaccctgtattttgcaaaagttacagattggacc

SEQ ID NO: 298495 - DNA, 2980 bp, Cannabis indica
ttgctaattagccaaaataaaaagcatagacgtgaattggtccgccactaatattattgtcagtttacgaatctgacactattattagcagtgattgtattagtatactgctaatattagttatatattagtgactaagtattattggtagagtaatagcggcgggctcctccacatggcattactctttaggggtggactaataagtgctccactcctaataacattcaatttaatgaatcagctagttttatatattaatcaatattcaatttaagaattagattaaattatatgtgattggatcaggtgaatggaattaaataaactatatttatgaacacccctataaaagaccaatccaatccaataattccttgaatcatagctaaaatattggacaagttccattaaatacccctaatacatacatacacaatatacttcgtttgagcaattttcactatttataaagttacagctattataaattatgtagtggtgaattaattaacaccacatctgcctagtatgattaaaattctcttattctcttgtttttcccattcttttctttttcaagaatgaggcaaacgaaaaggtaaggtaaagatgattatttttcttcattataaaaaaaataaacaaaacaagtcagtgaggagaagaattgaaatttgcaagaaagaagtgaaagaaaacatgaaaagacacagtgtgtaaaagggagagatctaatgagagagagtgcaagttagacagaaagcacgtaatcccagtcaaaatccacctcacctcaacaacatattcatttcattttatgatacatacagacatatatacatcaaggaaattaaatattgttattagatatcagtagtgcctagtactttctcgagatgtcgcattgcgattagctagcgatattccctaaaaattattatattaaattatatgagactcgatacttaattggaccaatagcgatattgacacatagaaggatgttagacaacactagtgccctttagcatttctcaaaaaattaatgttattaattacactatgacacactccatttgccgattaattaatttaattaggcaacttattcttcattgtccaaagcagattcttaacaaaccagtcatatgttaatgtgatgaaccatataattattccttttttttttggttattaaatttgatttgcccaagatataaatataacattatttagtggggttagatttgattgtacgggggaccagttcttttgctttacactgacctaggttaggttaattgagagagttgatattattaggtatgagtctaggaccacataataaaaatatggattatatatacacaattatataagattgaccactgtttcactctgattcctactcacttgtcactctcaagtcataacatcacaattctttcctccctcctggccttgccctattatattatcttattattaatttacttaataaagacgtggaaattggaatcttttttctttttttcttttctgatgatagaaatctgaaagagaatatcagatcttgtttgcattctatcctacgtaatctcatatcaccaacttgaagtggggtagcagatcaatatttaatgcacacaaattaacacaaattaattttatgtgtatataaataaataagctgctgatttatgaaaaaaaatattataagctcactcaggtagtggattttctttaaataagcttgggttacttttagattgatttgtctatacccgtttattaaacgtattgtcttcaggttaacacgatataatgattagtttaaaattaattataaactttataacaaatataaattagtgataaatgtgttgaaaaataaatatgtcattaagggctcgtttagtatgttatattgtaatgtattgttttgtgttgtattagtattatttaatacaatattatgtttgacttatattaatagattgtgtaaagctataatatattttcaatacactcgaccccaacaccaactaggggtctgggtccatgtctcgagtccgagtcgtgagtctaggtcgtgggtcccgaatctcgggttcgagtccgaagtctgggtctcagttcaggttcgagttcgagtatgagtccaggtttgagtccaagtcttgggtcgcagttgtcgggtccaagtctaggtcccaagtccaggtctgggtcccgatccaagtcccgggtcctaggtttggatcttgggtgttgagtccgggtgtcggtcccgggtctcgagttcgggtctaggtccgaatctaggtatgggtctagatatggatttgggtttaggtcccaggtccgagtcctgggtttgggtctcgggtccgagtcctaggtttgggtctcgggcccgggttcgagtccgggttcgggttcgggtcctagtcccggtctcggtccccgtccccgtcttggtccccgtcccgatccgggtccgggtttgggtcttgggtccgggtctcgagtccaggtcttggggttgggtctaagcctgggtttaggtctgggttcgggtctgggatttaggtcctctataaatgatttagttcaagtagagacaaatttatcgttgtacccttcaatgtattttatccttaaaatacttagtttcctataaatgatatttcagtaaactaatataattactgaaataagaactcttccatttatgtctattaagccaagttcgaatgaaatcatcattgcacttctatatcaatgcaaaagttatagaatctgtatctatgattagcgctcccactcaattgtactaccatgctcccaagatgtaagtattgggccaatctaattggttagctttaacgaacaagtcaaacaacacaaataacacagttgaagcagaacctaactatctcaggattaagatctattaatctaagatcaactaagt

SEQ ID NO: 298496 - DNA, 1687 bp, Cannabis indica
ccccaaattcactgctcatattcattctaccaaagccatggaagagagctacttagagcttagaaggtctataccccactcaaggccggccctgagcataggcgggctaggtctgtgcctaggacccacctagctcagggatccaaaaaaaatttgtccccgtttaaaattacacaattttttatcagttttgaaatatacaatatttttttctaaatgagggcccaaaaatactttttttctctatgacttattaaatttcagggccgatcctaaccccacttatagatctaaagaataaagacatacttgattagtgggaaattatatacatcaatagttggaggtacatgttcgatcatttcttttatatatgttcaatacctaaagttttttcacatactataagattattcatatggctatagattcatattattctttgcaattcaaagcttaattatgaacatgttgtgtttcaaatattgtacttgaactcttgtaatacataaagtaattattagaaaccattgattatgttattctaatagtgtcggaaattgttgttcaaaaataaaaataacaaaccgaaaaatacaactctatgacaagtgttatgccaaatcctgcttggatgacgtggtgtatcctttgggcgacacatggtgtatttccaagatctggacgaaaagtatgctcttcagtatatccacccaagatgaataagtagtcaaatgcaacaataaaagaacaaggcaaaacttgatgtacgacgcaaatagagttaacatggatgacaataaacagtcgacaccttgcatgatctgaccagggtaaacgagtgagataagtccatttaagttagttttccattctatatgtgatcaaatgcctgtttttaagggatttccatgtgtgagatctggacggaaggatccctcattacggatctcaacagagaaaaagacacctatatcccacctggaaatcagcatgggccggaggttcctccagcgacttacacccaaaaccctcttcatgtcggaccgtcaaatccaaggccacaaaatacaaatgtggccccacgataaacgactaagtatttccagggcatcatcttgggcaaaatagtcaaaaaaatttgcccacacgtggacacaacaaactagcctagtggaggatttcgtgcacccataggtatttatgatcagaacgagcaagttcaatatctctagtatgtcctgtatacctcccaacaataagattagactaaaactactcgtagtcaatcattctcgagcaataataaagatggggcggatagtgcaatccgtgcccaaagacctcgagatcgacgtgctcggaaggatgctccaccgatcgattctgatactgcaaggaggccaccaggtcagtcagtctttaaaagaattagaactcagccggttgatcttagaaacactttaaaccagcaaagagaaaagacggatagattaatccctcctaatatacagccaattaatgtggacaactatgtgccgatcgaaactctaaggggacaacatgcaggtcaagttgatccaggagtgtaagcccaaaaatatcatctcaagagcctagtacagagcctgactggtctaaaactcactgttaggctaaaattagtctaagtttcgggtcgtatttt

SEQ ID NO: 298497 - DNA, 1480 bp, Cannabis indica
acaaagaaaagtactacagcctgtaacatccaaatcacgtgattacaaaatcagaaaatctggcggatagggaaaactctgtaaaattttataaacaacacaaccaatttattgagatgttaatacaaaattataattttgccttattagtgcagctttgatcggtaatacttctagtcgaaattcgcacattgaaatcgcatgaagatgtggttttgacatgaatcttgaagataccgaggatcttaactttgccggacatcttgatgtaagtgttcatgggcatcaatccagcgagcacatcggagtagaacttggtttccgagaggagtcgatccaccatgatagtcagcgttatgttcatccgtttcgtcttgtcggaaggaatctcgtcggcgggaaggtcgatcgagcctacctgttgacccctgtagttcagggcggcggtacagttcttgtacttgaatccaaccttattcttattttttatggacacatctaaaccgagggtgagattgagatcgactctgagcggttggatgtcgagatccagatcttttatggagaaggtgttgacagtcgtggtggggtcctttggtttaaacactgtcaaggctaaaatcaccaataccaagattagtagggagagaacggaacaagtgcagaggcaaatgtttctccgcttccggtaccgggagtggttgggtttggatgaatcggaagcgatggggatggctttgactgctgctgatgatgtttgtggtgacgatgatgtcagtgctacttccattatggaccgttgttttggctttgattgttaattaataatataaaaaaaaatgggttttacataaatatatatacatttcatgctcttcttttcactttagctatactcgtgaggtgatggtagggtgtggactcttattaattagagttgaaaaagccatagtttatttatgaatatttgctttcaaaattttaatattttttttttgaataaatatcataaaatatattaattaataaattcgtttaaaataataaaatgcacttcagaagaacagtcctccaactgaagcacacgacctctagagaagcaagagtctcttgtcaagcaatgagccaacttatttgcagatcgttttacaaacacaaatcaacaaaagataaagccaaaagcaaatttcaaacatcttgaacaataagaccaaactgtgaaggcataaaaataccgctctgaatcacttgtacacacaccaagctatctgtttctaacatgactctagcccacaaatgagttgcaatccaactcaaggcttctttaatctctattatctcagcaatttcgggttgaacacattcaatcttccccttcttgaatgcttctaccatagcaccatgatgattccgagctacacaacccatgcgaaaagacaagactcgaactagaaaaactaaaaggaaaagactaaagaac

SEQ ID NO: 298498 - DNA, 1299 bp, Cannabis indica
cttcattattattatttttctttccattcttttgggacagcttggtaatgttcaatgactggctgtgcaataataatttatttagtttttattactccaaatatattaattccacgtgtgtgactttcatcactaccctctctctccatatatttatatattatattagtattcaatatcccacataactaataatatatatattttgacaaaaaataaatattttttcttttgtttacaaaactaattggtttttgggtgtgtgtgtctgtagaagaatggaacacatattatactatcttgaactaattaatcttctagtacaaactaaagttctcaagtaacatatatatgttactttcaattgttgttatcttcttcccctcaagcagatattattgattacacaaattaaatcattgacaaaattttgataaatgacaatatattaatttttagatttgatgtgtgtagaactgttttataaggtaaaaataatgcaataaaagtacttgtctatatatagtcttttctttttcttttttaaataataataatagtgtttattggataaatgtatagttaattgagattgataattgggtatgcgagagtctatatatccataattaaattctaatatattttttcccagtgataattttgataaaaataccaagacttcaaatcaaaaaataattgaagggtgaataaatgaagtataatttaaataaattaaagactaaagatcctaagttgggtgatgggtgtaatgatggatagtttgatatatacaagagaagaatgagagtgagtgatcttgcaaattgtcctccacaagattttcaatgaaagaaattattatgacatggaaatggacccaactatatatatgtttcattttcattttataattttattttaagtttattattttctttcttttctgaaaggcccactatacattcatacatatcaaacattaatattgtttgctccaagctagatatagagcatgccagcatggatatgcacccttcacattgctatcttttttcttatatatattatatgatgattctttaagaaatagctacatgattatgatgaaggcaaaatttatagatgagcaaattgtgtggatgtaatgtcacaatagcttcttggggttactgaaaatcaagaataaaaattaggacggctattttcagaaaaataaataatatctttttattaaagcacattatcttgacctcttgagagaaagcaaaaacaaaaaaaaaaaacaaaaacgaaaaa

SEQ ID NO: 298499 - DNA, 1726 bp, Cannabis indica
aaaaaatattattaaacacaccctaaataaaataaaataatagcaagaataatccaagtgacactgactgaacatgttttacaactagataaagggaatatccctttcgaaaaagaaaagaaagaagggatatgtattggattaggtctatttgggccaatattaagaggaagccacatgattgcacccacttcctacttgattcattcattgttggttattattctatcttcttttctttttcttttggaatgataaaaaacttaaatcccctcattatttcttaggtcaacttaattacaattattattaatattctcttttttagaaaatattaatattttttttttgacatatattatttgaaactttatggtacatttttttaggtgcattgatatacttctatttattttagcatgttagagaattaattttgcacgataaaaacagagtttaaacagattgttatacacgtaattttttaattttatattcatgtgaaatagactgtttgaacactgttttctatattgtaaatttattaaaattttgcatgatgctttaaataagtataatatatatgaacatgaaaaaaaattaactaaaaaattctcctgtatgccaaaatagtaagaaatgcattgctaaactcttttttagagtgcattgtaaaaacacctttattataaatatttttaaaatactttttcttttgacaaacattattaaaatattttttattactttaatgcaatgtataggaagtaaaccgtctcacaaaaataacataggaaaatttcatggtaaagggggtgcaccgatgcactcttgtatgtttcgatattcatgataattctttggtcaattttttttttcatggtcgtgtacattgtagttatttaagaaattctataaaattttgagaatttcaaaaaagaaattaatacgttgaaaacatggtttaaaaaatctgttacactcgtgaaacttttatttcacacgcatgctaaataaattgtttatacactgcaaactatattgtaaattatttcgaatttctcaatattttacaatatatcttaaataactataacatatacaatcatgaaaaataactagactaatttttttcctagatatgaaaataggagatgcatcaatacaccccattgagttttatgccctaaataaagtcctatttctttatctattattaaaaaaaaaattattttgactattgtctattgcatggttcacatgtttatttcatgattaattgtttaatatataaattatgctaaaggatgaaaccaaaattccctagattgagagatttggataagcaatcgagttaagtattccataaaacaaggaggataagaaaaatcgggtctccttgccttaattctttttctcctttaaaatgcccttgaacacagccattcatcattaaaacataagaggtaccttgtaaaaaaaccataacccacttaaataaacttggagggaaaacaaagatgcttcataagacactcaagaaaacactccaatcggttgtatcataggtttgttagacttttatttgggcttacattaacttttattggctttattaaaatttaagttgattggatagttctttattgtgttagcatatattgttagtgatcaatagttaataggcttagcatctgtgtgtaaattctaattgaaatagaagtgt

SEQ ID NO: 298500 - DNA, 4072 bp, Cannabis indica
ttaatttttggcggtaataatacctaagttatatttttagaactctgtaggtacctaactgttaaaatattatgtcattatccacgtatcattttttttttgaaagatacgtatcattttcttgttggtatattttaaataattatttttaaaaaagtaaaaatttaatgacttgaaccaattaaaaattaccacctatcattttacttaacaattaacagtcaggtacctacaaaagttccagaattataacttaggtattattatagctaaaaattaaacttaggtatttatttgcaaccggaaattaaacttaaatatttataccgcaaattattctataaaaaaaataataaaatattatatttttagatgatgtaaaattttaaaaatactcttataagctagtagagtaagcaaccctgcccctgtcctgcccacctactagaatggagtgggacaactctatttacttagtaaaaaaattcttattattcattgtttaaagaaacatcacctcagagcctcacactctatattactatttttctcaaatggtctgaaacacaaccaaactaattagtacaacaggacaattaatgaaacttccataaataaagtaaaccaaattaaaaactaaagactaaagagcaaagactgttaaatttaacaatgattattttcaatttttttattttgaattcacacatagcaatagcactttactctggcttagccacctgcacacgtaaacttacccgtgaccacacgacgcaccacaccaaactcaaaacccaaaccataacccatgttggaattcccacaatcatcatatcataacaactattttttatggtccagtcaaaatatctctttctttctttctttcccccttaaaaccctcttcttctttttttaagccttacaatataaataaacaaaagaaaaaacagattgtgaccacttaagagtccctctcaaatctcaaccccaagacacacactgaagaagacagaaggacacaaagcaaagcaaagcaaagttaccaaacccttttcctttttcatagactcactgccccaaaatcaaaagaagaagaaaaaaagctgaccccacttgagagaaatacaatacaagacaatatttctgagacttgtctctaaaaactcaggtcattgagacaaaatgacaaacagttataataaattcattaaggtgaaagtgtaaccaaagttaaaaccacttttcttctacactactccatgtattacattacccaccatttctttttatacattacaactagtacaaaccaaaaacaaaacaaaacaaaaaaaggttcacaacccatgaaattagaacatcataataataatagtaaaaatacattaacatatattatatattactttattttagttgggtttttgtgtttagatggaagaagtggattttctaacgatgtaacgataagcagccactttttttctccgggaagtagtgttgtcaacagagagaactaatttgcctggttctttagatgtgaatgaattgtgtattgcttcttcagatgggttgactttccttgacttttccactgctatggtgtaactttcttcattacatggcacaaattctgcactgtactccaaatcccatcctcccacaactatgtcccatgtgattgttgcaccagcctattaatatcaatacaaaaaaagaaaaaaaccccattgttaaaaatcatatctttcttcatatctaacaatcaatctatgattaatggagtcacccatgttaattttaaatgcccaattcagaatacttggtttcaaatgtactagattcataatctttacactttgttaagaatcatgggttaaatctaacaatcaatcatcatgatttaacccatgttaattttacaaaccaaattcaagaaatcatgttaaaaatcaattgataattagtagagtgagcaaatttggtgtattagtgtaaaatcaaacctcaatgccttcaatctgaatgttgactttttctccacctttgacggtgaactcagaagctggttttggaggaccattttgaaaatcgctgggtcgactcagtccaccgtactgaacaggaacatcttcaggcctaatgaacctgatcaccatacaacaacaaacacaaaaattagattattaaagtgtaaagaaatgtggtccaaaacgacgtcggaatgtgaagaacaagaataaaaaaagactgacaaaacagctaaagaggttgtatagttgttgattggtactgtacttgcaatatacatatttacacaaaagttttgaacttgataagaactaaacatacacaaacggaaatttcgacataaaatggaaaacccacttggaaatcttcaactttttatacaaaaaatgcccaaacagaaaaaacccacctaagattctcaatcaatttattaaagcaaagctattttaggcttacttacttgtaaagtgtttcggctacatttccttccttacaaatcacgaacttgctcttagttctttgagttaaaaaaggactgaaaactgagtataacatactgaagtaccatggaacattaatgaaaatctaaaaccaaaaacaaaaaaaaagttagtaaagtgaagaaaagatgagaaaataaggtaaatttttttaatttaaatttaccttacgagcaaccatttcaggataattatcttgaaagagagaaaggatctgatttgaggcaactctaagctctcttttaggcatatctttaagatcagtaacttgaataagagagttaactccattaggtttgaaatggagaagattaatacctctttcaagaacttgaactctccatttgagaaattttttgagtttttcttcatccccaaatattctttcgtacatatctttatctctaaaaactccataagcattgtaacaaacagggtgtccttctctatcgaagccttgcatataagccacaacaccttcaagttctttaaaccccaaatcctcatccaaaacgacgtcggttccgaactcttttctccaagctaaacacttttccaacatggtgagtgaatcggctactctgaaatctcttgctcggagaaactttaggagtatgacgtcagctctttcgtcacctcctaaaagaggaatgttccacattgacgcttctctggcttcggaacaagtcattagcttgtctttcagctcttgaagagcttttttttctgatgatttgaggtttgaaacgacgtatgagtcttctttaaacgacggtgaacggagttgttttagtgttgttacgaagcttttcttgtatggtttcttcgtcgccggtgatgagtccgccggcggtggtgttttttgcatggaaactggtgatgaagcttccatgggtatctctgtttgttttctgggaaaatgaaggaaatgggttggtttaaaatgagatttttttaaaagggtttttgatgaatgaagaaaaataagaagaggaagaagaagaagatcgaaggtctcttagctctggtttttctcagataaaaacgaaagagtggaacagagagagaaaaagaacgagtaaagacagtcttttaacaaacaaacaaataaataaataataaaaattcaaaaataaataaataaatatatttttaaaataaaataaaataaataaaaagtgaggaaaaaaaagacagaggagtttttcacggagccgggatttttgtttgaaattttaaaaagtgccatggcctgtacacgcgctctgttttagcgagtgagagatagttttttgtttgagccgagccgagccgagctgacctataatttaaagtaatttgtaatatgtacttaaacgaaaattttatacaccttccaaaaatttataaagagatgttaatttatatttttaattgtgttaaatttttttaatattttttttaattaatatttttaaaaaatatacttatcaatccatattttaaatattataacaaaaaaattaaaataaaaaattatatgaaatttttttaaaaaa

SEQ ID NO: 298501 - DNA, 1049 bp, Cannabis indica
cacaaaacccaacacatatatcgcattgccattgcctcataagacaatcgacaatcaagaaacttgcaatgccatgtagtacattacttttcatacttttattctagattcatgcatgttggctgttgtccaaatttttgcaggcatgaaacgtgtaatataactatggaagctaagataatcattagcttgtcaatgcctttggccctagctccagtgaggagcttccaaaaaggatacatccatcgcaaggtaggaacacatggagcatcagcgcgtatgacatctctaagtctcgggagtagaagccaagcgccctgtggtggctaggggcttcttggggtatgtctaggtagattgtggaaggattagaatgagttgtatccctgtaaaatgttgtgggagagctttgtccgtacctattagattacagaagtgatggtcatgctttttctaatacgacaccaggtttttccccccacgtctggccatagtacaaggcatgcgcaccatcgtacctacccattgtccagaaaccattttcaagggaaatctaaaaggaaaggtctttgagtgaaacttatggaatctctcaacagtatgggttgtcatctcagatcaccgtacgatggagcggccacctactagatcaacagtaagatctcttctagcaagactagcccagaaagcacgtgaatgatgagattgcctatacatacccttgtatttcataagataaaggacgactctgggaagtgtaatgaacaaatttttacttactaaaactctactgaaattcatagagagcttctttttcttcaagaggaacgagatgaatatagagttcaagtccgtaatgtaaacatttgtaatattcattacttgtcgataagtccaataaaatgtgctcgtggacaaaggatagttaaaacctgaaccgcgtaaaaagctctatgtttattattgattattttatttctttcttaagctctaattaatctgtaaagcccgcttagttaatttggaaattagcagttatttatgttaat

SEQ ID NO: 298502 - DNA, 2410 bp, Cannabis indica
agaaataataggtaaatctaatagaaagcaataaattctggttcatgacctcaacaaatggacaccataaatgagaaggaacagataagaagatgaatgctaaaagcctagcaagctttacaaggatgcgtggccccataaaatccataccttattgtttttataatttttattttggtgtgtaggctggtaatatccaattcaattaaattgaactgatataatttaatttaatctaattacaaaaaaattgtatatctaattataattaaattggatgcattggattggaagataaaagttgaattttaattagattagattaaatgtaaatcttaaaatttaattaaaaatggatcaaatctaattatatttatataaacaaaacaattatttatataataaaaagtaataaaaaataaaaaatgtatattaattatatttttagtgggttttttttgttgaatttgtaatacttggttgttctatgtatttattttcatgatgtgttgttctattttattacttggtagtattgttgttttagttattttaagcttttagttatattacacttataacaataatattttttatgagtattaaacctaaataaagagtgatatttagttgttatgtatctttcttcatatttttatattaatattaaaaattaagtgtgtaattggatatccaatcgaaaaactaatccaatttaattggtaattagattagattttaaggtataattggattagatcggatgataatttttcaaatccaattactaattgaattggatcggatgagtagattaaagttagattggattggatgtccagctctaatgtaggcaaaaagttttatgagataaatgtgtacatgctcatatccagggcaaccacatagaggcgaggaggacactcaccccttgaaaaaattatagaaaaaattgtatatgtaataagttagttaccataaatatttgtaattaaatgttgtaattattaacaaagcatcaacaatgttttcttgaatggtgggttgcaagaaaaactctatatatatgatgcatccaccaggatctgatattgacactcctatttctatggtgtgcaagttacaaaaagctatatatggcttaaagtaggctcctcgagcatagtttgaaaggctccaaacttctctcttgtctcatggctttgcttcatcaaagtatgatcactcattgttcattaatcacataagtaactcaatcactctcgtattggtatatgctgatgataatcaccagtagtgattaagagttcattggccaactttttgtaagtttgaactatgaatattctttaaaaaatcttaaagagcttaactactttcttagcattgaggtcaaatacacaatatatggcattcatttaaaacaaagatgcaaagattcaagtctagctcaactccaatgacttgtggcctcaaactttctgcttatggaagtgcccatgtagaagatgtttaactgtatagattagttgtaggagcactgcaataacttgttatcaccagtctagaatcttttacaatgtgaataaggtgtaccaatttacgcataatcctcttcaaaatcataagatatctcagtggaacaataaactttaggcttcacttgaagagacctcagtaactcgagctcatcgcattctatgatgtagattgggttgcagaccctgatgacaggagatcaactccaggctatgccatctaccttggatctaatctagttggttggtcttgtaagatgcaacatacaatttctaggtctatgctcaaatctagtatagagatagagtttcgtaatttagcaaatgttgttgctgaaattacatggcttaaatctctattttgtgagttgcatatctacattccaaggcccccatctatctagtgtgataattcgagcacaattttactcactgtgaatccatttttgcatgaaaggacaaagcacattgagttgcacttgtacgttgttcgagagaaagttattcaacaaatggttgaagtaaaacatgttccttccattgatcaaatatttgctgattgtttcacaaaggccaattcaagtaccaagttagtttttaaagataaactcaaaattgagattttggattagcattagattttggatttgttgtaactgtattgttagtgttagagattttattacaatggaagaaaatcaagatattacaactctattgcaatacaatacaaggaccaacaaagagattaaataaatgttacaacaatataatatacaatatatacactatatatgttatatataagaaaggtggaagaaaataagaacacatgcaatataaaatatgtatatataataagagaataatat

SEQ ID NO: 298503 - DNA, 2132 bp, Cannabis indica
ctctctctctctctctctcctgtacacgccgatcagggctcttcctctcttcttttcatctctcgcacacacctacaataggctggtcaacaccataggctgtctaacacttgagatctgcttactaatttatactttgtaatcgtaaaggtgctatagtagatcccacctatagtgatctagatagtatttccctcggtataaatacaacccaaaaaggagtaattcattaatcgctatcacaagggggtcgaacgtctataacaaatctttgtgtttattgcttttttattctatttgtgtaacacgtggcaaggatcagatctacacgaccgtgtcagttgatcattttttgaggtaaatagtttggttctttcattgagagtgtggatatcgtatctgattaaacaccatggttaagacaagaagaatttctagtgcaccatctgcatctttaggtctcgctcaacaccaatagactgtaggtcaaaacactcaagttccagtcacaactggaatcccgatgaacactgtagaagtgatgaatcttgtcaccgcaaccagcaccacgactctggttttctctagacaaagctatagtgagctacctggtcctgcagcccttcacctgctaggtccagcaccccttgatctaccaggtcctacaacctttgaccgaccaggtcgtgcagcgcttgacatgccaggtcgtgcagcccttatcctgccagaccctacacaccttgtcttgccaaatcctgcacaccatggtcggccaaacctcccttgtaggtctatgggtggccaagattacttagcaagactcaataattgtcagactgatacaagcatcccagtgggtccgagtggcaggcccctacctccatgggaggaccctccacatgcacctgcaactgcaggaagagtccttagggggcacctcctaagaacaacaattgggtttaatccctggtactatgtaggacagatgagatagggaatcaaagcttactattggcaagccccgcgtgaacttggaagaagaccttgagttggccagactcagagaagttataggtcgtgcaggcccatttgaagaactacgtgctgctaactgcgatgtatttgctcagtagagacgtgaattccttgaagaacaacacattgttgatcttgatgtactcacttagcagagataagaatgcttaagattgatgggtgattaacaatacatcctttgatctcaccaagtagagttagatcaacgcaacagagaggccatcgatctaataaggcggttcaaccagagaaccgatggaataggctaggatctcattagagatcaacttcaagaaagacttgttaagagatgagggagggtctatcaatatgctgatcaatccagttccccacaaactaggacagatcttccctcgccaaagggaagatagacctttcctcaaaggtcaaacagcgaaaactgccaaatcccagcaaccagcgacatggatgccacctagggatctaaagctcaacaacaaccccctctatctatcctatggctagctaaccaccagcaagagctgtatggccagccagacttctccagcatcacccatggtcggccagaatcctgcaacaatacccatggccagacagactcctctagaagtccctatggccaacaagagaagagcattccctctccaaggggagctagtcgccaaaaggtgaatttttaaccgacgagggtagagagcaggtggaaacatcaaaaacaacaatttgagaagtgaagttcatcactttagatagttagatctaccaaactctagcaattggtgtgatctaccctatgtcaatgcacaagttccaccagctaggcagagattcgtggacggccaggccttgcccaacttagggttgactgaccatgtacaagcactagactcagggttggctggccttgactataccctctcccaaggtatgggtggccaggctctatccaatatgaggctacaacttaattaaagaaggtcgatcaaccaagcccctaaagcagcagatccttctcacaatcggatcaaatacgagacgtgctcaagggcctagtgttgggttttgtgccc

SEQ ID NO: 298504 - DNA, 4029 bp, Cannabis indica
tcttgctcaaatttttgacaatggtcttcacaccattataaatctcaggctggtcccttggggcaatgcttattttctcaacaattctaccaacaccacagtttgccaggttccattttctctctctctttttctatatatatatatattttataattaataaatattatcactcaaattggatattaagctcagttagtatgatctcaatttccaccgacagattcagtgtttgcaaaaaatacccatttggggaaaaataaaattaatcaaattatttactatgcatgtttggtttggttatgttttttcattattattaatgattgttgttatttatttatttatttatttcagaatgggtcagatgaatgcaagttgaatacactacaagcctgcactattaatgtgttgcatgatgtggtttgagccttattatatgctattattattctatatggtttatttatttaatcattgttcattattggtgttaatttaatttaagtgatttattttcttctaaaaaaattcagaacaagcattttgctttgatttactgctttgagtttctggccattgaaggaaggcataaggaatggggaagttgtttcacttcattgggtttgcctccaaaattggtcttggattgcttcaatagcttaaatggaacattggtacttcttttaatcttcactaaaaatcttttttactattaaatgttgcataataatacgtagacatagtagaaattaaacagaatattcttattgttgttgtttgagttgtcaaaaactttattcgggttcgttcggtacaccatattatatttaaatttcattatctgactttgcagcttgaacaaaaacatgctatagaaacagcacagctcaatcctcctcacacaattttgccttgggtggttgttgataatcaatctattggaaatgtaagccatcctcaatgccactcttaatttgtttttttgtttttctttttctataagtaaatataattaatcacacttatttatctgatttaagcaggattatagaaattactcaagctacatatgcaaggcttataaaggtaacaaagtaccaagggcatgtcaataaattttcttgtggcaagaagagctgattattttgggttgtctttgaagatggtcatggttaatcgtgtcacatcatatacatatatattcatatattggctatctttgtaaagcttggataaataatgaagcaaaaatactatattagcatatacatatacttgaagcattattttactctcaaaattcaaaagacaattgggaaatatgactaaacctgattttgcaagaagccaaactattattgttaatttaagtgggccaggcaaatcaaatatgtgtagaagttgctttaatggagaaaaatattaatgacaattgatgagaaaaaaaggttcactaattaaacaaaatgtgcataacatgagttttcatcaaaatctaaattgagcttcaataattacatgtaatttatcaggaataaaaataggtgtaattgatcatagaaaggaagaaagaaagaaagaaaacaaggcagtgagaagaaaacaacacaggcaattaggatttggataaaaattctttctgattctatcgcattaatctcgtcgctaatgactggttaattgtgtgttttcacacttcacatatggaagaagagtccacaaatcacaatcaagtgccataaacctgaaaacattaaaaagaataagcaattgacttgggtatatttgaacacctttgaaatcctttcttttccaatattaaccaaattatgcaaatgcaaactagtgatgatccaaataccaaatgacaccaaatgtttaatttggtatgtatgccaatagaaccaaataccattcacatatcacagaaacttactgataacagcattaatctgagggtttgaaataacttacccctttatattatcattgcagaaggaatatgaatggtggatttcatgaacctatcatcttccaaatgctatcacacgtatcaaaggaagtcatctgttcttggtcaaattcaaattgcttgactagctttttatccctgtcgacaatatctgtaattgacatagctgaggagaacagaattatctaccaatgcctgaacatccttcggtgattattttttattagaaacacacaagatattgtaagaaagataaaagaaataaagactagttgcaacacaaggatacggcctgaaactttcgacgggtcatacaggtcaggaataatatttgtgacagatgcaaacatagaaagtgttctcctgcaggatcagaagaacaagcatcagtttcggaccaagaaaatcgatgagtcataaaacttagattgaaaataacttaaattcactttaacattgctggtcgaactacccacaaacattcatattttaacatgaaaaatttcaattattgtattacaaaggatggcaataatgaagcttgactaagctcttaaatgaacagatcatgtgattccaacaaattctaaaagttgtaacttaacaccatgaaagtgaaaatctaaaattaattaaacacaaaaggagaaaaagaaaaagaaaaagaaaataatatattcatagactgcattgctcaaccaaagatgacatttttcttcttttgttaataattacactgtatgcacaatgaggcataaaaagagattgctctacttactctgccctacgctcatcttgcttggattccctcaatttctctgtcttttcctgaatagatatccttttgcattctaattcattaatttcttcagtgataactgtgttaacacaaaacaataccagaagcacaaaaatcagcaatcagcaaaatcaaagttgaaatctaaataataaatatgcaactgactatatacttatctaagctcctccaaaagcaaacattcttcgttgcattcttcttctaattctttgttaagaaggtctaattccgcatcagaaacaacctcagattttgcagcctctgttttcttcttgcacgcagcaattttgctctcgtaatctgtttaataaagttgaaaaggggatgtcaaaatctgtgcaaaacagataagaacaccctgatcttagacattcatgtaattgatctagtgctcaactaaaatttcatttcaagtctacattatagttcaaatagccaagactatttcaaatctgagaaaaaatagcccgagaagttattccatgaagaccgatgcagagttcaaacagccatgtctcacatttaactttagatattctcataaacattgttaattgacccttttcacgaaagtttttgaaaaaccaggaatttcataattaagccttacaagttacaactacttcattctgaaaaagttgaaaatagtttcatttcaagaatcaaactttcgaacttaataagtcatgggtcaaagtccactactcttttaagtccaatttacatttcaatgatagaaaaacaaacaatattgcaccaaatatttttttttttacttcaattttctcagtaaacaaacagcaaaggtgaaaaaaataaaaaaaaaaaaaatagaccttgaagcatgttttgaacctcattgaaatcagcgaggctggaagatcgcaaggtcttcacattatcaaaggactgcaccaagacgtcaatttccctcttatccttcaaaaccctaatcatatcatcgcagtaagaaatcgacttttggctgtcgagatttttcgaaagatctcccattttcgggattagtaacagctgagcttcaaacactgcagttcaaagagcataacgaaacaatatattggtgaagaaaatcaaataaataagtcagagttcgttgcattgcatgtgtctgtttggttgccgagaaaattaagaagagaaagagaaatacttacgggaattttagggtagctttttcttcgcgtgaagtgatctttgtctactctgctccggc

SEQ ID NO: 298505 - DNA, 7193 bp, Cannabis indica
tttttaattataatttaaaaaaaaaaactaacagaccttaaattaaggatgaaaaatcgttaaacaagaattgattagatagccaaaaaaaactgttactattcaaaaattggatttcaatttttagggtacaaaatgtgtgttttttttttaataaaataatattatgttgacggaatgagtgttttttttgaataaatttttgttaaaaaaacaatataaattaattgggaatattctgttgaagttaacggaggaaacaaaacaacatcgttaaaccaagaattgccgttagatagacacttttaatatataaagatatatatttcaagaagagacaaaacaatgcctctttctatgcacatacaatataatgaaatgattactattattattactattattttttttattattaagaatatcatattaactattattagtttttaccacatactaattattttacacacatatttaaactactcctaatgcaaactcaatatttgtacatttctcaagtcaatcaatgcaatgaaaaatcagaattattgtcgatacgcaatttcaattttttgccagttagcgtgactactcttcaagtcatccacacttgacttaaaaagtaagggacaaattgagtggccaaaaattgcacaaggccgaaacgccttttacgacccaaatcgaaattacaacccttcaaaccaagttagtaaatctaacccactcatcaaaaatacattgggctttggctaagatacaaggcccaaacgagcccagcagctacaagaccaatctgatacaaaggataggaacgagtctataaccaaagcagaagaatcgatcctttctcctagaaaaagggaaggcaacctcccatgtttgttcttcaaaataggagaatttaaccgtcagaggctctataaaaggagaaccgacgagtcctaaaggatcatctcatcttcactcaccccttcggctggcaccatcctggtgtcccaaggtctcaacggtcctttttcttttattctacaggttttcagtgcccacgatccttccattccgatcattgtagatttttccctctacaatacccaattgaacaaacctttcgcatgtgaggatctggtctagcgagtcaagaagtctgatttgtcaaacatttgaaaggttgaatattgttcatacagctacttctaaacccttgccaccacagcggccgcatctcctattcccgtatcctgaaatcatccccacacaaaatgtggtggtttcaattcccattcttcgatgtggggtgacactgcccttccatccttttacaaaggattttctttcctgttatgacgtctctctttttcagctaactcacaacagttattgcataatcttagggttttatgagatgtatatggattatgcttgaggggagccaacagtcaaagactttggcttcttttacgatataaggagtgttggccatgacaatggcttcttctagtttagtaaatgggacaactatgaaattaatggggttgaaggcacaatttctaatatgggggattacatatcgaagtagttctacgtgtttaagatgctaggggtctggattgacttcaatcgctcacctcgtacgtcgcatacttccatacttagcatttatttttactgtttttatagatgctaatttttgtttccttttatcgcagatagaccagttcgatctgtattggacccaactcgtctagaaatcgcaaaggttttaagtggccttcccattcaagatcgcgactggcctctattgtgtattactacaaagctgcgagaacacaagcttatcgcataggacgctaaacttcagtgagaaccagtgtataacgagccttctaggaagcgaaaggagaaaatagacaagcttctatccaaacagagatcgagaccaacatgaggtaatataatctagtatgttgaatatcgttttaccttatcagatttttacttatggttttccttacaaacatgacattcttgaaaaatgctcctgctttcaacagcaaacccaaggctagtactgcaacgccatctcttacgatttcccaaaagagaaagagtagcgtcattcctacttaggcagctaactcatcgaagaaacaaaagaaagtcgctcaggacaaaaggaagaaagtggtgatcgatcctgctgtcaaggctcgtgacattacggttctttagaataagttcgtgagcgacgagtttgtttccaaagtgaaggggattcttactgaggacctactacctagttcagttggactcacctcgcaattcatgatagtattctcataggcttttgttgcatgtactaaggatcacgagcttcttaagaaatagaactcgattcctctagagagtttgaagaaattgaagtttgaagcggttgctaaggacaaggagattgaagttcttggaaaagccaagggtcaggtggatcaaaggtcaaaactctggaggcgcgagtcactgaacttactcacgatcttgagactgaggaagagatcgggaagaaatagtatgaccaggctgtctcaaattacatctacaccaccttgaccaagttgcctgatttcgacttcgtggtatttggacaagaggcggttgagatggccaatgcctttgcactatgtcgcctaccgagactcaagtgttaggtgagaatcttttccctgacgatgttaaagatgcgaatactgctgaagtcccagagggtacaagcaaagtcgtggacaatcctaagactcctattgcttagtcttttttcatttattttgttgaactttcttttgagcggtacatgcgtactcgcattttgtatttaaaacaacctatttcgtcatgttattcgaataatgtatcttctcgaggatacttctgttgttaagtacttatttgtcgctgaattgatgtgtgtttttagctaaagctaattttatcctcgcataattcttcatcaatctattcataactttttgtgatgagtgtttccaagtataaatatgagaaaatataaacactttgaaaattttagaatttccaaaaattgaggtttcattagataatcaatagtacaatatgtaattacagtccctatacttaggaattttatgaaataaattgactaagtatatacatgcgactactatagatagtaatattataaactttctccattccaagctcaatcaagaagtaaaccattaagatcagataatcagtaagtcgcattgccaattttttcagtgattagataaggtccttcccgattgttgctgaatacgccatgcatagaattgcgtgtattaggcatgacattttacaataccagatctcctgctcgcaaactcttttctttaacttttgagttaaaatagcgagttgtgcgttattgatagaatgcattctttaaatgagactgatcgcggttctcctctataaaattgagttggatcaactaatttttttgtattagtctcgacattgaaaaaatctcttcttaacgacccagctcgaacctcgactagtaccatggcttcacatccatatgtgagtgagaaggggatttcacaagtcgttgagcgagtagttgtgttgtatgaccatagaacttgcgtaagctcttctggccacacacctttcttttcttcaagcttatcttttatagtttgcttgatcactttattgattgcttctgttttcccatactctgaggatatgcgaccgctagaaaagctttctgaatccctagatcatcgcagagtttagcatttccttacaatcaaattgttttccgttatcaaagattaatttgtaaagaattccaaacctacaaataatagcacgatagacaaactcgcataactttgcagctgctattgttgcgagagcctcagcttctgcccactttgttaaataggctacagcgaccaaacatattttactcctcctttctcgttaggtaattcaccaattagatctatgccccagactgcaaatggctagaaactagtgatagagtttaactggcttggtggcctgttgacttaggtcgcaatttgccggcacctatcacatgttgtagccaaacaggttgcgtctgctagcaaggttggccagtaatatcattgtcgcatgatcttcaagacaagggaattacctccagtataatttccacaaataccaccatgtacttctcggagtatatagtcgcattctttcccatctatacatttaagcaacggttggctaaaactcctatgatacaatttgttgtcataaattacatatcgagcagctcgatatcacaactttttagcctcaagcttatcctcagcgagcctccctcttgttaaataggtaacgattggggtcatccaattgattttcttagttacttcgatttgcatcatttctttgcgatgaatagttagatgggctaatacatcaacaggaattacatcgagtaattctgcttctcttattgaggcccaacgggccaaagcatctgcatgaaaattataagcacgaggtattctactgacaataacttttttaaatttattaaataactcacatgtataggacgggtacttggctaagcgtcctcctctggccaaatattctcctttgatctgacaagctagaatttgcgaattgttgaatgcttcgaggtactcgaccttcatttcaagagtaagatttaatcccgagatcaatgcttcgtactcggcttcattatttgaggcagggaatctgaatctcaagccagcatctaatttggctttgttaggacttattcgtattattcagccacctaatcttttgttatttgacgccccatcaacgtacaaaatcaatctttctcccgatggtactttgcgatcaactcacttttctacgataattgctacttctttctttgagaactcaagaatgaaattaacaagggcctatcctttgattgtcgatcacggtttgtatttggtgtcaaattagcttagctttactgaccatttaagcaactatcttgacgcttcaagttttgctaatacttgtcgcaaaggatagtttgttagtaattcgatgttgtgtccttgaaaatatggttgcaacattttagaagcaaccaccagtgcaaatgctagtcgcttcatttgtggatagcaagtctcaacacctaataggcatttacttacatagtacaccggatgttgcctacattggtcttcgtagagtaacactgagctaatcgcgtatttggacactactaggtagatcgataacacatttctaggcatcagcttggatagtatcgggggttgccccaagtgtgtatttagtccctgaaaagcctcttcgcatttatcagtccactaaaactttttgttacattttagaatctaaaaaaattctttacatttgttagagaaacctgatataaaatgatttgacgcagcgactttacgtgtgaggctctggactcttttggtttggtgggagatctcatctccaccagtgcttttatctttactggattggcctcgattcctcgctgatttagcataaaactgaacaactttcttgagcctactccgaaaagacattttagagtgttaagttgaattttgtaatgccgcaggattctgaaaatggattctaggttagcgatatggtcttgtacatgttttgattttacgagcatatcgtcaacatacacttccattgtcttacctattaaatatgtatatatcatgttaactaatctttgatatgtggctctggcatttatcaaaccaaaaggcattactttataacagtataaagctcaatcaataattaaggtggtatgctcctggtcaggctcatacatcgggatatgattgtatcctgagtatgcatccatgaaactaatgagttcatgacctgcggtagaatcaacaagttggtgaatgctcggtaaaggaaagctctccttgggacatgctttatttaaatctataaaatcgatgcatgtgcgccatgatccattaggctttggtacaaggaaagggtttgctattcagtttgagtaaaatgactcatttatgaagctgcatgacaaaatgcggtccacctcttctttaagcacatggtacttcgcggggtccattttgcggtgcttttgtcgaactcctcgcacttcggggtcaatgttcaaacgatgacacatgaactctgacgacattccaaccatgtctgaatattttcatgtgaaaacatccaagttctgcttgagaaaagtgaaaagattttctcgctattgaagagttagttcgaaactaatttttaaaactttattcttatcaaaagaatcaataggtacctcaattgtttcttttgcgacctgtgccttattggtatagtcaatgattcaggatccaagtcgggcttttcaacatgcgggatttcctcaattctgaaaacttcatgttgaggaggaggggcttcaagtaaatatataacatttactgactttttcttttctgcgagtttcaatgctacgttataacattccactaagtctgattggactcctcgtactgattccacacccgcgggggtagggaatttcatagtgagatggtatattgaagtaattatcttcatttctttcaagattgggcgacctatgaccgcattgtatgagaatgttggtcgattacaacaaaatcggccatcgacttagcaataataaggacagtccctaatgttatagttgttggaattattttaccaggatcttagatctactcacaagtatgttaattaacatcctaaatatgaacttctaaaacgattataaataaacacatataaagtatgagaaaccttacattgggtgcagcggaataatatgtctccttccactctgatctctaacccttgcatcctttctgtcgcagagtattatcaagatctgagcccgaatgtccttcttgttgaattgctttcttcacgatcttccacactatgattgaggtactacttgctgtgtgtgggcactactctatcactaagagcattcgaaacaatcaaggaagaagaaggaaagagagtggcggctaggtttagtgtgatggcccaggtttttctctgaaagg

SEQ ID NO: 298506 - DNA, 2067 bp, Cannabis indica
tatattagcataacaagaattctcaaaattaacacacttcgattatatataatattgtcgtacttatagtcctaggagtgtactgcaagcattgtactgcactacaaattgtactagctagttagtacttgaagttacaagacaatataaaatcattcttcctatgtataaacatgaacgattatgttcttcaccctcctctgttcttcttagatccattattttcgtcaaatgatgctcgcatatcgatccacgagactatacacatatagtcgtgttattgcttatatatatagatgtatgtatatgtatatattgtaggtgagatggaccattaaggtgaattaggtgcggtgcagtggagtttatccaattccagatatatggcttcagatatcaaaaggtttgtgttacaacttagaattttcatttctttttatggttcttattactttgatcgagaaagcaaattgttcgatttgtggtagtttagtttataaggaagaccaaaatgtagaaaacctgatcttaatatagatttgtaggtccatccacataaaacttcctttcgtttactctcttttaatttgctacatatcaacaataagaataaaaattaaaaaatctgttaaaaaatctcctttaattttctatgtactttaaaactgattttcatagaacgttttgaggtaatttatgtcaagacacagcttgaaaatagtttaatatatccgaaactcacattaacaattatttgaaaagagcaataatgccattgttaaggattttagataaactgacattaacaataattatttgaaagtctatataataataatcctttgttctcatttttgttttaatatcaatgctaaaagaacagggcaaattggatatgttaatgtatatatagatgataaataaacaaatttctgaaagaaaaaaacacacgtatagagagtaccggcctcacacattaattttcgtatgattattaagataaaattaaggaacacacgaagtaaaaaaagttaagaagaaataaaagataagataattaaatttaaattaaagaaaatggagaacatatataaatagatctcagttacattatatataggtgcaacaacttaattaattaacagtgactttgccaaccataccagctccctggtgaggagcacagtagaaggagtaagagcctttctcagtcaaagtaacagcgtaggtctctccaggggcgttaagaaggtcttcctcaggcatggaaatctttgatgcgtccacaccacttggaacctcgtcctcgtcgaaaacaacgttgtgagggaaaccagcattgttcttgaacacaatcttatctccagagctgatggtgaagttgttaggctcgaataccagcccaccgtcactgcttcccaacaaaacgtcctgagccatggcgctgctcgcaagtatggcgctagctgcggttgcagccacaataacacccacgtccttgagcgaagccttgatcaagctcatcttcgccactggggtgctgactactttaacaccagtggtggtgttcatcattttggtggagccggcggtgaccttgaggccggtgaatgatgggatggtgactgatgcagatgtcatggtggccatggtaagtggtgagagtgtggattggattggattggattgagagaggggatcaaggggtgatgatagctagaggagaggggtttataaggatggtttgtgtggtatatgtttgaggaaattggataaagaatgtatgtacgtacgagagtttttatcagatatcttgggaatgagtttcattggttgctttggatactatcccgttgacgtggcttgttgttttgtgatgtgaggttgagaatatattccctcttttgggccattttcagcccaatcttttttactcgacccatcgatgggctcactgattgggctatattgccaacccaattatcactaccaagtccaaagagtcttattttgtcgggaacattaaaggggtaagttgaaaaatgcctcttttattaatcaattgac

SEQ ID NO: 298507 - DNA, 4412 bp, Cannabis indica
taagaacatatttaaatcatcaagctttcttaaacacaaatatattgcattcggtattcacttttaattgacaacattataaactataatattagatacacataataataataatctcacctaataactaataatattttttctttaatttttaatcgtatcactttcaaataacattaaaaaacctagcataaaatttagtatacgtgcttcgcacgtaggtatttgctagtatatatatataaatataaggcgggaaatgagaactgagagggtccgtgtggcacgcatgagttgctaattgtgtttttataaaattaaatatcggtacccatatatttttcaattttatttttcagttaaataagccactcaggttttcatttttttttctgagtctactaatagaattttattaattgatatattagaatacagacggagttattttttttataatgaaattatatttatatacaatacaattcggctatgcgtattttattataacctacaatctctcacatgttgtttgctgatgatagctacgtgtattgtcgtgctacggagcaggaagctgataatgtaattcgcttactacatatctttgagcttgcttttggacaaagggtgaacctcgctaaatcatctgtgttcttctctgtgctaatactccgaccgattggcgtaagagactttgtcaaagattgggtatggtggcttctaaatgagaatagcttgtatcttgggctgtcatgcattatcgatcgaaaaaagaaagccatcttacgctttttaaaggaaaaaatggtaaaaagaatcttgagttgggaaggcaaatttctctcaaaggcaggtattgaagttttgcttaaaattgttacacaagctctttcgagttatgcaatgtatgtattttttatccctttagaaacttgtagcaaactagaaaaactcatggccaagtattggtggggtaatttgaagaaatctcgaggaataagttggatgagttggaatcgtttgtgtaagcacaagagtttgggtgaaattagttttaagaatttacatgactataatctgcgcttcttgggcaaacaagcttggcgtttgcttctcaatgacacatctcttgttagttaggtttataagagtaggtattatcctcatgggatattcctttcagctgtgattggtaataatcctagttttatatggagaagcatctttgaaacacaaagccatattttagtaggctctcgtatacacattggcactagtaggcctgttcgtattttgaattccccttggcttcctgacacccttaactcttgtgtcattagctcacatccaagtcttactggggaaaatgttaatcaactaatgatatgtgatgacaaccaatggggtgaggatatcgtcaaggatttatttgaggatagagatagagaccatatcctaagtattcctctcaattcgactaacttggatgataagtggtactggcttcacaaaaacttgggaaactactatattaagagcagctatcgttggttgcagtcctctaaaggcaattggtgtatagctatggaatcgaagttatggcactctttgtggaaaactaaagtccccctgaaggtcctacactttgcttggaaagccattagtggctgtcttcttaccagacttcagcttcactccaagcacataccttttcaactgaaattagtgttctgctccagggaagaagaatcgattctacatgtactagtttcctgctagtttgctcaatcaagttggaatcgatctggtgtgtccctcggcatggtctctgccactaattttagagactggttgttgaatgttttgagtcgtggttagccttcgatgttcgaggaagctctaatggtttcttggtccatatggaaggataggaatgacttcctatggaataagaaaatcaatgttatagctaatgttattgtatctgtacactctgtccttaaccaatggaatttggctcgctcaaatcgctttgagctgctgccagtaattttgcatacatacagtagcggtgagcattggactgcacctgatgttggttttgttaaggtcaatgtagatggagccgtgttcgctgcctcacagtcttatggtgtgggtggtattgcccgtggaaatgatggcagggtgattgaagccttctccttacacaaagccaactgtgttcatccaagtttggtggaggcaattggtgtcatagaggcactaagttgggttaaaaaaaaaaaggttggcaacacactactattgaaatagatttgcttgtggtggttcaagcacttgaaaacaatattgtgatgcaatctgtttttggttctgttattgattgctgtcttaatcttcttaaatctttggtcaatgttcatgtttgttatgttaaatgatctgctaacaatgtcacccattgtcctgctcgcggtgcttgttattgcttagattgtacttttgttagtagtaatgttcctactgctattaacaatgctgtaattgccgatttgacttttctatcttaatgaagtgttctactttcctttcaaaaaactatatttatagacactaaacctacactaccaaataaagattgttgctaagaaggtagctaatcccctaaatcaagaaaaacacacaaatgatattaggttaagttaggtggccgggttcgtgtccaaggtccgtgctctaagttcgagtttgggtttgagtttgaggtctaggtccaggtttggggcggggtgggggtttgggtttggggttcgggtccacaaataaaagaagtttcggcagtggaaagttctggtgcacaacttcagtaaaaatgagctgtgcaacgtcagagaaaaagtagaagaaaatttgggttgtttgaaattttggctagcctgaagctttaagaaaatataaggataaaaaattttgaagaagaagaatgtggggttttaatagactagctgaggcgacacaaatcgtcaatcatctgacgatcccaattcgaacattgaaaaaccccataatccaacggttggggaacaactattagatggacaaacacaaaaatacagttacactactcaagcaccaatctaacaccctgcaattaataagaacatcaaaatcaaataaaaaattgaatcgtctttatcaaaaagagaaaaataatgagcaacatttaaaattttcacgcataacatgacatcagcactccaagaggcaaatcacaagtctcattttgcaaaattgtgaaaaaagacttgggataaatgttgcctagaattttttttaaaaaaaatacgtggcagctcaggaacaagcgaggtggcaatagaaaccacactacagggcacaccatcttaatcactcccaaagtttatcagttcaaaggaataatacagattggtcatctccgggagggtctaactagacaatcggtatatcttcatgtctcttcctctccacgagtgaattcggcctggaggaggatacagagacagttgcacactgcttgaggctaaatcactaaatacacatttaattcgacatggaaaagagcattcgacaccttacgctgaacaaatgtgctcaaagttttaaactcgtaattctttgatttcacgataccttatacatcaattaacaactacataatgaactgtcaaatcataaacgagagataagtctaatctcaccaaatacctatagacaaccaaatatatcatgaaaagtaggtaaacatgccctaagatcaaattgggaaattgtacaaagcatggtttatacaaacacgacaatggtgaccttttaccacaattatgagcctataaatactctaatgatgcatagaaaaagagattgaaaaattctctgtaataaacactttcattaatagtagtgactcgtgaactaagactcattaatgctccaacaacttaaaatattctttcttctaacatgcattagttactttacacaactctaattaattattgctgaaaatcttggtcaataggaagaaacaaaaattctaatacagtaaccaattttatatatagcaaatgaaaaggggagttctagataatttttatattataaaaaaatatatatatttaatttatgctaggtttttttttttttcttcgttatatttttaaaatacatatataaaataaaaaatacatattttatattaaaataaaaaaaagggtaaataccattttagaccctttgttttacaaaagttaccaattagaccctgtgttttgttaaatgacaaaatagaccctgtattttctaaaatagtacaaatagtaccctgaattgattttttgtcaaaataaagtttaattataatccga

SEQ ID NO: 298508 - DNA, 6068 bp, Cannabis indica
attctctgtaagaaacacccacctattaataacaaagactcgtggactacgacccattaatgcccgaaccacataaaaatatatgcattgactcttcctaagctatcattattacattaaatatttggttgccaaaaatctcgatcaacaatatatatttacattaaaatatcagtggattaatatacacaaacaagcagctaagactagtatgcaatagagtaatcttaaaggaaacccatggtgcttagcaccttcatgaggtgttatattaatactggtgcagttcaatataagaccttttctcatagtgatgttggtgcgtgatggtgtctaataaaaatattcatatgtaacacatatagagactctaacataatgatttttttcttctggattttctctccagagcaattccacaacatgtactccacttggggtgcttgctgaagttgttaaagcattggagcaagtggtggacttaaggattttaaagcaacgttgctattgcatgtcaaataaggtgtggtggcagttgtggagtagtggtaattgtggtgtggtgatgatggtggatgaagaagacgaagaggaaggagaagaggttactagtttaagaaaaagaaattgaaatttttattttttattttataatatttttaaattttcttttttttatatttaaataaataaaattatggaccaacaaaaatatgtcttgtattttgtcaaaaaaaaatatgtcttgtatatatgtgtatagtatacaagtgtatatgtggacaatgagacagttcacgcttacaactaattgaggaaactagaagcacattaaataacaaaaacataatcaaactaaggtttgtttagcagactatataaggagtcatgttgcattaaatgagaagaatgtggttgaataaatttttgtatgtactaattatgtattatttattacataaaaaagtagtttgtatttgtacgtattataatatttagaaatgtttcgaggccagagttcagagttggggaccgatcagggggctgagggctggggttcaaggttggggtttgatttgaggttcaaattttggggcatgggtccaaggctgggtggttctggggtctggggttcgggtctgagtccagggttagggttcacatccgagatcgagcctacgccggggataggtatggggcagggtggagtcagggtagaggtcatatatatggtaaatttagtataatttaatttatatatcctaatacaaattattaataccaaatattatattatattaaaataatattatacaatataatgcaattcaacacaatacaatagattagagcattgttattgggcaccagtggtgtttagcaccttctagatgtgtcgtcttgtaattggctagcgatactccttaagagttattatattaaattatatggtactcgatacttagttagaccaatagcaatattaacacgtaagagggtgctagacaccaatgatattttttatcatttctcaaaccttaatgtattagggaaaaaaaaaaactatacttgatgtatatccacatttataaatggggtttagcttttctaagtcccattaaagaatattttcgttagatattaaaaataaactgcataaacaatggtcaatattaattggtatctagtaaggtcaaataagaatttgaccaaaagtaaacttttacaacgtatggtcctattttagtcccctagaataatttgtttccaaaaatagctctctaatatgttctgaacaatcgttttattttattctttttcctgtttgtttcgttataattttagcatatctgaaataatgtatgatcaaaagttggatggatgagaccaaaatgtgttacagaattcaatgattttgatattgtgaatgaaagaagaagaagaagattagatggagctaagtaataagtcaccaaataggttgaacaacttaccgtttaatacatgcattgaattacctcctcaggtaaactcgcaagggttttggaagaagcagaatcaagataatgggttgcttaaaaattcattgccagagctggaattgcagatagtcatgatattctgcatgtcccactccttccatttcctcttcaagcgtcttggaattcccaagctatcttctgatattctggtatctaactaatatatacatctctataaaataatcaattatatgttaaatcacatacaaaatctattgaaacatacacactttttcacatattttcaggagaaactatcaaataaaggccctaattaaaacttctttcttatcttctcaatttaaaaacaaatgtcaaaatatattttttttatgttcaatgtagttacaagattattattttgtaaaattttgaaattttttgaataatttattgtgctgaaaataggtttaaaatttttttaacacagggtaatctaaaatattaataactctattctcgaaaaaaaaaaaaaatatccaaatttaagattgtaactataaagaatctcgttagtaaaaacaaacaaataaataaaatattgctgcatgtgttttcatacccaaaagtcatttataaataattataattatataaatatatatttgtatatatataaaggtgtaaatttgtgagacattaatttgttatagttaatatacaacctccggcctaaaaaaattgttatataatttttccaagggcaaaagtaattctacttagcaactcatataaaattataatctagattatttgatataatatcatacatatatctatagataactttttacaaattctaatgaaattccaaattatttaaggtgccaaaacttatttgtttgtagtacaaccgtgttttttagatattaagagcatgtttggtattgttttttgttatttgttttcaaaaaattatttttaaaaaagaacaaaaactagtttttgaagtttttaaaaacaagtcatgtttagttagtgttttttaaaaacaatattgaccaaaagtgaattgatttttaaaacagaaaataatattttgttgttttcaaaattcttgttttgttttctgaaaactgttttcaaaaaacaacgccaaacaagctaattaaattgttttccaaaaacaattttcaattttaaatacaaaaagcagttatttagttatgatgtcaaatatgcagtaaattattcataatttttcaaacatgtgggattttttcattgatcaggaataatgataataatattgattaattatggtttgcatgaatgcagactggtttggttctgggatttgtactaatagacaaacatggaaacccaagagacgagactctattcactccaactggtcaacaaatccttgccactttatcaatgtttggttatgctctattccttttcaccattggtgtcaaaatgaacattggactagttacaaagtcaggaacaaagactgtcacaattggtgttgccacactttttgtcccatttttgtgtggattaataaccaaagaattcatagcacaacatctaacacttccagataagaacaaactctcttttgttttcgtaacacaatgtcttgtcccatttcctgtcatttctaatctcatatcagatctcaatcttctcaactcagaaattggtcgtttgtctatgtcttcagccatggttagtgacaccatcagtttctttctcacagcttcttttctcatgattagagtttcaatggattctttaagaaaagccattatagacacttcagcaacaatggcattcattctagtctctgcttttgtaattaggcctttaatgtttttcatcattagaaaaacacctgaaggaaggcctgttaaggatatttatgtctacaccattattgccttggctttactctcttgtcttatttcagacttacttgatcaacaaattttcatggggccttatgttttgggattattggctataccagatggaccccctttaggatctgctattgttgctaagcttgattgctttgtcactggagtttttgtcccactttttgttagcacatctgtgttgagagtcgatttgagaaaatttgtgtttgataatctcatgacaactaacataatccttgttatggtcactaacatagccaaattcgttgcctgctatatagcttgctttatctatgacatgccaaggctcgattcttgggtactatctttcattatgactactcaaggcactgttcaaataggcctctacacctcatttagagatactgatgtaagtgttgctattatgatgtgccatattacttttgatagttttactaacaatggctaattatcaattgcagagtatatctgaatcggtttacaatttacttgtattaagtatcttatgtttagccataatagtaccactttcagtgaagtttctctacgatccatctagaaaatatgcagggtatcagaagaggaacatcatgcacttgaaaccagattcggagtttcgagtacttgtctgcattcacaggcctgatgacattccagccatgattaatttgcttgatgcttcatgcccaactaagaagctcccattggtgtttatgttcttcacctaattgagcttataggaagagcttctccaatttttatctcacaccaagttcaaaagaaggctctttcacaagtctcatactctcataatgtgatcctttcttttaagctctttgagaatagtaattgggatgctgtacaagtaaatgtgttcacagcagtttctcctcggaagttaatgtatgaggacatttgcattatggccttagacaagctcacctctcttatgatcttaccctttcatcgaaaatggtcaccagatggacatgttgaattggatgatggcatgttaagggccttgaacaacagcgtgctcgaaagggctccatgttcagttgggattctcgtgactaggtcgaattcaggacgagcgggacccttgctttcatcacaagatacttataggtactcggttgctatggtgttcttgggtggcaaagatgatagggaggcattaacttatgcaaagcgcatggcgatgggttcgagtgtgaggcttcatgtgatccatcttattggcccggatgaggaagaagttgatgaggataagaagtgggatatcattctggatgctgagttgttgaaagattttaaatacagaaatttgaattcagctcaatacattgattatgttcaagaggttgtgaatgatgggactgaaatggcttctgttgtgagaggtttagttgatgagtttgatcttgtcataactgggagatgtcacagcagaggcagccgccaaatttcaggtcttgacattggatggaccgagtttcctgagctaggaatcataggagacttgcttgcctccatggatattcatggcaaagcttctgtactggtgattcagcaacaagaaatagaaactgattaacaagtttataagctgttcttttattattagttctccatgcatagaccatttggtcttgctctattgcttctctccacattttggcctaaagctggctctgtagtctctacatctttcccagttgtaaattagtgcaacatgcatgtttttctgtagaaagattaaatagctccacatatctaatcatgggaattggtttgcattaatgctaatcagtgagaagaatttgtaatttgtaaatcatcaatcttgttttcaaatgttctttaaaatccaatgtgtataatcaatcaacaatgattgaccctagctacatttctttatttattttctaagtaaccttgggtgtacatgaaatcttaaccacccaaatttaacaatgtggtttttttgaggtttattgttagcattagtactttctattacattgcaaaactgagattatcccaggaaaaattttatcaactgaagaacagataataacaaaacttcggctcaactgaagcgacaaaattgctgagtacctaattagcatta

SEQ ID NO: 298509 - DNA, 3107 bp, Cannabis indica
tattaataagcaaatctgattatatgaaatgagttttacttagggcataaaacccaacagttcacgggtgccgtgagcttgggctgataactcctggtaggggtattcgtcaaggcaatcttttgtctctttatttatttcttttttgtgttgaaagtttctattcgttgattaagaagtttgaatgaaatggcgatctccatgggtgtaaagtttctaatggtgcctctattatttcttacatactttttacgaatgatagctacatatattatcgtgctagtgaagatgaggctgctaatgtgctttagttactctagttgtttgaagttgctactgcccagcaggtgaactatgccaaatccttgatatttttttagctctaatatcgctgctgagttacatgcctgtctttgtaataagctgggtatgttagaagatggtgctaatagtatgtacttagattttccatgcattatgtgtcgtaataaatcaattatcttaggtttccttatagattaaatgcataagcaaattcaaagttaggaaggttagtttctctcgaaagtgggtcgtgagattctattgaaaattgttgctcaagtgttgcctagttctgatatgtctattttctttctccctttggatacatgtagtcagtgaaatgatgatgtctaagcattggtggggttcttcttctaatcgctttagagatgagttgaaatcgtcttagtcgccacaagacttttggagggcttagcttgattataatcttgctctccttgtcaagcaaggttggtggttgcttttatatgttaataatttggtgggacgtgtttttaaggcccgatactatcctcatggtttgttcttaacaacatctttgggccataattttagtttcatttggcatagtatctttgcggcacaaattttaatcaaggagggtacttgtttgagaattggttctggttttgttgatgttcttaatactcattggctaccttgtccgagaaatctttttgttacttatactcacccagctcttgtaaattgtcaactgtattagttgttaaagttggacactaggcaatgcaatgaagatattataagggacttctttgatttgaaagaaggaaaccttatttttagtcttcctcttagcatagttcccttgaatgatacttgatattggaggtatgagaactcgagtttcttttcaatgaaaagtcggtatcactttctgcaatcttccaaagacgaatggagtgttgaattggttttggatatgtggcagcatctttggaaaattaaattatcgaccaaagtgttgcattttatttggaaggctctcacaaggtgtttgccaactcgtactcaactttcatccaaacatgttttaattggtctatgttgcctattctgtcagattgtcgaggagtccattttgcatgtgttggtatcgtgttcctttgctcaatcagtttggaattggtctggtgtgaatggcaatattcgatctgttggggacttctgtgtctagtttgaaaaggtgctaagttggtggaggatgcagtgtggtctttgtggaaggctcacaatgaattagtgtggaataataaagttagtgtagtcgttgaagttgtctttgttgtaaaatcggtacttgatcaatgaaaacatgctcaagcgtctcgttttgagccattgttggtcccttgtggtgttatcaacaatggagagcattggactaaactagtcaatagtttgatcaagataaatgtagatggaacaacttttcaggcatctaatacttttggggctagtattattgttcgtgataattctgattccgttgtgaagctttcaacatgtatagactgggctatgttcaatcgagggttattgaagtaattagcgtgaaggaggctctgagttggatcaagcaagagaattggcggtgggtgtttttgagactgattctctagtcatgattcatgctatcaagagtttagtatccatgtcatttattttttgtctattaatttttgaatatcaattattattatctagtttgaataatgttcaaatttgttttgttaaatgttctacaaataaagtcgttcattgttctgtttgtgacccttatttatagtttgatcatattaacaatatttattgattgttctccattaataaattgttgtttttcattaaaaaaatataaatgtaccatttataataaataataaattcaaaataaataacaaataaacctttgggtatttcaacaatgcacttattttgaaaagggtactgatgcactcctatctattttcatgtttgagagaattttttagttcaattttttttttgatcgtctaagctgtagttatttaagacatcccgcaaaatttttaagagattcagaaaaatttaacaccctgaaaaaatagtttaaaaagtctcttacacgcgaaattttttaattttatacgcgtataaaataaataattttaatcctattttcggcgtgttaaattttttcaaaatttctcaaaattttacaagatgtctcaataactacaatatagacgaccataaaaaaattaaactaaaaaattcatctgaaataaatatgggatgcatgaatagacccctttgtagaatctttttaaactttattataaaaaaaatacatttataaataatttaaggtgtttctacactacactcctttaaaagcaattcactaaacacctttactattttgaagaattttttaattcttaatataaatatatttacatatagtcggtttaatgagtcggtttaatgatccaatctacaagatccccaaatttcagatatacttgaatggaattttaaaatattaaaacttgataagaaataacatcattaaacaaaacaacaaacaacaatatataatataatgtatgtatgtcataatgagaattacatatgcgcagcgcagacataacaagtaacgacaatatagtcattatcatgttccacattttcaagttcactcaacaactccatatatatatacaataaatatatgatctttattcttcatcttcatc

SEQ ID NO: 298510 - DNA, 1980 bp, Cannabis indica
aagaaggtatatatatatatatgagtggaagactttaggtttcttctgataccataacaaaaaataaaaaaagtttatttttaagaaacagaaaataaaaacgattactgatgagtaaagggaaaagcccccttttataaacaataagtccaacaaaataaacccagaaaagagggaagttcgttaggagctaacgaacttaggacccaaataataacaaacctaaaactagcaagttaataccattcatcttccccccattcgtgcctcaccctccagctctcctctctctccttctttcaacccagactagctccctctctcctctctcagcgacccaccttctcgtgggccctctctcctctcttgtatccctctcgataaaacccccaccattattggtcctgctcccatgtcctctctcggtgacccaaacttctcatcgaccctcccttcttctctctcgaaatgaaacccccaccaaatgtcagtcctctctctatttctacgtttgatatattgattggcgccactaccaaaatccctcccactcttacaagtattatctctctatctcttttatcttctatttttttctttatccaagaaagatacatttacaatttcatgtctattaccgacgctatcgcatttccaacttttttttttttaatgtaatactggatttatctcagtttcaaaatgtcccaagttgaataaaatgaattaaggttctattatattttatctatcttgttttgtaacttgctttagtgtaatatatttcttgatgattctctttaatttgggttttgaaaattgtttaattttgaaaaatcaaactttttctagcttttgtttgtttggtttttttttttttttgaaatttgggttatgatcagtatctgattgtgagaaatgaactttgattgttgagatgcaaggttggagataatatattcaaactagaagttcttgtagtcatggatactgattgtttaataatttttagaagctaagaaatttcatattgattgttaattgtgagtttttaatttttgaaaattattgacagggttgacttggcaaatagtttcagtgggtttgtatagaccaaaaataagatttagttattatgctagaaagagagggaaagataagggtagcatcatggcaattagggtagttagtccatcttctaatattttagtgcatctgatctgatgcataagctcttgcaaatgttacatctaccacatatttctcaagcttatatattatttgcaagtaatgacaaaatttgtaaatctgtaaattggagataaacagttgagtgcatatataattgattttactctgttgtgcaatagtttccctgttattaattttgatgtgatcatgtgtgtatagtatttctaaaaacattaagtttattatagtttatgcattgattattatgttaaaatagaaagtgaaactataaatatggttgcttataatatctaatttttgtttgggtggtttgtgtgattattattcagttatacctgttgcactaaaattaacccttgccgaccaatcgagaaggttcctatggttgtaaagaaacagtgagttacaacaaggagaaagacaatgaaatttttggacttttgtttggcttatacttatttttattggttttatttttagggaatcttacaaaaatatctatttgtttttattattttaacatttttaagtgttaaagtttcaaattacaaatattatattttagtaaaaaaaaacaactctaaaagaacttaataaacaataaaaaaataacaaagataaccacaaagtaacaaaatataacaaaacaaagacctaattgtaatatgtaaaataatatcaactctttaatatatttttgtattacgattttttaacttaattttaacaacttgatttatcttcttatacttttacattatttttttt

SEQ ID NO: 298511 - DNA, 3109 bp, Cannabis indica
gagagatctcaacaaaatgatggactgactctcttcatcaactttatgatttattaatactacaataatctcattaaacctatcaacaagttttcttctaacactattggacaaatacatgatgatcatgtagaatgctacctcctccatctctgctttcttttttggattcttctcagttgataactctaaaaactttaaagaccttctggtgcactagaatatccctttcaaactctttcaatagactgaaatctcatgttccatcaaacttccaatttgaatcttgccattaatgacattaatctttgcttcaagaaatgcagccaaaagaatcttgattctgcgttcttgatcgattatcaagctctgatttgtagggaaattactagtatgcagaatcaaatcaactaaaatagaatcacgaaacaattagcattgacgagatttcaaatttgcaatccaagatatatactggtttaggtcctttacatcgaagtcatctatgtctctactccaattatagaacaccaccgagaagtctttattgattaactaagtataaaggtgcaatacagccgagattgattctctatttggattctcgcaaagtgcttatctcgcacactcttatcccagaatcttcttcatctacagaagattatttatacaaatcccaaaacccaatctctcttttctctgtacctttatctctctctacctctcaatctctctctttctttcaatcttcaacctcgaaatcacttctcaatcacaccttgtaaatgatgagtacggtggtatttatagatctgggatatggatcccaaagttagtagctacacaacttaagttgttagtcagttatgactaaacagacttaacgacctcctcttaacactatctccacatcagctcaagaaagagcttctccagatgagaggcacacttcctagacaaaggttctagagagacgaagtgtgtcccttgaactacgttccgaataggtacaaagctagctggaacaaactatcttgaacttccttctaggaggtgacgactaaccttacggaattcctttttggaggaaggctagctttatagatgactccattgatgaataagctagactttcaaaactcctttctagatacatacaatttaaaataaaattaaatatttctttatacatatatttttttttcttcctttgaatttgttatttgttattttatttattttaatttgttgttggagacataaaataataatattttattttgttaccatttatgtaaaagaaatatattttttcattaataattaaatattgaaaagtaaccagcctaaaataactgattcaatctgcacttttgtagattggattaaattggatttgagctattgtgcggattagattagatttgagctattgtgcaaattagattggatccaaaatatgaaattcgcacttagtacggattggatgcactatgagcaaaataatgcagattggattggatgaatacccctatataagaggtcgtgaaatctgtacaagtcaatctcgaagttgtgcacaagacgactttacgaacccatgacaagcattatgagattcttgtgatgccatttggcctcactaatactccaacaaacttttgaggccttgatgaatgaggtatttcgtcctcatttgcgtaaatttgtaatggtattttttgatgatattttggtgtatagtgcagcttggatgaccatgttcaccatctgtctgccgtgctccaacttttatccgaacaacaattttatgataatctcataaagtgttcgtttgctcagaaaaactagattatttgggtcacataatttcagggaaaaagagtggcaatgaaccattctaaatacaagctatgttagattggattgaacccaagaatgtcaaggaacttcaaggattttttggactctggttattactgtaagttgtaaaatggtatagtgaaatggcttggccattaacatagcagttgaagaatgaaaattttggctggaacaatgtcaccattgttgcttttaaggcactcgagcatgcttcaacaatggtggatacagatgcttcaagatttgacaatggatttcatagaagggttgcctcaatcacatggtatggatactattttggtggtagttgacaagttgagcaaatacccccatttcattctattgaatcatcttttcacagttagaatggttgctgatgtatttttaaagtagtgtgactccatggagtttcgagttccatcatttccgacagagataaggtattcaagagccacttttggcttcaagttacaaggcacaaaactccaccatagcaacacttattgcccacaaacagatggacaatccgaagtagttaaccgttgcctggagactttacttaaggtgttatacttaagatcaaccctgatcgtggatgtgcttgcttgctcgggtcgagtattggtacaacaatctttccatacagcaactcaccatacgcctttttggatcttgcatggacgtgaaccaccttctcttattcgatacaagcagggttcaaccccgatctcgttaattaaagaaatgctagaagatagggatgcatagctagatgatctcaagatgcatctctccaggctcaacaaaaaatgaaacattttgcagacaagaagaggatgagcagttttttgtgggcgatccagtatttgttaagctcaagccatattgacagatatctctagtttcaaggcggagtgagaagctttctcctcgttatcatggtccattcgaagtgctttcacaggttgatgaggttgcttataagttgaatcttccagccacatcttcaccattgcttcctccacagttgagtcttgacttagagctcatagttgagcccactgagttactaagggtttgcaatagtcaacctgatgggaggggtgacatggaggtaggggtgttcaaaaaaatcgataaactgaaactgaccatcaaaccgaccagaccgtaaccgaattttcggttccacgtcatcaccaaattcggcggtcggtttcagttt

SEQ ID NO: 298512 - DNA, 4435 bp, Cannabis indica
caatatgagtacttccctcgagtgcatggggaagagctgaacctagctaagcaatgatttcaactctcttcgcgcttatgaccctacgtaatgaggggaaattccccacattggcttcatgacccaatggtcaggaggctacagccagacccaagttaaaaaatatttttgacctaattggaaaataaaaagacctacgggacatcccgaacaagagaaggttggtggaagtaggagcttctagtggtgacctcgttaatcgggtagttgaaggtccaactgggacgcagactaccacccgtggtatcaacaggggcgagttttattccttcaccaccttggtgaaaagaatttcaactccaaaattgtcaaactttgagctatatcacagtactcactactctaaaattgaatcaaagcattggagattcttttaaaattcaagaatttcacctgacatcaatacattggaaaagcaaattcgttttctcatatcatctacttctaagtgaaaaccagtatgcaaggagtaagagatgatgtcaagtgtagaatattccctaccacggctacaggcctagctcagcaatggcatctcaagctttctactagatctatcgattcatgaaaagagcttgtgaaagccttcgacagtcaattcgctccatcctaacaactctagatcgaaccaaatgattctgtagatgtgaagcaacaagatgatgaatccatcacggactgtatccaatagttcttagaggcaacctctaagacaaaaatacttagtgaggacacgagggttatggaactcgcgaccttacttaaggagatgagtcccctatggtcaaaccttcacctcaaagcactctacactatgaatgacttcttggatatatcatatggctttatcaaacttgaagaagctatctctcaagcaactggtatgaaaaataaaaagaagaaatttccacaaaattcttcccctaaaactgaggcataagtgggaagtgggaagggaggaaaaagcaggggttggaggttaaataatggtggtaaataagctaacttctctagtagaaagaaagctaaaattggagacaggttcaataaggattatgagcctatattcacctcctattctattctctttgcccaaagagaagaaatatttgtagtaattcagtcaacagtgccataccacaagcctcttcccttcaaagagttagggaagagagacatgaacaagttctatcctaccataattattacgttgatgacactaatgagtgtagtcagttgcgagacgagataaaattcttgatctgttaaaagcatgtcgccctacagtggtattggaggctacaggtgcctacatgaggcaacggtcctctccagcctacatcagtggtagaaaagcttgatgtggtagttgatggtccacaccttctcagtaattcaagaagagcattggagaagtatgctagatctcgccgacatgaaccgagattgaaaatgttagaggttgtgaaggggccttcaaaatgttaaagcttcgagtgtgatccaatcacatttagggaatccgattgggaccacattcagttccctcacaacgatcctcttattgttgaggtctaaatagccaacatgattgtggctagaatgatgatcgatattggagcatcgtcaaaagtactttttgagaaaactctggagagaatgggtttatctttgaaagacttggaaccatgcgaccaactcttgtatggtttcagtggggatggaattagtccctatggtaagatcaaattaccatttactgtcggcactgccccaaggaaaaacactaatatgtcaactttcatagtggtcgacaccaagtctccatacaacattatgattggaaggccaggcctatacgacttccaaggcatcttatccatctaccatctgtctgtgacgttttcggtagcaaccgacaatggtcgcctccttggtaaccaataggccaccctagagtgctacaaaacttcattggcactagcaaagaagatctcttcaactgttctaatagttggatggacgatcaagacctctttcaccatggtcggagaggcgacaaagaccactaaagttataaccaaggagactgcacccaaaactgcttgaaggtttgcctaagatgaggacgatattcacccttgttttggggatattgaatcaagagttggtatgaatgaggaactcaaagaaatccccctcacagcaatggacccatccaagattgttaagattggaacaaatctgacaggggccttatgcgcatctcttatggcatgcctcaagagaaattaagatatcttttcttgattgcatgaggctattattgggattgactccaaggttatttgtcactccctctattatccacatttttacaaggcaagacacgtggcatggaaggaaaaaacctgtgtctatgaccctgttgttggaatcctatagtacaactaggagatcttctcgaattaagggtcatctagaataagaagacacatgggaggctaattttgtcaacatatgcttcttgaagagtgggatgagaaatgtctctctcagaccggaggggtatggcagagaggctcttttggctaatttttaaatacacatctgaagggcctaaagtagatgtcgaccttcactaggtgttgcgtatatcgactttttccatatgctaggtcaccaaatgttggttatgcttttactaatagattagatcatgtcccctacatccaagtattgtagtgtgtgcatcgccaccctctttttaccaggtaggaaatacaaacttctacccataaaggagcaagctttgagtgacacgtgtctttctcctttgaaggttaaacctttgcgtgacatgtgtccaaatagtacaaagtggtcccattatccagttgctacacgcgtgggcataatgctacccacaagattaaccattcaagtctacatgacatgtaatttaccctaatagtgggatgtaagcaaaaatgttaggcgagtcatggatttacccatacccgccactcagcctataaatacctctttgtttccatgcaagaaggagagacaaagaaacacatcaaaaaaactccacaaaaatttcccttagatttcttcttcttcaaagagaaatgaagggttaagagttaaggtttcctataaaatattgtaaatccatcaatactgccatttaggaatagactactcgtggactaaggttctttaacacctgaaccacataaaaatcttcctcttttcatctctggaattttttacttattagctctcaaatattttagtgtctaaaaatcttggtaaacattttggtccattcattgagagccagagaaagatgaacaccattgttactaccatggtattgacacgaaaaacaggtaacaaaaaggctcgtcaagatggccttcaaacggtcatggaggaagtgaaccccttctcactggaacacgcccaaccaagcgacgcgagaggcgaaggcacatctaacatgaatgattaagagaaaggcctggacaaccaacatgaccatgtcagccatgacaagaatgctaaggactatgaagaggaagaatatggtgaagacaattatgtcaaggatggattttacaaagatagctatcactatgagcacagccctgaagtaacaagagtttcccaagaattgttcaaagcccagtaaaagttggcccgatagaagaaattctctaaaaaaatggaaaaagtattagatttccttcaaagcatgtttggggacctggacgaaggggattttaatgatgacctttcagtggaatacgtcagaggaaacaccagggaaaaccttactaatgctaaaggctctactcctatacaaaaaaagggaaggaaaaagtggttaaccctaaaaactctcgtgcccctaaacctcctcaaaaaaacatgaatcaggcaattaagcatttttcgatgtagaagatgtgcatcacctttaggcttggatgtccttcaaccagaaaggccctgtgacgccaaaggaagctggtacgaaagtaccaagacccaaagggaggaagaccgccctagtgattcagtgaaccaggatgggggagcagagaggcagtgttctaatgatagttggtccatcgttgacctttaacggcatttggacgcgaaatacaataaggaaaaaagtgagaaggcaaggccacgtggttacaatctcataaacaatttgaatgacaaggtccatgtaagggacctcccaaacactgatacaaagagattagaagaccaaatagtggccttaaccaagttggttcaaaattagagcggggccctcactgattgtgaagatgaagatgttggaaattatttt

SEQ ID NO: 298513 - DNA, 4665 bp, Cannabis indica
aatttttgtggttttttttattaatgtttttgcatagacattattgctggatggcaactattgccacatatatagcaatgttcatggaatggttcagtagcatattatagaaatataattgatttatcattgacaaagccttagggatggtaaaactgcctctgaaactagtttggatacaattttgaagtaatgatttttttttagttgtgtagctattatctgttacctttgtagttagattttcttttatctgataagcttttattattgcagggatatggtttctggacttgtgcatttgcatcaactggggataattcaccgggatctaaagcctcaaaatgttttgatagttaacgaaatatctttatgtgcaaagctttctgatatggggataagcaaacgccttgatgggaatatgtcttccttggctcctcacgctactggcaagtacctccaatattcttttaactcttaaaacagtaccaaagttaggatcgcttatccaagtatataggtttatacattgagaaaaactagttagaatgtgcatcaaattgtagtataactctctttggtctcatatgtttgttcggacttaattgtaggttgtggcagttctggctggcaagcacccgagcagcttcttcaggagcagcgacaaacacgagcagtggatttgttcagtttaggttgtgttctgtttttctgcattactggcggtaagcatccatttggagaaagtctgaagcgtgatatgaatattgtggaaaataagatggaccttatcttggttgagtctatgccggaagcttttgaccttatttctcgtctattgagcgcaaaccctgaattgaggtaataatatacttcccttcaaattaagagaggtgtagaacagtgcattgcttaatagttccattactaaaatgctgtctggagtagaagtttgtatcacttttggaacaacttagttaggatttgtatcttatacatgaacttagtagcaaaatgaaattttcacattgaacatacttaatttgttatgattattttctctctttgatgaaaaatcttcttatacttgctaggccaaaggcatcggaggtgttacaccatcctttattctggaattccgaaaagaggctttcgtttcttcgtgacactagtgatagggttgaactagaagatagaaagcctgagtctgctcttttgaaagaactagaaagtattgcacccatagcattgggtgggaaatggaatgtaaagatggacaaagaatttatgatgaatattggccaatacaggcgttataagtttgacagtattcgagacttgctgagagtgatgcgaaacaagttgaatcattatagggagcttccaaaagaaattcaggtttataatgttttttgctcttttcaatatcatatttaagcaacttcagttatgtaatccattttctttttcttcaggaacttttgggatcagtacccgatggttacaacgactactttggaagtcggtttccaagacttttgaccgaagtatacaaagttataagcaggaactgtaaagaagagaaatgttttcagcaatatttcgagacaaaagttgagtaattccattccattgaccccttgaaaacttggaaagtgaacaatggcagaaattgtggtgggaaatatatgttactataaaaaaaagtgtgatgaaatcattgagcaaacttgtaaaattttgtacatacacataacctcttatctcaagtaatgtaatcaatcttaattaactaactctttatattcaatagaaggatttatttattacagatgaaatgtgttctagttgtatgagggatggccttgcttttctttttcaccaattaacaggacagatttattatagccagatcattacagtaaacatatataagatatgtactaatagatattgaaatattctatacgtatatataaaattgatgatcatgcaaattatgcataacaacgttatctccatcatcatttcgcttagcaagtaatacgcatgtacatttacatataggggtggtacattatgtactctaatgtcttcattaaatgaaaaattaaaaagtaatatcacatgggaaagaagtagagattaatcaaaggaatccaaatccaatcataatatgaattaaagaattaactaattgaaaggtcaactactctgaattagatggtacacgtgtcattaccccatcactcttacaacctattctctttccactccaaacgctcctccctttccttttcccttctcctactcgcttggtctctctctcttttcttttcttcttcatcctcttcaatcttcaatcttcaatctttcatttcatgaaaaaaaaaaacaaaaatgaagaacctttttggttaataaaaccagcagagtaaaggggtcatcttattctttctttctttctttcttaatatatatataattataatatgacaagttgtgtgtgtatggaggactgatatgatgatggagattactacaaccactactcacgaggaggatcctaatgctaataatgctaatggtggtgattctttagagacgagtaatcacagcagccaaatcaataacagtagtagtggcaaacccccaagaaacctctcccttatgcgccattgcaccagctctgcatttttgcctgattctgtacctaacattaccatatatacattatatatattatcccctttgttgagctttctttccttttgtttatgatgttattgatgtcattcattttttggtaatgtaggaatatgatgtggctagctttggattcaaatcaccatctgaggagaaatcaaagtttctgcctatattccgttctggtagctgttctgagaaaggaccaaaacagtacatggaagatgagtatatctgtgtagacaacctctctcaacatcttcctccaccacattccttcccttctccagccgcattttatggggtcactcactctctctctctctctcaatctctacatatatggaaggactatttctcattgagataagatgtaataatatatgttgttgatacaaaacaaacaggtatttgatgggcatgggggtatagatgcagcctcattcaccagaaagaacatccttaacttcatagcagaggattcccaattcccaaatggactcaaaaagtcagtgaagaatgcttttgtgaaagtggaccatgcacttgcagattccagctctcttgatacttcctctggtaccactgccttaacagcccttattttgggcaggtgatcagttactgatcaacttcattcatataataataataatcttaaatgtatatatgtatacattgcttgcttacatatatatgtataaaatgcaggaccatgctgatagcaaatgcaggggactgtagagctgtgttgggcaaaagaggaagagcaatagaactttctaaagaccacaaacccaaccgcacatcagaaagactcagaatcgaaaagcttggaggaatcatctacgacggatacctgaatggccagctctcagtggcgcgcgcccttggggattggcatatcaaaggctctaaagggtcattgtgccctttgagctcagagcccgaattggaagagttgttgctgtcagaagaagatgagtacttgataatggggtgtgatggtttgtgggatgtgatgagtagccagtgtgctgtgacaatggtgaggaaggagttgatgcaacataatgaccctgagaagtgttctagagcgcttgtcaaggaggcgctgcagcgcaacagttgtgacaatcttacagtggttgtggtgtgcttctgccctgatccaccccctaagattgaaattccaaggtctcacaggaggaggagtatatcagctgaaggcttggatcttctcaagggttgcttgaacaattctgtatgaaaaatgaaactatatctttacaaaacatttggttttggtgtacatgatgaggctttgatctgctaggacaatttctattcttcttttttcttttcttttcatttgctcctgttgttgttgttgttttctatttattgagttatcatatatatatgtgatcactcctgtggactagtagacattgctaataataattgtttgtaatcatacatctaaagcaaaaggcaatctaaattttgttctaagagtaaaatatttgctcaactttgtttttttccttcccctctttgtggttttggtgctttgctgaaaataacaagataagggcaaacaagtcacaagaagaaaccttgtgttgtcttcttatatatatgttggaagttctcacaagtcacaatgcttcccttccttccaagatttctcttttgaaaagtgataaaaagagagtttgttttgcatttggtgcttttgtcttgtgtgtatctcaagtctcaacataaaacacccatcacatgttttccattgcaagtagataagttgcttatatatatatatatagttcttccagatatttctttgggatcatgtcctatcttcaaagttgggcctgttcttttctctaaatttcaatgcgaggagtcgacgatgtttggaaaacaaatgaatgcgacaccttcaccttcaccgac

SEQ ID NO: 298514 - DNA, 1863 bp, Cannabis indica
gatttctgggttaggttgaatttatttcttccaaaaattaggattattctcatttgcaaatatgacttaattcatctctaaaattttaaccccagaattcctagaaattgtatgccctgaaaatttagcacttccatttgaatccaaaactcacatatctaaatccttacttgagataaacgatgtcaaaattagggatcatttactaaaaaccagtcaagccgaaatttgcagtcgctataggtgatttttgcaagaaataaccgagggtaaatgttgttatttgtgagacgcagcttggcccaaaccccagtctttatcttctattctttagcaagacctttatttttacctcgagtcactgttgctttttctctaggtgacttaaatttttaaatcatgaccactcaagctcgtaaatcaaagacccctcaagatccaacaactaccttcaaggtagaattgattgaatccaaagtcagatctatagctccctttgtgggtaatatattaaaggcttgtggtatcaaatacaagaaaggatgtcgccttaggtccgtcaccttaggggaatttagctatttccaaccagaaagagtaattcaagaagagtgtaggactagtagcagtggctcatctggaatatgtacttggagcatccaacacatcagggatggagcagtactccccctgagagagtactttaaagaattctgtaattatctcggaactgtcccttttcaattaattccgagttcttacagaatcctggcttgtttaaaggtctaatatcaaattatgaggtgggggtgtcccattcccctcgaaattgtaaatttttattctgtaaaagccgtcctacaaggaagcgaggtcaggaggtttttattacctcagtacccacacaaacgattgtaggatcattgtgaggttacctaataagacagaattcaaggatgaattctttaggacaatcggtctttcccccatcaacgcaacatttatttattttgcttattgtgttgataacaatcacgagaagactaattcttactccggagatggttgaacgtcataaacctcaatcttctcgataccgagcaatccacctgcaactataagaatctaaaattttctaagtggcagcaagtcccaattccacccgatgaggaagatagagattatgtggctagaaccaactcctcaataaagtagcccctcgggaagttaaagacgagcatcccgaggtaataatacttaggactgagtgtacttcgatagtcactttcaaggatagacagtataagttttatacttgggatgatttatatatagatcgcataccaaattgatttgatagttggtatcctaagtttcatgtccaacttagtcgcaatagtttctacttcggaattgccaagcaatgtggtaataatttggatagggcgagccatctggattcagattggggatttatctccaataaaccccttatgacatatatacgatcacaggctctagggagtttagtagttattatagtccttcttcctcatcgcttgataactatagtaaatttctctaagtgggagtttattccctaccttttcattgtttattttggataagtgttgatttatttctcttctcgcagatatagaccttgatctgcaagacatgctcaatagccttactcttatcaataagagatccaaaaagtgagaaacttcaacaaatgaagcctcgggttccactaaggagacttcgaaaagaacaaaaaccacttcaaataagaaatgatcttcaaaccaactcatcttgaatctacaaagtgttagaaatttatggggtcacaattgtata

SEQ ID NO: 298515 - DNA, 2361 bp, Cannabis indica
atgaagttgcaaacccaaccaactacattttgccgtacgtacatgattgatagtatataccaaacaaatgtctaattaaattaattaaaaaaaaaacactaaaacctaaaacccaccaattgggttaatcatattatgaatgaatgtaaccagaaaaagcaaccacaatcggtacgattccaatacgaataaaaaaagataatttcactttttcctgaaaaatattaataatcatatattttatgtaattacataaattattattatatataatattagtattaattgtttgttaatcataaaataaaaccggcaaaccaattacctaattgtggtcccccggcttaacgatcaactttccacaccctaaaactctagccattacttaacttaatctacttataatttatacatataacttttacaaattcatatttatataatatgtgttaaaaagtgtaaatgtatggattgtggacctaaaatagctgcgtgtgaaaatttgctagtgaagaaaggataccaatattaaagggaatatgtccttatactatactattttttaatcaccaagatactcaatagttcattattaagtatatgctactataattaataagttttaaatacaatttaaataatttaaccaccaaataatgttacaagacccttttaaagtgtaatgttacagcattaaaatttctagaacaatacaaaaaaacaatttttttttagtaggatccattttattggaaaatatcaaaaaacattagtacaaattgaaagatgaaactcttccattaaaaaaagttcattatctatgtttaattagctaatttatgtgtggtaccattttaatccatgccaaacctattacagagactaccaatatctaatgtatactaactattaattaagtaataatgataatattaaaattaattaaaatgattattattatatataaaaaaaagaataatagaaatgtgaagtggaaggtgatgttgagtgatgtagagagccactcacaccaactagaccacgcgctagctccctcactttcatgcaaattggctataatcttttctaaacactttacaatatttatacctaaactcaactataaattttaatctatatatataattaagttggaaaaatgagaaaaaggtttttgccccctttttctttttatgatctaaatatttaattcatcagtcattagtaatttgtttaaaggggccaaatattcaaactgcagggccaaagagagttggattttgtccaatatatatcataatccctcaaactaaaaatattttgtaagaccctcatcaaaatcttgtaaattaattgttcatgaacgtatcataactaatatgatatattaatagagtagaaaaaaatcaatatttacaattcaattgcaataaaaatacaaatatcaacataagatttaaattacaatacttctactttaaaggtgattataacattatataatatatacataataccaagtaaaaataggaagaccatctctcatccacacccaggcttgactctagacataggcggattaagcctatacttagggtccacttattcagagaaaaaaaattcattttaaaattattattattattattatttaataagagctcaaaaatattttttttcttatgacccactatatttcatgactaatctactcacaccaaaatttgaacaagattttatgcttttgtcttaaaacttatttatcacatttctaagcactaagaaaactctaataattttgagaattatcaagggtttctaacaatgtgttttcttaatagaaactagtatctcaaaatgagcatttcaaacctctatatcaattatagtgattatgtgggatcacatttgaaaatcaaatttcttttactttatgattgttaccaacacattaattagtgtataatagtacaaaaacattttcaaaactgggtccaaatgacaacaaccataaggcaacatatcgttatcaacagggttgggcttgggctaaagcgggctaggcctgcctaatccagggcccaaaaaaataattttccatttaaaattatacatatttttttagtagtttttgaaaacactacgtacatatttttagaaaaaattacattgtatatgtacccactttactttacctgttttaatatttacctttatttttatattctttaatatatactcactttaatagatgatgtctccattatacctctagattaatataaattataggcttaagtagaaagtgagggtattgggtaactcattcacaaaagtgtgtacattttaatgaaatataat

SEQ ID NO: 298516 - DNA, 2864 bp, Cannabis indica
atgtacatttataattgtgagacataaaaatgaacattttgtattattctttttaatttcaaaaagaatcattttcagtgaacagaaagtaaactaaagtgcgaattcacacatgcaccatcctctaataattggtgcttacctttaaataatttcataccatgaaaagtaaaacacacattagtttttaataatttattattttcaggtggaagactacccatgacatggtacccccaatcatacgtcgaaaaagtcccaatggataacatgaacatgcgacccgacccgaccactggctatccgggtcggacttatcgtttctacacgggtgaaaccatctatgctttcggggatggactaagctacacccaattccaccaccatttagtcaatgcaccaaagctggtcaacattcctttatcagagggtcacgcgtgtcgctcatctagatgcacctcactagacctcgatgattcttcttacaactgcgaaaatctcgcctttgacatcaatttaagggtcaaaaacatgggaaagaggagtgggttccaaacggtattcttgtactcaagcccaccttcgatccataactctcctaacaaacacttattgggctttgagaaggtttttgtacaggcccaatcagagtcggcagtgaaattcagtgttaatgtttgcaaggatttgagcttggtagatgaagttgggactagaaaagttgctttagggcatcatttgcttcacattggggacttgaaacactcattgagtttgagggtttgaaaaaacaaaagcaaaaatggaaatagggggtttcaattagtttggtcccttgttttttattcttcttttatttgggggaaaactatatatatttattactcccctttggtgtcaacttttctagaggggaaaacaattgaattcaagttgaaagagctataaataagttgagagaattgtctagattatctcaatgatatttgatgtagccaattgtaattgttcaaaatcaaaagattttgaaattttaatgaagactagaaaaatttatgttttggcttgtgtatcttgttgtagttttgatgatggtagctctctatttattccaatttatctgtgtagctagaaaaaaaaaaagacgattaatcaaatattttctacacaattacgagtcaaatagctctactctaaattgaaatatgttgattccttaatttgtactattataatatagggtattgaaaattattaggtataccaaacagtaatagggtattgaaaattattaggtataccaaacagtaatactcaaatgtgttgctattttgtttagtgtagcgtaatagtaatttacaattaattaatagtttgtagcttaaagtcttaaatttaaactcatgacctcttctttttttctattactccctcacctctaagctagccttagtggatttcaaatgtgttgctataataatttgagcaataactctatcactactaataaaacatattttaatttaatatttatgattttcaaacaaaaaaatccaataattacgagaaatcattagctatggctaattaagactgcattgtgttaaacactttaatatacctaataaaaatattagacaattagagaaaacacacaattttattgattatgtagaacatagttatatattatagggtaattttatacactaaactctctgtattttttttttttttggcaatacctccttaagtttacttttatttataaatttgaaataccagttaagtttcacagttaaatgtcaactaaattaccattgtgtataccaatttttgaaagtgcggataatagtttattgaatcttggatcaatagcctatagctttggtaccaatttttgtgattcgatcaccataattcaataataaactaaataaaaaactcaacaataaactagagaagatgaacaacaattaaacagaattaaatgcactaaactttgagagaaaaacttagctttattgattgtattaatctatacacaatgactgaaagagagggagcttgttgattgaatgaacaaaacaacaacagagtttatataacttcctacaaaatcctcactaatgggaagagcatgatcatagacatatgccttccttaacaactctccctcctctctttaacatagtaattacaaatatgaactctaaagcattaaccctcaaaactgaactaatttatagtctatttatacacttaaagacctgagtacattgacccttatcttaacatactaaactaacttttgacaaccaactagcttaaaagaaacaattagtgagcttttaagtttagagagttgaccgactagtttttcaatcacatgtcataacagtttcaaaataccatcatttaaaaaaacataaagaaaaaatggaaagaaagcttattgtttgttgtatacatataataatgaataatcacattatggtacatagttgtgaagtgagaactatactcccaatgcttgccactagttgtccaagttgtattgctgtctgcatcttagcctacattaaatacaattatcaattatatatttaataagattatgaataatttatttaactaataattttaaatatataaataattaaaaaaaagtaatttgtggcgaaactccctcaactatcaatttacttgtaaaataccatcaaatctcatattttggtgggaaaaccttccaaagtactgtttcgtttacatttttaaggtgtcgtctattcaggctcgttaagtcttaattttgcccacgtggcaatgacaggtcactaaaaaattatcctacgtggtcatat

SEQ ID NO: 298517 - DNA, 2184 bp, Cannabis indica
aaaaaagatagaaatgaaatgggttaacaaaaaaaaggtatagggtgcaatttctactaactaaaatcactaatatatttaatatttttacagattttcttagtgatttttaagtatacaatattattttcatgttgaagcaacataataatataagataacaataatataaaaacaacattatttaaaaacaaccgtccgtattttgtaaaattttaaaacttttgggtaattatgaaagaaattcctttattcaaaaagaaagttcccaaaacaaatagtactatttgagacattggcccattagttaatatcatgccaagcctaaggcccaaagaattgtgtgtgccgtagatcattttacatatatttaatttctcaaacatattagcaaaataaagtattttgaaaaatttgtggcaagaagcgttcttttcattttaattacaaatttagtcttctttaaattaataggattttatactgtttatattttaaattttagagtgtcacatataccatttaaattattttggtatttggtatattttcgtcgccccgcctctctctcttcccaatccccaatggaacctctctcttttaagttcccaacgccgaacacccttttccgcctcctctgtctggcatccaagaccagagcactaataagaaaagagagttcgtcatctgccatatccgtgacacaaccgaggccaaaatttgtatcgacgacactcattcatcctcctccgacgaacgagtcatattcatcacctctgactccactcttccctgatcgaaatttgatcacatggataataacaacaggtggagtaatagctctagccctagtgatagagaaagctcgccgtcggtagctcagttggcgcttttaaaggtgttggagaagatggttatagcggaggagtatgagaatatgaatgattgttttatagtttatttatatttaatttataattatcacaaggttattttctcgttatttttttttttattttttgctgaacaaagtgtatttttgtaattttaaacatttacaagcgtatttttgtaactaagaatttaggccgtaaaattataaataaaacataaaagaataatatttttaaaaattatcccaaaagaaaactagtgtttttttttaaatgcattgaaaataattagagtttaatacattatagagataagatggaaaacatctatctaaattagttcgtcatccacctgagtgcacaaactgttaattcatgtgtataacaaacatgaatgagagatgcctgaggataattagatagcaaactaagaatacccgctaagagagatcataaatcattacaaaaagtgaatctcttagagaacataaaaatcaaaggtaaacaaccagaatcaaaagaactaaggtagcctttggttggaagtaataaaatggaatgaaaataaaacaatctcccttccattcatttgtttggttgcatattaaactattaaaatgttattctaatacaatggtatttctatcattttggtagaataactattccattttgaaatgaaaggaaagactattttaatatatgatgataaaaaattaattgactttttttatcatttttttaatatattttaaattttattctattccattcctattctcattttcattcccatttatattcttatctcaaccaaacaccacctaataagcattctaagtgtaagctacaactacaacttatgcttagattacttcaaatctttttagtacaaactattttgatgttattaacacatttacataatttgtttaaataataatgaaacccctataaaaatattaaaataaataataagaacccttttaaatcaacaaactaaatgataaacaaataaactaataaatcttaaaaattcaatgattaaaaaaaatgaaacttatcttattcttaggggtgtgcataaatcgatccaatccaatgacaaccgaccgatccaattacaaccgaccgccaaacattggatatccaattgtgatcggatcggattggatgttatttttgaatatccaattggatcggatcggatgttggatgaagtgtctaaatatccaatatatccaacatccaattaaactaattagtattttcatttagtttggatgagtaa

SEQ ID NO: 298518 - DNA, 3321 bp, Cannabis indica
tatttttcttttatattatttttgacagttttatttctaaaaatattctaatgtatagtatttttaattttacatattattattgatatatatcttaatttttagttacaataattttttattaaaataaaaatgattagcaccaatgttataatatagcatccatgtaaatttttagagtaatattttttttttttaaatgatatagcatctcaatattttatgaaataatatgtctacctcaatattttatgacataatatgtctacttcactaaatatttttaaaattttattattagaaatgctctaaaacagagatgtaccgctaaggaattggtagctcgatggttccacacaaaagccattgaaaggttaaccacacaaaagcctccacatgtatatctgaattccatattttttgctttatggatattgaactcaacagctatcaaccgttggattaaaggactttaaatatgagctattacatgtatgtgacatgtcacgtgtgaaaacaaaaagtttataaagaagaaatactagttgtacgatgataggtgtttataaaatagttaatctaatttaatttacacaatttaatttaatttaattcgtaaagtataaatatttacatttatataaattgaattggattagaaaatacaaaacaattatgtaaattggatgtttattttatatataattttcttctttacatgtaaaataaaattaaacatttttttatatatacattttttttttgaattattatttgttattttatttattttaattttttgttaaatatataaaataataataatttattttattttattttattattagttatgattaaaaataaatttaatattaaaaagtaatcaatttaaaataattaattcacacttttataaatttgattagattagattatttgaactattatacaaatttaattgaatctgaaatataaaattctcactcagtgcaatagaattatttgaacacccctaaaattgatcggttgccatgggtttactaaaaacttaactttcgttcatagtctgtagtagtgatagtgaactctgaaatatctcatcctttttattattttttctaacatatatataattatttaaaacactaattatacttttttaaaacaaaaaaagcactaattatactaatagataatttcaaatatatataatatatattttttaatttttaaaattaagatgtgatatatatgaacaacatcatccaggcacaccagcacacgagaggatatgaatgaagctttttaaaactattaattaaagttgagacaccactcaaaatttgcaaatagggacagtcgcctttttatttacctttttctttctattacttttaaataattatacatgtaaaacataaattgaatgatattctcatgctattcctctctctctctctctcactattcataaataaataaatcttgaaagattttcttttagttattttgcaagaaaaaatctcgatatatagttattacaataattgaataattgattagcaattattatattttatatatattaataattaataatagtgagtggccaagaacaaaaagggtaggaattattgaggtgttatataccatatatacctaccatatttcaaaaactccaataatagcaataataataatcggctataaccagagaaataatggccaccatgtatatgcataggtctatgatcacagcaatggtttttctgatcatcactaatattctcatcaacaggggtaagtaataataatatattagtaataagtatatagtatttattattaataataataataataataataataaatatttggggtggagcaggaatttgtgaaaattgcagtttggacaacataaacatcggaacagtgagaagtggaagagagataaatgggaaagcagagtggaacgtgacagtgattaacacgtgcgagaattgtggtcagagtgagatcaaattgggttgtgagggttttcagacagccaagccagtggatccggccaccttcctcgaccaaggccacggccagtgtctcctcatcaacggctcaattctcaatcctaaagctactgttcgattctcctatgcttgggatcctccttttctctttttccctctccactctcgtattcctacctcttgtaattcctaactttgtcgtttttatatatgtcttgtcgtttaattactttcagggcttgtattatactatatactactttgtgtttctgtgctctagcttcaatatatatttattttaatacatctttaaaacataatgtaaaaataaaactaaaatcaatcacaaaattaaaactagaacttaattgaaattagatgaaaaaaatttagctcaagaaagaatgaatcatgactctttattgtttgaatgatcagtagtacacaattgaatatgtctaagaataaaatactacacattgaataattattaaaaaatatttcacattgaaggatatcacttctagagtgatactttcattacgtccctccacacattcactatgatcttggacactctttctctaaacttgaatctgaaactgaagtatgagcctaggagattagagatcaaaacttagaactctgaaatctctttgagaatagaggaacacctatttatagctgttggcgggatctcctttaagttggtattaaaaccaattgttataactaataatagctttctccaaattcatctgatgagcaaatagatagacctactgacttgacaggttaagtgaatttaatcccaacaattttacctgattagactcacttaatttttgatccaaaagaaatgagtgaggacattaaatttcctgaatgctcaacaagtttagataatgcctaaacttgtctctagttacacttttagtgaaaatatctacagggttatcatgtgtgcttattttcttcacttgcacctgcttggatgacacaatatctcttataaagtgtaatttgatataaatatactttgacctctcatgaaacattggattttccatgagatgcaaagcactttgataatcacaatagactgtgatatccttagatttgaaacctaactcatctgtcaaccccttaagccatatagtctctttgattgcttctgtagcagccatgtattcagcttctgttgatgacaaggctactattttctgtaggttagatttccagctgatacagcccccaagagtagtgaacacaaaccctgttaggctccttc

SEQ ID NO: 298519 - DNA, 4267 bp, Cannabis indica
aaattagaaaaaaaatatatatattaataaatacatatttaaaaatgtttgtttagcaaactattggattccagttaagtttaatttgaatacgcatggtatgcttaccgatggtctttgtcctttatgcgacgcccaagagaagactactcatcatactttgtggggatatttttctcgtttttaatatcgaaaactttgtgagtttaaccttagagatcctttggtcatttgtactgattttattaattttatttatctatttttggatcaaatgtctaattctaagttagcccttgttatcatgtggagggtttgatgtaggagaaataaaatggtacataataactatttgatgtctcctaaattagtggttaatatggtttataatttattaagtgattactagaagcctcttttgggttccaatgagattaatcgtcaaagatctcttgggaatgtcgtgcctatttcatctcatccaattgagcattattaggcctccgtttgtgggttgtttcaaggttaatattaatccagctttagatttgaaaggtggtttttgtagtatgggcatggttatctgtgacgttcatgaggttatctatgcatcgactattggcacatgattggtttttttcaagctgaagtatctgaagctcttgctcttcgccatgtaagaatacaaggtcatctttttgattgggatactatccaatttgaatttgattgtttgaatgtggttaaactacctgcaccgcactaccaccgcactacatacgcataaaaaatagcagtttgaaatcttttgcggtgcgattgcggtttgcatttttgttaaaccgcggtgcagtgcgtttgcagtttttgaattcaataattgttgttcaaattgcaccgcactatatattacaaagttaccaactttttacaatatgatttttattttattttttcatataagaagaaatatatataatgtatgtgtatattatacaatataatgacttgatgaataatatatatacacatgttatgatgttaaaactttactaagatttttttgttttgtattgttaaaacattattagttgatttttaaactttcattataatgtttgataatgataatagtgtaaactactcaaatcgtaccacaccacaccgcaccgtatttttgtgatacagtttttataattttaagatctcgcggtacgattgcagtttgagaaattatataaattacatatatggtttggttagaaaaaaagattataactcgcattgtgaatacccctaatgattaataagattaacaacaatgtttctttggagtgtcactaggcttagttcttcaaggcattcactataatttgactctatttcataatatgagtctttctcattgctcaaggacagtttaatattgttgctgattaactttgtctaagtatattttatcctatggctattaataaagtttggtaatcatgtcatccaaattgtattcaacatgtcatgattcacttcttaaatataagaatttcaaagtcaatacttttataaatttcctttaaaatgtgaaaaagaatgatacaatacatcaatatcctctgagtgaactacttattaagaagaatgcttcatattttactttgctctagaataaaaattgaaaaaagaaacaacagtataaccttgacaaagaaaaaaagtaattgaatcaattgagatacatctaccatttaatatatattaagagagtaaaaaagatatataatatataattttataatgacattcattcaaaatctcgagcaaaaagttaaggacttagatcaaaaacttgaagacctaaccttagaagtggccaaggagaaagaacttgtagccgccaaggagaaagccttagatgagaaaatcaacagtcatgctaacgaccttgaaacgtactcagagattagcacaaagctcttttatgagttttggaagaccaaccctaaagctaatttaaattacatgggggagaatgatcatgagtccttgttgtggaagttcgaggagatgaaggctgaggaggaaactaaggtagctggggcagagtaggtcagttaacttgctgatgaaactattcgtagaaacaacgagtaggttgaagcagttgaccctaatttcttagccatcgatcaagacgactttaaggacactaaggatctaaacccgaccactttaatggactgattcccctctttttatcaatatcttagtttcctttttttgttcggcctacgtgcctttatattaagacaatgagctgactaagcagtctttaaacttgattttatttttatgtatgcacatatggctgaccgggcaacctttaatcccgggctaaaaacctttatatatctgataaaccctttgttatttttgcatgtatacttagttttttaaaaaattaaaatatttaaaaaatttcttaagtatttttcatgccatctttccaattttgtatgggtgtaggtgccccccaagtgacggagcaggctttagattcttggtcacttgcaaattatctagagtattctatagcaacctattcggaccctttacttgggtggacctatttgtacacatataagtagctatgtgactttaataagtcactaaatttttacaaggaattatttataaatttgacacaatttgaacgataattaatcactttatttatttattggttagtatgtgttggtattaaaataacttacatttatttaataataaaaaattattacatgatctatttggatcttagctaattgaaaataaaatcttctgaagaataaactccgtccaaaagacaatactgaaaagtaatccttgttaaaataagttgtgctttaaaagtgatcattcaaaccttagcactagcactttctaaatctttgaacggtgaccgtccagaaggccatcacttaagagtgatgtttgagcattatgcaattacatggtcttcaaacctttgcatttattggtagtattttctcaaatattcaccattccaatacaatgatactaaaactagctccatgttttcatcataccgacccaattcgtatgctcctgattttataacttcagttacttggtatggctatttccactttggtccgagcacacctgccacactgtctatagtgttaaagaacactcttctgagcactatatctctcacaaaaaaaaaatttctatcacttgcttgttgaagtacctagctattttttgttgatgagcttggagctttaagtttactagatctcttcgttttttcaatttcatctaatgattttgttgggagattatggttagtctcctaatcataggttaatcttctgtgggatggagactccagttctacgagtaacattgcttcatagccataggcttatgcaaaagaccattacgctacactaaaaaaaataaaaataaataagcttatgcaaaaggagtttggttactgtccgttcagtggttctatactgccagagtacattgggtaattcttcaggccaattacccttagtttcttcaagttatttttttagagtatccttgagcgttttgtttattaattcgacttgaccatttgtttaggggtgcgagattgctaataaaattttcacaattccaagtattgtatagaaatcagtgaacatttaacaatcaaatttcattacctgacataatattttaaaaaaatcggtcaacatataatgtggatagtacaaattctttttaacctaataataataagtgatgacaaaggtgaaatttatagtttattttgtgacgcttaactttttaggtaaaatatttggtgacaaaattattacaattcaccttgttgttaagtatttttttccccccttatattggagagaagattcgaaattgtacctttttttgtgaaaaaaagtgtggaatacaaaactatacctataactactgttaagtatttttcttttacttattatttttttttttgagataaaatgctattatattaaacaaagagttaaaatacaataggcataattggcagaggaatttcctccaaccatgaacatttagcttccgccgaaagagcatatctagccagcaagtgagcggcattattagcagatctataaatatgagagacctgagctccagggaaattggaaactaaaagagaaatgtcgctaagcaaactatggaaatcaga

SEQ ID NO: 298520 - DNA, 5393 bp, Cannabis indica
ttgttatgagaaagaaactgactttttaactgaagcaaaatggttttatagaggcattcctttatagtcggcaaaacccattgttttttcttcttctgtggcagatttcctttgcgttcctcttcaaaattcattactctatttccttttggcaccgaatttcccgaccttcatattttttttctattaaaaattcaaactttcttgctttattattataattattttattattattattaacattttgtgggtgtttggtggaaaggaaaatgttctgaagctgactaactcccataaaactattcaatgaatttcccttttatacataaaaaagaatatatttttatgtttttgaagatttgggttttcttagattaatgggttttacagttcatatcttgtcataaacacgctttacatttccgtgttgattttccttttcttcattttgtgttgggcttgcttccattttcataccagatctcaatttggctttgcttggagtacattcagacattcattcttccctggtaaacatctcattattgctctccttgtcctttggaactattctttatttttgtgttctttctccttgaaaacattaatgaaaaggtttgcttggtttctgggtacttgggaaatgttggaatatttatggtatgttggatcttttgtttgattttgtttttgggttttgggcttaaaaaaaaaaagaaatctttgaaatatttcacatttttccaagcaagaacagaacatgcagttgtttaattttaattaattctactttattttgtctgagaattttgggatctaagcttgatgttgttttcaatggtgaaatgcagatcaaattttgtgttatgtacacataaagttttgatcttttcatatttttggtatttggggtaaattttagtatgcttttgagacaaagcagtgtatagtttgaaggttaaaaaaaaaaagagagtgatggcatctggtgaagggagaaggaaccatcatactcttgtacctcttgctgcactgattagcagagaaatgaagactgagaagatggaaaaaccaactgtgagatgtgggaatgctgctcaatctaggaaaggagaagactattttctcatcaagactgattgtcaacgagtccctggaagtccttcatctactttctctgcatttgctgtaattttcctctctcttatcttctacccttttagatataattacatttaatacttgaatctaaggagcttatgtgatttacttgattttgagtaactagttttgttttgattttgcatgtgaaaaattctgtgttattagctatttgctttgtttttcttatatggtggtggaattttagatttttgatgggcacaatggaaatgcggctgcaatatatacaaaggagaatctgttgaatcatgttttgggtgccctaccccgcggcctagggcgagacgagtggctgcaagctttacctcgagcattggttgcggggtttgtaaagacagacaaagaatttcaaagcagaggtatgaatggactgtggtggagtttgcttctgttttagttttctggttttacttattcttcttgttgttattgttttcaggtgaaacttctggaactacagccacatttgtaatagtagacgggtggacggtgacagtggcatctgttggagattcgcgttgtattttagatactcaagggggcgctgtttctactttaaccgttgatcataggctcgaagagaacatagaagagtaagttttcatttggtaatgaatcacttgttgttttgccttctgcaatagattgtctaattgtttgtggtgtttttttaggagagaacgcgttactgctagtggtggtgaagtcgggaggcttagcattgttggcggagcagaggtatggtgcattttatatagtgtcattcggttttactacatgctatgatcacttggggattgagattttattgttaaaatttacagattggtcctcttcgatgttggcctgggggattatgcctttctagatcaattggagacatggatgttggcgagtttattgttccaataccatatgtcaaacaagtgaaggtaatcttttttcgggtcttaagttcgtggttgagcttgtcgagttaagataaactgacatccttttcggtgttatagttatctcgtgcaggtgggaggcttataattgcttctgatggcatttgggatgctttatcttcggatatggctgcgaaatcttgccgtggtttgccagccgaacttgctgctagacaagttgtaaaggtaatttcaatgatttcgatattctattaatttctcctaacaagtaaatctttgatggaatgcccttctaattactttcggtgtggatgatcctttaggaggctttaaggacaaggggtctaaaggatgatacaacctgcgtagttgttgacattattcctccagatgcaccagaacaaccttcaactcccccgaaaaagcagagcaggcttagagctctgtttaggaagaagtcccgtgactctgttagtaaactttcgaagaaactatcagctgttggaatcgttgaagaacttttcgaggagggctcagcaatgcttgcagaaaggttcccttttttgtatatgttattattatcgattcgagttctcatcatgagtgtagatgttttaccattttccacttgccttgcagactaggaaccgaggaaccaacgggacaatcaacaaccggaatattcatgtgtgctgtatgtcaagttgatcttgctccaagtgagggaatctcagttcatgccggctccatcttctccacaagcgccaagccctggcaaggtccattcctttgctccgattgtcgtaataaaaaggatgccatggaaggaaaacgcccgagcggagtcaaagtagcttagatccatatccttaaatgtttttagctcaccattctttattttaaccctttaatttcattttttttttgggtatcttaggccaggaattgtttaaatcttactttgattttgcatcaaatgtaaatgtaatgtggacaaaataatgtaaaaaagagtgttagcaaaaatgagaaatatttggttaaatgtgcatgtgtgtgcataattgagatcttgttttggttacttgttattaaatgttattttgtatgtttagattagattttacaacctagaacaggttatgtccaacaagtaatccacacagctggattctatgttgtgtttcattattatatatgtgcctttttctttttgtctagacatagtaaacctttaagctttttttttttctttatagataataaaaagctagttattctctttatgctatgcctttatacatttttttataagtacattgtggacgtacctaaaagacaaaagagataaagaaatagatttattatgtttctctttcatcagcaatgaacataggtttttgccgaatgaacatttgtttggttttagattattttttttaaaaaaaaatgttgattgagagttgatcgggtcaatctgttgactcggccaacccaaacctatggactggcgagcctgaattctttgaatgggtgggtttgggtttcattttttagacttgaaacctacgaactcgaaattcgatttgatgtttagccttagttttaagtattttttggagcatttagtataagggctcaaaataatatattgaaaatttgtaattgtgtttgttatttattgtttggttgttgtatataagaatatttagctagatttttcttaattgaattacattggttgtggggtgaatatgagaatttgatgtactattttttaaaaagactaattatgatttttgtattctaaattttgatgtgttctaaattatgctttgtaaattagtaagccgttaaaatttccacacaaactattgagattattgaattcaagaatttttgtcaaattctgttcaattttactaacatgacgataatccatgtattaaatcgtaagggttcgtgtactacacccgtagtccacttacttgttttcttgttttaactctaattacaggtttaggttcttttcttattactagtttgtattaaattgtttttttgaattttaatatgtattaaattgtgtacctaaattttgatatatattaaatcccacctcttgaatgacatgatttgatacatgttaaaatttgtgtataaaaaatcttaattagactaaaaaatcatagaaatgtagttttgttctaacaattaaataaaattatgggtgcaatgtaaccctcctatcaattgagaccacccattttgatgaatttatagggatattattttatgtgtataaagaggtttagtgtaatatttggtagaagaaggacagctagtgttactggttttgaaaacgatgaaacaagtgagagtagttttttgggaacttggagccgatgggagtggacagtgaagagtgaagacttttagtccaactactcagctttttgcagacgattaaataagataacaccattcctattagacactagtagtgcctatcaccttccagacgtatcactttacgattggctagcgtagtcatatttcttaaaaattattacattaaattatataggtctcgatacttaattagactaatagtgatattgacacgtaagaatgtgctagatatcactggtgccttttgacatttctcataagataaatagtaaaaaaatatcattgatgtttagcatatttttagtaggactgtacaaaaaaattcgtaaaccgcccaaacggaataacccgcctgaaccaataaaatcgataaaaattacaaacttaaataatctgaaaaaaaaaattacaaactgcgcaatctgttaattgggcgggttgaaaataagtccaacccgcccaattaaatcgaataacccgaccaacccgactctagtcgtttttttttttttttactttttagtttttattatatataatataaatgattaaatatataataatataaaattatatacttaattgttagtttcaaaatcatatatattgtgttgtgctttggtagaatttgatttttattctttgaaaccaaaaaaaaaatttggcaggtttggacaggttaacccaaccaaaccgttggtcggtttacaagtttttttttttttttaaatttgaagggttgcacttaaattttagcaaaccgaactttagattgggttagaaaatatataggataaaccgcccaaaccgatcgatgtacaaccctaatttttaggtgttataatgtttggatcccatataatttaaggaaacaattttcttattc

SEQ ID NO: 298521 - DNA, 1016 bp, Cannabis indica
ttttaaaatataaaactattttttaagaacaaatatgtgtatttggctatgcgtagaaaataattttttaaaaaagaaagttagaaaaataatttgtggtccgggtctaggtcgagttcgagtcaaagggttggggtcggggttcgagtatgagttgggtttggggttgggaccaggtccaaatctggggcttgaggttgagttagatttagggttggagctgggaccgagactagggatcagatctaaggttgggtctcgactcgggttggggctgaggacggggtcaagttcatattggtgtctcaaaggattgacgtgttttttatacacagaaaaatagaaataaaatttgttttttgaaagcattaaccaaacgtgttgtgttttctacatgatcacgcttaccacactcatacaaaatcacaatgaaaaatattaagagacatcttaggtgtcaagcactacaaacttattataacatgcatccaaaataggaaatctaaaaagctcaaaattacaaggaaaatgaggaatcagaagtggggatgctacttgtagggtggctagggcactatagctcacggtgattattgaaatggtgaagtcttaggattaaatcgttgcaaccccgattgaagttttagggagcaaacaagatcccatcaataattgggggtgggcttctagaaatagtgttatgtgaacctcgaaagtaattggtcgaataaaaggaaggaatcgatggtctatttatactaaaaccctcgattttcacctattcaatctaacaattctgataatctattgaaaagagagaaatgcactaataatttaacgaactgggaatacaaaggaatgttagacttttatttgggcttacattaaattttattggttttattaaaacttgggttgattggatagttctttgctgtgttagcccatgttgttggtgatcaattgttaatgggcttagcatctgtgagtaaagtctaggtgaagcagaagtgtgg

SEQ ID NO: 298522 - DNA, 1711 bp, Cannabis indica
gtactcgtgtataagagtcattcgttccgtgggttgagggcccaatggaggcttgaagcgggggcattacatagaatgcttgtgtttaagccattaccaattcgaacaccagatgctataatttccttagtttcgaagatgcttttccaaataaaacttggattatgtccaagtgtggcagtaagaaatgaacctctaggaaaatatcgagctttgtaagttttgcaaaccagagaagagtcatcagtgagaagtctccaagcttgttttcctagcaaagcaagattgtaattcctaaaatcacgaaaactcagcccaccaacattcttgtgcttacacatcttcttccaactaacccaacttaccacctgcttatctttcgaagattgccaccaaaatttactcatgatactctcaaggcgatggcatgtttataatggtagcaggaatactgacatgccatagctaggaaaagcttgtgttgccatttttaaaagaatctctttgccagcctttgataaaaaccgaccctcccattggtgtattcgtttctgcactttaccctttagaaagcccaaaattgcattattattctttcaactaagtaaggcaatctcaggtaagtgcttgagtcatctgcttcttttattcccattatttgactaatcgactgtcgagtagcaggtagagtattattgctgaaaaataagaggacttgtcaaagttcacaatttgtccagatgcttgcttaaaaacttgtagtaaactgatgacattggaggcttctctaccattagctctacaatataaatagctatcgttggcaaatagcatatgggatataacaggagccccattagctaccctacaacctttaattctgccagtaagctcaaaatgccttattagagacgagaaaccctctgcacagatcaagaacaggtacgaggataacggatcgccttgacgaatgcccctcttaggagtaattggtcccatatctctaccactattaaggattgtataccgaactgatgagacacatttcaaaaccaacctcacccactgatcatcaaagcccatcttgtgcatcatatctttaaggaaaccccatttgactcgatcgtaggctttactgaagtcaagactaacagccatgtagccttctttgcctcgcctctttctttttaaatagtgcataacttcataagaaatcatgatgttatccgtgattagacgccctgggacaaatgcactttggttatcaaatattaactgtggtaagataactttaaggcgattagcaagcaccttggataagattttatacaagacgttgcataaggagataggcctaagatcactcatagtagttggattcctaattttgggaattaagaccatatgagtatcatttagcccctgaggaaagtctctagttgagaaaaaatctctctccaatttgatgatatccgccccaaccgtgctccagcaacgttggtaaaaaccaggtgtcatgctgttgcgatatttagcacacgcaagtgtacgtatcgtttcaagtagtagactcactagcggtgaggttgatcccacagggagtgtagttaagtactttgaaattaaacttttacttctatttgattaaataaaagataggaaaaaaaaaaaacaatgaagtataagaaaatagttggaagcaacgattcga

SEQ ID NO: 298523 - DNA, 4092 bp, Cannabis indica
gaccctgatactcatgaagttcttgaaaatacttcttttcgctcaaaccttcctttgagacaatcaatagaagagtggagagagctaaattactgccttaggatcagatcttccaaggagaagttgctatcaggtgttgataagtccatggatgaagccctaaatcaaatgcaagatcttatgagagagagttcaattaacaaagattggatttccatagaaggattcaatgacattatagtcaatgttcttcgaaaatcacacaacaatgatttgaaaagaaagattttgatcaccttaaagtattttgttgaaggccacaccagaaacaaagtaagcattctatattaaagtatggaaaaaataacaataaataaaagagttcctaatccaatcatttgaaaattgttctactgcaggaagcactcattgaatcccaaggttggagtctcgttattcgctgcttagggcatgatgcaatcatctccaaggctgctattgaattgctttatgaactgctacaagacaggtctggttggaatgtgtctgtttgcagaaaactctctcaaaaaagcaatgttattctttttcttgtcactcttttgaagggttccgtgcaagagacagctgagattgcagaaagtatcatgttgaagcttcttgacattgatgaagagactatacatcgtgcagccaaggctagttggtataaaccacttattgattgcatagttaagggtaagaagattttattccattcaaagatttcactggcattttcctttccaattctatgaaaacaaatgaaagcaactctttcatctagcttaaccagtacattcaaaatatattttacgatactcactctttctcctttttatggtattcgaaggcataaatccattttgtccactctaccagtcactacttgatggtagtaattgttacctgtgtcactagatagaatgcagcatataaattatgaaacttgaatgatttggcctctaatccttattgtaagccatcattttgtcaaaatattaaaggtgctttgtaaaattagtctttgtgaaaatttttattagcaaaataacttttcaaaaaatattattagcaaaattatcacattttatcacacgagtgacaaaaaattatattgtggaactattatagttgttttgggactataaatttactttgtgcaatcattatggtcgcacaatgtaaatttaatgtggttatttttcaaattttacaattttatgttagtagttcggcaaattcccaaattttaatctaatttctttcagggccagagtgttcaaggatatcatgtgtgagaagtattgttaacatggaattgtctgattcaaatttgaagcatcttggagaagaaggggttatacctcctttgattgagatggcatctggaaatattgaatcaaaagaattgtccttatctgcattggtaaagctagcaggttgccgtgctaataaaaagcccattgctgaaactggtggagttgactttgtggtaaatcttatgtccacccccaatgtacctacattcattgttgtcaaatgttgtgaggtccttgagaaactctcttctgatgatgattccattaaatactttgttgataagagagggactgaacttgagttagagttaattgtcgccaacttgttagcactgctccaaaatcccaactctgccaacaatgtccggaggccagccctgcgagcacttcttggaatttgcaagtttgaagctggattggtcaaaaaagctgttctaactatcaagggtgtatctctagtccttcctcttcttgatgactctgattcggagattagggaagttgccattaagttattattccttttctcacaacatgagccagatggagttgtggaataccttctcagaccgagaaggctggaggctctagtgggatttcttgagaacggagataaagatgatttaaaaatgtctgctgctggattgttggccaacctacctaaatcagaaaaatcactgaccatgaagctgatagagtcaaatggacatactgcacttatagaaattttgaatactggtacaatggaagccaaagaaaatgcactcagtgccctctttaggttcacagatcctgaaaatctcgagtcacaacgtattctagtggaagcaggcgcttaccctttgcttgtaaatcttctcaaggctaattcagtgtcagcaaaagcaagagctgctgctctgataggcaatctttcaaccagtactccaaagcttcctgttgaatccaaatcctccttttgctggtgtttcaaaccatcaggtattcctttatgcccagctcacggtggtatctgtagtgtaacttcaaatttttgtcttttggaggcaaatgcattgcctgacttggtaaaacttttagatggagaggttgaggaaattgcttttgaagcaattcaaacactttccactttggttgatgaatcttgtcctcagaaaggagccattgtcttgcatgaagctaaagccataaaccccatcttgaatattctagattggggaacaaacatctcaaggaagaggctctgggactcttagaaaaggtttttgtgtccaaggaaatattagacatttacagtaccaaagccaggtttcatcttgttagtctaactggtgggagtgttcaagcagacggccggctcacgaggaaagctgccaaggtcttatcactcgttgagcgcttttctagatcctcaacatctcttgtttcagtactgcatagctaagatttttggtccaatattaaggtataagagcactttacttgtaatttgtaaaagaaaatatgattatattctttggttactcttactccatatagttgtacaaattcttcaagtttgggatgaataatgaagtttgtattcactagtttcagaagagaaaatatctgtataaattgaatttatgtatttggaaataaattatttttgactgaggccagatatatggattatgttacaataaaatcaaaatcaattcagaaaaaattgtggttaattgctgtcatccatatcagttcgacatacatagtttaagcctaaagttcttggaaataagactcgtgttttggagctcaagcattttgaagccataaatcttgagtcattggagctacttggtattccctttgacaaattaaatctctctgtatgtaaggcaattacaaatctctcattaacttgtgattggatttggaatataaaagagccttcatcgttagaatatctcatttagagccttcttctccttgagaattttactttgggcaattgggaaatgcataacttggagcacattaaaatctcgagtcaatccttgaaaagtttctatctggataatcgcgatgaaacactgactgttatgattgagtcagctccacaatcaccatcatttccttatacaggtgatctccattttcgtatatcaataatttcgtcgcatcaggactctgatagactcaattgttcttggaatatggtaacactacacgttgacagtgtcgaggctcttatctttccaaaacaattgaaggggatatttgaaaatcgtattcctatggttaattgggagcatattaaagtatttactgaatgtaaagtagaggaagaatcaaaattgagagataatgagtgcatttggtatcataacaaaaaaaaaattgtttttttttttaaaaaataattaggcttgttttgtcttgttttttaaaaataattttttaaaaaaaaaaaatattacaaaaaacaagaattttataaacaacaaaatattattttctattttaaaaaaaaattcacttttggtcaatattaattttagaaaagtaatttacggtataaatatttaagtttaactctcagttacaaatagatatctaaggttaattttaaaaaaatatttaatgacttggaccaattagaaattgacacgtggtaatttacttaacacttaacaacaccagatattttacgtggtttgtagttaatctgcacactccacgagtctatctt

SEQ ID NO: 298524 - DNA, 2332 bp, Cannabis indica
aaaccaaaaattctgttatacaggcacactttatataaaaatagatattactaaaatattaaatattttcatgattaaacagcttcatattttgttaaaggaaaaatataataaaatgccactagctagagtagtgattatttaaatatataccaataatgtatagaaagcaaattaagcaccacaactttgaagctttgggttaatattaggaatcattgaaggctttataaccaatatattattttgtttgctaatagaatgtgatcatagagaatctaaccaatacaaaaccatcttcattcatagctagactccatattcattattatttttgtaaaagacaaagggccttgcttttaaaaacatgtctcaataaaataaaataaaaaaactaataaaagtgatgatatataatatatatatatagttagccagccataatcccaaaaaaaggggttttgtgatgaatcatcatctctctttgtttttgtttgagtatggaaatttaatcatatcatcatcgtcagaatcctaagcttttgttatatagttatgtttttgtatacagaacacatcacaccttcaataataacgatagtgggtacatacataaaggataataattattatagtggtagggacacatttggtaataatattagatcgattattattaatgtgacaattaattaaatcaagatcaaacgagtattggtattagactattttcaatggttgcaccattttagtgtacattttcaccaatttgatttagaatttattaaatataatacaataattctaatgattcaacaccaaatactatattaattaaaaatattttatttaaaaatttcacattttatattgctacaaaaaaaaattcacattttatattatttacattaataatcaatataactaatttataatgtaattatacaaataatttattgttatatttaaaacatattaaaagaagggttaggatgaaaaaaaaagaattatgcaccaatttggtatatagattctaaatctcacactattaacggtggaaaatttggtgcataatttgatgtatcattataataaaatggtatgaagatttcacaccaatttagtagaatcaatatttagcttttatcttatgtttttgatctagtttatcttcgattaaataaaatcttgctaccaaaaaaaattgaggtgaagacttaaatcccgaaaacattgaagatgtatggaagacctatgccttctgttatttcataataaccgaagacatagggtatttatctttagaaaaatttatatttataacctgaatcaaagtcgtcgtttaatatcattgcgaccgagccgcaaacacaaaaaatcctaaaatcaaaattattaaacaacattacttttcaatcaccaccgtttaacaccaccaaattttcgagttccgtgcatgactttccaaaaaccaccgtgcattttttgacaactattgcgatatccaaaccctatatcacgcacagaaaaaatacaatgtaagataaaaaggtgtatatccaagtgatctttatgtcaatgcaagcaaaagacaacatagaaaccctcaaacttgttgtcattaggtgatcgcctccgttcttcgaaaatcttacaaaagcgtcagtctaaactctcacatctaccttcatattctaaaataaattaattttatagcgtacatgtgttttcggtgagaaaactagaagatttaaaagaaattagagaaaatgatgatgtatggaagcaatggaggatggtagcggcgtttttcgttaacagaaacttggagaagaaagaagaaaatgagagtttcagctctaatattagggttttatagacctatgtcttcggttattttaaaatactcgaagacataggtcttcacgtgtatctaatatcatgttagtatagttgagacctgtgtatttggttatttcaaaataatagaagacataggcttccatgtttattagggtaggagacctatgtattcggttattgacataggtttctatgacttatgtcttcagttatttagaaacaaccaaagacataggtctgtaattttttttctatctttttactttatttttaccttcggattatatatttaatttttactattaaaattcgaagatattaatctacactagatttctagtagcaaatggcgtaccgtttaagatgtgctaggcaatgtagtttctggtaggggtgggcatccgatctaatccaacctttttttcctcatccgatcgaatccaattagtgattggatttggaaaatcat

SEQ ID NO: 298525 - DNA, 927 bp, Cannabis indica
ttagggcataaaatccaacaagttaaaccaggtatgaatgaaaatgaattgcctaggtacaaggcaaggttggttgcaaaaggttttagtcaaaaagaatgaatagatttcaataaaatctttgctcctgcagtaaaatataaaaccattagaatcatgttatctcttgtatttgatctagaattattagaacaaatagatgttaccactgctttcttaaatggtaacttggaggagacaatatacatggagcaaccagagagatttgaagttaagaagggtcaggattaggtttgtttactcaaaaagtcactgtatgcattgaagcaggctccaagacagtagaataaaaagttttgactccttcatgatttcacaaggatttgtaaaaagcatgcatgacacatgcttgtattacaagggtacaagaattgaacaagctgaatatctactcttatatgttgatgatatgctattgatcaacaaggacaaaagaaaaattgatgagttgaaaaaggttttaagttcagaatttgacatgaaagacttaggggctgctaaaaggattcttggaatcaatataaaaagaaacaaagaaggataagaattatgcttatgtcaaaatgagtatcagaataagctcattgataagtttgggattagaggtgcaaaaccagcaacaatacctttatttggacagttcaagtcacatcaaaacagagacctaaaacagaaaaagagaagaaagaaatggagaaaattctctactctaatgcaataggtgttgggattaattttactaggatcttagatctactcccaagtatgttgatttaacaacctaaatatgaacttctaaaacgataaatgaaaacacataaaatttaagaaaccttacagtgatggcagcggaattaagtgtctcct

SEQ ID NO: 298526 - DNA, 2535 bp, Cannabis indica
ctcagatcatatctattcattcatcaatctcttttcccatttccactttctgctcaagttttctttgcctctatttaggtaactgttatttcttcatttatgcttattcatgttgtattcattcacttttctctgattgtttaattaaacatttaagctttactgggttttttcttttatcttttcttattatgattttcattttatgaacatcttagttgtgagatagttaaaaatttattagttttttagtattacttttattttttttgtgtgtgggcatatatgtgtagcttgtgctaattaattgttagaaatatatttagtcagcggctagaattaccaaataataataaatgaattagaaattcagctattattacccaccatatagaatttttggagctgataaacattttagaaattaatgcacagaattttgggacaaacttcaggagcagctttaatattatataacttgtccctgtggaaatgaataggaactggaatcaaactaagattttctgagtgcatcataattattggaagggttgaatttactaatctacaagaatttaaatcatttcagtagttgggtgtaacaagagagatggtagatggatgttaggaacttattggactatgctaatttagttgttgtgtaatatgtaattcttgttgaattacttcttaaaggataaattctgatatgattttgtttctgtttcttttcctttatgacttagagaagaattaattgtagatatgggaaatggggaatcaacatttgaggataattctcatgaagatattcactttgctacttatcaccaaccaccttcttatgctcctcaccgaccaccaccttcttatgcagggacatcaatggatcatcaacattccagatataagcatcgatccacacgtattgcagataactacagctctttagatgaggtttgtatgcctgatatttcttctgtcgataacttctattcgttcctaattggatatcagcatctaatctttctcttcaatcctaaattgttttgcattttgtcactgctgagaaacaaaatatcattttagttatactaattgctttaggaagaagtcatttgaagattcaaatgctaactacttgatttatctcattaaaatgtgaaatcctcagcctactatttaagaagcattataattacaagttacattttcagattagggggtctgtttatcttctggtctctgatctttcagtgtatgcaatggaatgtgcttttagtctgaagtgtcttgaattgtgtctcttaaacatctgtggaaatcatgaaccaaagcgctttgtactcgctaattcatttgaaatcagttctttcaatttatcacattgctggatcacaagaaacatcttctaacttatccggcaacagttcatatgtggttttcccttagagcatttgaaattgatactgcacttattttagtttccaattcttttcacaattttccaatcagattgatctaaaattattcagaatgctgactcaggctgcatttaccttagcatgcttttaacagctttgccctgtcaatgagaaatataaatctgataggctaattcaaatcattggagatcttcattgatgaatggttattagtaagaaatcttcatcttttatctgcctagtagttcaacatttgagaaatccaaagtaaaccaaccactcgattcaattggtctgacattttctcaagagtatatgctaggctgggcatatatgtatggtatatatatacgatagcaaaaagaagaacaaggaggtcaagcgcctagtttaaactcagaaattgaatggctaacacgtaaacactaattcgaaggagttaaagaaatgtaattactgatattcttaggtcatggggttttgatttttatgttgttatttacaagacttcaatagctagctaatgtgaccaaatgataccttcgtaggtttattctgtttacatttcatactccatattgataggcatgtttaatttatgtgcatactcatcttctgatttcccaaaacatatttcttaactaggatcaatatacaaatatactaggttgtctctgctttaagagaagctggacttgagtcatcaaatttaatacttggtatagacttcacgaagagcaatgagtggacaggtaatgtattattttccccacattctttaaactgtataacctctggtatagaatatcaatggctctttacaatcattgtaggcaggcactcattcaacaggaaaagccttcactcaattggtagcaggcctaacccttacgagcaggcaatctctattattggtcggacattgtctccatttgatgaagataatctaataccgtgttttggatttggcgatggttagtaacatttcctaaatcaacttcttgtttggaattgtgttaattcttttaaggtaaattgcggcataaatacctaatgttttagattttatacacttaaatacctaatgttt

SEQ ID NO: 298527 - DNA, 3535 bp, Cannabis indica
attagagtcattttcttcttcttcttcttcttctttattttttgtttaattatttaattatgaacatgattattattctgattatgtttgtcattttgaattaaacactcttttctagagtatttatggaactattttagattattctcgtatatgttcttattatttgtttgtgcaattttgtgttaattattatattgttaatgattgatcaccattaattagtattgagattttagatttcacacttgagagaggtaatttagaatcaaacttagaatttaatgacatataaaaaaatgtaagattgagagattccactaattctatgagttttatttaaagagaatcatattacttttgttgatgcatagatctggccaacaccgtctgactagaatggtgagatgagtaatgagttaagtaaaataaaagaaggacaccagaactttatagtagttcactccccgtgtcgtgacgataatggagctatgtctacttcgagtttttatttctcacgagaattacaaggaaaattagctaaagagagatctcagtttctagagagattgaatgtgtcatgagacaagctttgaccttacggggacctagatgaatgtgttaaatgagcttgtagatctttcctttcataggcaagaatgtctattaaaataataatacaacattacaaatattacatctagattgatcttgaccatagattgagattggttgagattctcaattatgacttcagatgatgatcgttaattttcgagatcgaatcgcattttttggatcattttttgggttatttgtggaaaaaatcacacttcgtcctgggggcagtttacatcgatgacaccttcacaaatgactcttggcccatgccccttgatgatgatgagagtgggaagagtggcactatttttggctccgaagagatgtcagaagagaataattcttctaatgatgacctacactattcaaggagaatatctatgtctctcagtcatagtagtgaagacagagtgagactaagctttcaagtcaccccgaggcttaagtgcctgaagaagttggtgaatcagcaggttagtgatgcaccacttattaaagtaaacattagcctgatgtttacttattttgatttttgtattatttttacgtactaaccacttgtttttctttcttttgtagtgacaataagtttcctcgaggctacggctacatgtacctagaagaagaatcctgcagctaagtctagtcaatcgattattcatgaggtcatgcatgccattcttgttgcttcttcagctcctttgaagaaagtccaagaagagaagtaaggtcaaagcggctgaaacttctggaccatctcgggattaacacaaaagggaaagagaaggttgttgtaattgatgaagaccctcatgcttctcccgttgtggcctctctgaaagaggtggacaatgctgggtcaagtgcctaagcttcgggtgactcgggggttgtggatgacctatgtgcattgggcactttgttgttggcacttggggaagctctaatttcttataaggcagagagcaagcctttaggaaagttggtgtccaccaaaccccgtcacgacattgctcaaaaaggcttcagtgatattttcagggtaagttgtcttctttttgtcacctttcttctataccttcaaaagtttactaactttgctttgtcacttgtaggcttgcatggactttacttatgtcatgggaaacaaacataagaaagtagtccagcttgtagagcagctatcatctgctgaagaaagggttaccgaggtagaatagaaggtagctgagctagagaaagctattgacgagcttgagaccgacgtctctaacctctagggaattgaaaatggcgcaaaggacaaggaggatagccataagaaggagcttaaggctttaaggaagaagacttccgaggtggaagcatctctccatagttttcttgatgagaggaacctcactgttaccaagatggaacaaggttggttgtttgtagggccagatcataagccttgtggagaaagcaatagcaaacacagttacttatgataactatttctttgaggtcatatatctttcttggtcagccaatggaggtacctccagtttcaactggctaggcttcccaactatccatgccaagcttttgagggagaagtatgagcagctcacggatgaggagttgatccatgatataaacctcactcttacggatgaggatgctctctaggtcgaaggttacaacccctagtgtcgagttttagttatttttgctccatcagatgtcttgccttcaaatgtaataggacaaaatgaacccaccattgaagccatagcagacagatgtttgttagcttctctagacattttttttagttcattgttctttccttagtatttagtttagtgtgttagttggtcatcacaggcgacctttatagtgtggatagtattttataaaaactttatcaaaattcaatccaatttaattagactttattcaatttttttggtttttatgttatctgttactacatgatgtctaacacttgcaaagtactttatattttaagaaactcgattaataatggtaatgtaaacattcgtgtaaacaataaaagtgccacaatactagtactaatgtgctaattttttttatgctcatgttaacatacttcggtggatatgcccccaagtgatgaaagaatttccttcattggtcacatgccataccaaatctcatgagcttttctttgatcacgagccttagggggttgccacatattgagcattcatccactaatttaaagattcgtggcttggcagtgtttactcactaaagagataaccaaaactacctcaagatatcagactggcttttcacgtttgtcgatttcgaatggtctgtgaactataattgattaataaaaatgaagtaccaataagttttaccaagtaattttattcatcatattttaaatacaattacattggttgagggggtggcatatctttagctaattccaatagtgaaaaataaatatcattagcgtatttacaattttatttaaagaatactaattcaatccccactaccttgatgccatgttcgactagtagtgttgggtccatgacttggtcatggatttcttaatctaaagggagagtgtcacaaaatgattatgcatcatctatttggtttaagagtcgattgatccccttgccaagggcaaagtgtttttactgtttagtaaacagtgaagaaaattgtctagtgcataagatgctttttgttaataacatcgcagatgctctccgttctcgtgatagttagagccccgtgatccgaaggagaaagaccgagagctgtacaatccttatcgcttagggaaggtcatgtgtgatgattctgagactgtgtaagtatcatattacatagttgaagaggacttaaatggattgattggtattac

SEQ ID NO: 298528 - DNA, 2037 bp, Cannabis indica
ttaattaaagaaaaaaaaattatcataagtaacaacataaatttgtttatgttattagattgataaaacaattgttaatcattaaaaatttatacataattatttatacctgttgcaattggtggagggactgatcttgtatggaacattgacaccacactttccaggaagtccggcggcgaggtttaagtttagtcctttgatgctgccggccgcaaactgcaagcacttgcatgcagtcttgcggtcagctggggtcttggccgcactgtttagcgacctgatcccattacaacatggtgaagggacagcaccgccgctcttgaggtagttgatgcatgggctaagactgctagacacttggccacatgttagggcatgtgtcgttggtgcaaccactaccatgaccatgaccaccatgcagagtagcttcatgcttgaagagtttgaggccataattgtaataatgtgtttcaccaaggactgaatagcaatattgttatttttatgaagttgtgttttgattattgagtaatttgttggtatatgtgtgtggtatgatatagaatggagttgctaattttatagggagtaaaaagtggggtcttgatttaggagaaggttatttgttggtagttgggctttaaattaggagtgttgtcctaatttattatttctttcgatgcctacctcttataagttgatagagtgagagagagagactagcttgtttgaaattttgtatctttggtggtcctatacatattgaataagaatttctaagtatgtaagagtattgttattaggcggctatgatgcctaatattattataattaggtgacgttttataaatagttagttgtcctcaatcaatattatagtgaaatctgatattaaattgtacatatagtaatatgacaccttataagggtattaggcaccaaaagtgttcttagcatttttcatatgtaagagcatgcaaataagtgattatagcccacttaacaaaaaaaatgtactctaatagtgtgccaaacgatgcaaaatttatatcaccataaatgcactattttctttttaaattggtgttcattattgttgattgattttactacataagcctccatgctgtgaccaattttttcttcaaatatcttgttgactaatcgttgataagttgctcccacgttttttagtttaaagggcatgacctttgtaacaccctaactaacataagcgtattacgtgatttttaaacatgttgtgcagctcgttgctaatcaacgaggtttatggaaaacgtgattaattaacatttttttgcttttataggtatatgatctctgaatcgttaccttaaaacactgtcaagggaagggataaagaattgtataatattattcaaaataatctattttaaattggctaaacagtaagtatttatttttgaaataaataaataattttttaaattaattaaataggaaaaagataaaaattgttaagacaatatttgttgagctaaaagttgtcagaataaaagacatcatccttgtcctaaataagacaatgtatgcacctatccaatagtaggggtccctattagttttatctttttttgttaattaattatttaattaattcaattagatgaatatttgaatttgaaaagtggttaaggatatttcaaagtagttgagatattctatcaagtagttgagagattcctcataaatatcagtaattgaattcagttatagatatttactgaaataattaaatatgatctaattaatagagatttaactactataaatacaagcctgatttgaaaaatcggaagatgctttttcacaacataattttcgaaattaataggagcttttcaactattattttcaaaataccagaggaaaatagaaaattattttttctctcaaattgttcttgctcatgtgttgagaattcaataaaaatacattatacactttatcataatagctcacactattccttgtgtatggtggatcgatttg

SEQ ID NO: 298529 - DNA, 2367 bp, Cannabis indica
tatgacatcaagtatattgagttttttagtctatgtaaagaggactactcatctcattttatattaaatctcttcgacatggtagaacaggcaaaagcaaaccagaaaagaatcaaagaaaaaagaaaagaaagagagagagacagatgctgaaagaagatgaagtatttcattgattaacaaagtcattaagcatgacttatatacatcagtacacttaatctagaagctaacagaaacaattataaagctagttagaaactaacagttggacagagctaaccaacaagctaaatcctaactaacttttaactaacacaagcttaactaactcattttaacaagtcccctcaaacttacaattggaactactttcaattgttagtttgtttctaaacagagaaaatagaaagctttagatagccttggtcaaaccatcaggcacttgatcaaaagcaggcccatgcttgacttcaagctgtttttgctaaaccttctctatggcaatatagagatccaattctatatgcttagttttggcatgtagaacaagattgagtgtgagcataatcgtgttgaggttgtcacaccaaaccactggagacttaggaagttggatgtgtaactctgaaaataaggaatgtagccaagcaatctcaacaatagtgattgcaaggcccctgtattctgcctcagtgctggacttgaaaacagtgttttgtttcttgcattgtcaggtgataaggttatctcctagataaatcacaaaactagaagttgatcttctgtcatctggatctgctgcccattcagcatcacaaaaacaagttagctcaaaattaacaggtcttgtaagatgcaaactatagtccaaagtgcctccaacataccttaagattcttttaactgcaacccaatgagcttataatgcatgaattggcatactttgttgacactgtacactatttttggtctggtgatagtgaggtattggagagcaccaaccacagaccagtaaagctgagggtctttaatagggtcactcccatatgcagaaagtttgaggccacatgtcataggtgtagaggaggatttggcaccttgcatttttgccttgcataccagatcctaggcatactttgtctgagatagatgcataccctcagctgcgtgagacacttcaattctaagaaagtaattgagtttttcgaaatccttgagagagaattaatcattgagagctgtaattatttggaaaatggtctcttgattgttgtctgtaattatgatatcatcaacatacaataggattagtgttgtggatgaattaatgtgttgaatgaacaaggactgatcagctttggaggaagtgaacccaagagagaaaagacagtgttgttgtaatgaaccagaaacttaattatgaataactaggatttattatatattatgggttaattaaatagtaatgagtaggattatgatcctactaacttaatttagaataaattataaattttactataagtggataaataagcataatttgttaattacgaagatttatttgaaatatgtggatataatgtaagttattcgtgaaataaaaatatttttaggttcatttggatacccgatcggagaccaaaaatgtgataacggttttagttaataatattgatggaattattgagataagtcgattttaaaaatattgaggtattttagggtactcagaattgactaaataccctaaaattaaatatttcttagtggctaaaaaataataagataactattaataataaattttttattaatattattaataaacgttattcttatcagtttaatatatatataatattatgtttttaaaaatatatcagttaagtaatatatatattaagtttatgaactgaagaacacaagagaaacgaaactctctcttctccttcctgggacgaaaccctctctttcttagtccattttttttgattttcaacccaaaacctagtatttcaagctccggtagtagcaggatagtaaatcactgaagaaggagagcttaaggtaaggattggtttcgttttaaggtaaaagctattgattttttatagtggctttgtgatctagagtagttatggagattctgacttcgtagaattattctttggtagctatgggtctagttttgatgtttacttgttcaatttgaggtgattttgagttagaaattgagtttggaatttttaaagcttaagtgcgaacattaatggcgttttctattttagggcttgatttttatttctgttacgtaaggattgttgtatttatagtacacatgtgccctgtgaagtttgaaat

SEQ ID NO: 298530 - DNA, 5539 bp, Cannabis indica
aaacatgactaaagcatattccttttacatatatggttatgttgttacacaataatgaataggttcatccaatgactcatatatgaccaattttatttctttatattcatcatagacatgtaaacagccaggattgttttttcttttttcaaagaaaaagcttgcaataatactataatagtgaggtggtgaaaatttaccatatgaaattgttactaaaatagctttcattttgataatgatgatgattgtataggtttacgaggcaaatttctttccaccatatcaaattccctaaaataaaatccttatcgtatactattgatacgtacaaattcttccaattttgatacaatgttttttgaaaatagaaggaaataaaattgggatacaactcacctattcacaattcagcaaaataaaaaaactgacctagtcacctagtcacaatttaaaagatactaaaaaagaaaaaggaaattagattttgcatttattattatagaaaaataaaatagagtttcaggtgtgcgtaagtgcgtaacagtaatttaacggagcacactatatccatgtttgtcaatcgtcaaattcaaatttttctttttttttttaaaaaaaaaaaaaatccttaatttgtcgaactcaaagtggggagtttcgggcttcgacgcacaaggaaataattattaaaaaaaaaaaaagaccttggttttggctttctcatagtttggccgtcgaactcgaaagtcgaataacgagtgttaagagtgttccttggcgaaaatctaagaaaacccacgtaattttccttcgaacaatcaaaacccaacttcccagtttcacccctaaaacccgccagttttggtaacacagtcctctctctcagatccatcttcccaacccatctaaacccaaaacacgtcctttaacgccaaaccagaaaaccaaaactcaccatccctttccctctttaatttctttccttctttcttctattttctctcttataaatttgagtcgaatgccgtttcaatacagaccaattttcttagcctagagagaaagtgaagggatagagaaagagaaagagagagagatggcgggtcagattgttaaagcgaggagggataagctggaggcatgcatgacgtgccctctttgtaataagctcttgagagaagctactaccatctctctctgccttcacacgtgtatgttccttctctcaactcttttatcttctcgtcaattcttcttcttcttcttcttctttttgttttcctctccacttcttctatgattttttttgtgatctgggtctgtcttgttttcgtgttttgtatgtgtgttttcgttatttttttgatctggggtttcggctattatgtaattcgtttccaatttctcgtcgaatcattgtgatattgatttgcattgcacgacctgttcgtcaatttcaaatccgtacgtgtaatttttcttcttctttgcatattcgagttgccccgttttctgtttcggtatgtgattgctctactatggaaaattttcacgaggcgaatgagttttaattggtgttctcgtacttaccagtgttggtattttcgaattccaattcttcagtagtgtttctattgttttctgttcagtatttctgatctgcttggtctggaaagtgatcttgttcttcttaatatagaatataagtaagaatatttacttatatgataaatgtttatgatctgaatgtgttatactgttatcttaggtgaatatatgaccatttaacttgcatgactgaagctttttcagttaggcccaaaaaaaaaaattaattatagacatatcgtcatttttctttctggcattttgaaatattccacagtaaactaagctaaatgattgattatgcttttaaaccaagtagtattcccctcgtacaatattgttaattaagttatatatatttagggaaagcaaatattgaaggcacaataagagatctttcttctggtgtgtcttaataacatcttccaacacattatgtaaagttttctgttttattcaatacaggcttttatttggtgaaaccaaaatgttaagaggctgtaatttgcttagataagtgattgaaagactagactctacttgcaaccactatctaacttatgcaattaatgaatttaaaatcagtttgcaggaagtgcatatatgacaagctctcagatgacgaggtcgattactgccctgtatgcaaaattgatttgggctgtcttccagtggagaaactcaggtcactactttttctctacagcctgtaatataaacattccatcaattaaaagaagttccctggcagagtgatatctttagttattattatttgtttttaactttcctttatttgtggataaaagcttctagtgtagcctgaaattttttattttaatagtatgttatttgaataatgatccaacatttattgctctcatttcataacttattagaagtatatgtcgacatcctcaaaaactacatctttttgtttattttgaatgtattttgtgaacattttcaggtaataattcctagagggatcttgtaggacattcttgtaaacatgttatctgtgacctaacattttctcatcagtttgagtttcaagttttactcctcttttacgagtatactgatattatcttttcattttttatggtcgtgaatttttcctgttatcatcggtttaatcagaaacagtcattcattaagctgggggcagtaagacccctaaattttttgctctcttttatatatttttatgtaaattaaactaaaatatatattatttgtctaaaattttggaaaaagttataataaagccctcctgagaaataaaaaaatggtatatgttccctcaagaatgaagctttgtcactgccaatcatctgaaactgttatgatttgaaattctacagtgtgatctagccagcttatgtcccttcgtttaacttaccggtcaatgcaaattaggctgcctagtagaactattaaatgtatagtagggtgaatctcatgaaaatttctatgtaaccctatggatttttatacatgcgattcacattgtttaaattgttacactgaatattttgttttgagatgcaaccacatgctgaaaggacatatgttaatgacatgcaggccagaccacaatttgcaagatattcgagcgaagatctttcctcttaggagaaagatcaatgcgcctgaagctacaaccccaactcctgtgcctgtgaaaaggaaggagcggtcactatcttcgttagtggtaaatacacccaaagttccaatccaaactggcttgactggaaggagaacaaaaggtagcagcagaaggcctcctccttcacgaggtaacaactttgctgcagaaggtaacatcaagggagaagattctccagaagatcatccattaagctcaagctcgcctgaatctcaaatcagaactggtcgaaataaaatgcaggtactaactttgtgctttagatttactcttatggaaaagaacatatattggaccttctgtgcttattattcttttcatacaggattcttcgtctgctgaaccttctggtaagaaagagaatgacgatcttggaatggaaggaaaagctgatctgtggaaacctttaacctgtcttgtagaagttgctaacagaaccaagacttctaagtctaccaatactcaaggcagtactgtcgctaaatccgaaaaaagtatggcccttgatagcgaagtacatactcctgataccaaaaccgaagcagactcaccaaatggtctggacagtcagtcatacgagcctaagacgaaaataaaggagtctgaacagacaaaagtgaaaaataacggtaatgggacaaccgtgcttccagggcctgtgaaacgtagaaggatgcgtgcagcaaatcgtaaaagagctgcatcatctggagagagtgcttcagctcaggtgatgctagatgcatccggggcaaaccgtgacagaagagatagcccaatttggttctcgctggttgcttctgaagataagtaagatgcttctttgcctgcaaatccttttatttgaggtgtttgaattcaatatcagattctatgttaattggtttcaggaaaggagaagtttccttgccccagatttctgcatgctacttgagaattaagtgagtttcgcgactccctttgcttcaaagttttgttgtctcaaacataaaaattgttggtctataagaaatcacctattttgaaaataaatcatttggttttcattggaatttgttggattcctctgctttcattctgtagtaataacttgtttggtgtgttcacagagatggaaagatgcctgtctcattcatccaaaagtatctagtaaagaaactcgatctgaaggatgataccgaggtgagttcatctcagtttccctccaacacaaaaaccccaagatcagttagtttggttcatcgctttataacataatccaatccttgttttattttatttctgtttataggttgagattctgtgccgcggtcagcctgttctcccgacactgccactgcagaacctggttgatctgtggttccggacagcgtccacatcaaagaaagtaccggcatcagtcggttcgtcagccaaggactttgtgatggtcctctcgtattgtcgaaaagtccaagatgcatgaaagagcttagttagaaaattttcagttcattttcaattttccaatacacagtcaccaatactgctgttgttgttgttattggtagatttaagtattagcttctcatttagtcatgtgttgctataccatgcggagagtgagctaatatttatgtttgaattctttgattgttttatttccatttatttttctccatagttattatcagataaatacatgtgctttttatgttatccatccctaaatgttcttctgttctaaacctaaagccaaacaaaaataatctccattaatatacttgcaatctactggttttggatgttaaatactttttaaccagtctcatactctcatttaagtaaatttatacgtttttacaaataattatatgtaattataaatgtgcgcaaaatatataaatcccatataattaataagaatggatcgggtttttaacaacaccaacggaatgtaggactaatcttgttttgtcttaaatcaagatttgtattagtttgatataattttctaataattaatacttgtcaattaatcaaactattgatcggataggaatgacatgcataaaaatctgttcccataaaatttaatggcaaatcttgtcaattatggtaggaatgataaatttatttatttattttgcaggggagtatgacaaactttttttgattccaatagtatgacaaacttttaattagtacttgttaaaatagattaaaaattattatctaaaaaggcaaaactctatagagtatagacctgtattt

SEQ ID NO: 298531 - DNA, 6854 bp, Cannabis indica
aaaaaaaaatcaaaataaaatgaacgttgctgtagtccttacagtttaccataatttttctaactaggagatttgtctatagaattctttggtggaataaatccgggtactctgttcggtgaagaaatcacactgtagctaaaggaaatttaaatgtatttatttaattgttttcactgatgtttgtttggtttaatttttttgtaaattgcgctaattacccatgtttttatccgaaccctctgaactaataatttgtttgcaaattaataagagtgtttcttgataattgacgtgaatatcagcaggcctgtgaaaaattctaaaagggacaacaaaatagcctcgtaaatcttcaaatggttttctgatatgctttttctctgcactgcgtgaaaacccattacttttcatttttattataatggaaatttcgaaccgctcctaaataaaaattgtgttcctatctgtaacttggttttgcttaaattccagtaaatttgcgaatctatttaattgtgaaaattgtttgtccctttgttttgctcttttgaataatttaagtttatttgggctcagaaatcacagtctaaatggaccggaggagttggccctggaagaagaaatcatcagacaaagctgcagctgaaaaagcagccgcagcagcagatgcagcggctgcttctttggctacagttggaagccagaatgaggttgtttctttttgtagaaaagcaaaataaattccttttttccttttttcctttttttttcccttcctattttcctgtttcgcggcttgtaaatagtaaacatgtggtgttttatgtgtattacaacagctattcttgcattttctctgtattttttaacccagacactattaatatgttggacaagttcttacattgatatgatttactcgttctgataatttaggcgtctctaacattcccatgattcaacatcttgttccctttggtgtgtgttgtttctgattaagctacctgaaaatcagtttatatcttttgtggggattagctgttgtaattctttcagttgaaactcttcgaaccaactaaaaggaagtactagtgcattatttttttttttttgctttggttaagcactgattgttatttcagcttcatagtctgctactctacttgaggatttatgtacttggtacattttgataattgtcttttgtttatttttacctttaatgagaacaggaaccatacaaaaaaccaaattatgttcaaatatcggtggatcaatattctcatctgacgggcttggaagatcaagtgaagacatatgaggagcaagtcaagacattggatgatcagataactgaattgaatgagaagctcacggcagcacaaacagagatgactaacaaggacaatctggtgaaacagcatgctaaagttgctgaagaagctgtctcaggtatgttgtgcaccttattatcatactaaaatagtaatcaaggtctagaagacatgttagtagcttttcaacttgatataagtttatcaattttagaacttctgttgtgttccaggttgggaaaaggcggaatcagaagcagttgcattaaaaactcatctggaatctgtgacactcgcaaagctcacagttgaagatcgagcatcacatttggatggtgctctcaaagagtgcatgcggcagatacgtaacttgaaggaagaacatgagcaaaagttgcaagatgttattcttgcgaaaaacaaacaatgtgagaagattaagcttgagctggaagctaagttagaaaacttagatcaagaactccgaaggtctggtgctgagaatgctgctatatcaaggtctttgcaagagcgttcaaatatgctcatgaagataagtgaagagaaatcacaagctgaggcagatattgagcatttgaagggtaacattgaatcttgtgagagggaaataaactcattgaaatatgaacttcatgtgcttctaaagagctagaaattcgcaatgaggaaaaaacatgagaataaggtctgcagaagtagcgaacaagcagcacatggagggtgtcaaaaagatagctaagcttgaagcagagtgccagagattacgtgttcttgtgcgaaagaagcttccaggtgctgccgcacttgcacaaatgaagctagaggttgagagtttaggccacgagtcacgtgattatggtgactcacgagtaagaaggtctcctgttaagcctgcaagtccacacctatcccatgtgactgagttttctctcgacaatgtacagaaatatcagaaggaaaatgaatttctcactgaacgcctattaggtatggaagaagaaacaaaaatgctgaaagaggctttggcaaaacgcaatagtgaattgcaagcctctagaagcatgtgtgctaagactgctagcaagcttcaaagtttggaagcacaaattcaaaacagcaatcaacacaaaacttctccgaagtctattgttccaataaccacagaaggttctttcagtcagaacgctagcaacccacccagcttgacctccatgtctgaagatggaaatgacgatgacagaagctgtgcggagtcttgggctactgcattgatttctgagctctctcatttcaagaaagataaggacaccgaaaagtcagaccaggctgataaacagaaccacttaaatcttatggatgactttttggaaatggagaaattggcttgtttgtcaaatgattctaatggcaccatatctggttcagattcaacaaacagtaagatatctgaaggagtgaaccatgatgcttctgaagtcatcactggcaaagacatccattcagaacagcaatgtaattcaaattctttggaaaatcaacagcctctctctaatgtggaatcatctgatgaaaagcagctgccactgatgaatctccgatccagaatatctgtacttttggagtctgtgtcaaaggaaactgatgtagggaccattttggaggatatcaaatgtgccatccaggagacacatgatactctccaccagcacgcagtaagttgtgtttctgaagatgttcattgttctgatgccagatctgataggcaggtcaatccagaagatgctggcttaactgctgaaaaggaaatctctctttctcagccagccagggaaagtgagcagattagcaaagatttagctgctgccatttctcagatccatgattttgtaaccttcttgggcaaagaagctatggtagtccacgacactttcaccgaaagtgatggattcagcaagagaattgaagatttctctgtgacctataataaagtcatgcacagcaacctaagtttacttgattttgttcttgacctttcccgtgttttagcaaaagctagtgaactcaggtttaatgttctgggtttcaaaggaaatgaatcagaaactaacagtcctgattgcattgacaaggttgcactaccagaaaataaggttgttctgaaggattcaaatgaagtataccaaaatggctgtgcccacatatctaattctgtttcacaccctgagattcctgatgatggaaatatcgtgtcaagctatcagtcaaatactaattcctgcaagatctcagtggaggagtttgaacaattgaagtccgagaaaaataaccttgcattagatctaacaagatgtaccgaaaatctggagatgactaagtctcagttgcaggaaaccgagcagcttctttcagatgctaaatcacaattggcttctgtgcagaactcaaatagcttgtctgagacacagttgaagtgcatggcggaatcataccggtcacttgaaaccaaggcccaagaattggaaactgagctgaacctgctccgggtcaagacggagagtatggaaactgagcttcaagatgaaaagaagaatcatcaggatgctttggcaagatgtaaagagcttcaagagcagttacaaaggtcagttcaagtgatcaaagagatataaaattctttcaagtcttaattaaagaaaacttagatattgattaatctgaattctctgtttctaagttatttagattttcctttttaatcttttcaggaaggagagcagcggtgataatgaagtcgacaaaagccaggtgatgatttatttgccgtcattcattctcaaagttgaaataacatataatagcactacttattacttaacatctatgtcctcttcgtatgtacgtgacaaaagaaaatcattttaaagctaaaatgtatttcatgaacttgtctttcacaggaaaaagagttggcagctgcagcagaaaagctagctgagtgtcaagaaaccatatttcttctcggtaagcagttgaaaaatatgcgtcctcaaccagagttcacgggatctccatacagtgaaaggagtcaaaaaggtgaaggtgaagaagaacctactactagtggcctgagcttgctggagtgtgatcaagctgagtcagaaactgctgtttctgccactcttaacagagtgggagccgagtctcccattgatgtgtataactctccgtgtagcccatcccactcagacacaaacatcttgaagtcaccagtcaattcaaagaatgcagtacacaaatcccccaagtcaggttcctcgacttcatcttcttcggcaacgccagagaaacattctcgcggattcagcagattcttttcctccaagggaaagaatggtcattaggcaggcttatgtgtggttcctgatccacgttacacgaggtttacttgtggttgaaattccataaagaaataatcataagattttagccagaatcctttcttgggaagttgctggctgtgaagctcaatctcagaagaagatatttgcgaagttgagattaattttgtaactaaaattggctgtatatgataatctaaatctgttcatttgtttcttcctctgctcctcatattgtaatttggttaaaatgatacattacctagttctatgaaatatttttcaaaacttttattatgatattatatgcggcaaaaccatgtgtaagaaaatcctatgtttctggatttctttgtttgaaatttttattagttaatacaatttttttaatcacattgttaacattattttttatattttaatttgtagtgcatttatattttatatagttttattaaaatttttttagaaaacatttttgtttatatatgtaaaatcacaaataatatttatttaatattacaaaaggcttggtagatcatggtcatggaacaatgattatgttgtaactaaaatgttgttactataatctcgtcccaatagtacataatgtagattacaaaacatgttatttgcgttgttttaaaattcttataaaattattttgtcaattgacgcgaacttacgtaattcaaatttcgaaaatgtttatgtgggttaggtgatgatacaaacgagtggcttgcatcgattaggaactgcgcaaacaatctctggtttttgttatcttctaactgacgcaaatttcttatttgcgttagtaaaaaattaaggcaaaaacatattaaaaacttatacactgatttcattatcaaaattgaataagtaacttaaaatttatatatcaatgttaaaaaattatctcacaatatatcatttcaacaaataaatatttttaaaaaattaaatacttgttcaacagagatgactttcaaaattgttgttagataaaatatttgttcaacgatctcacgaatcgcgggaacattcacactattctttttgacccataaagacgacgataggtgtgttattgcgacaacaaaaagtgttttatgtcattgttataggtgccatggttgatatttcagtttattgtagagattgattagagtttttaatttcaaaaatatatctatccctaatttaaatatggaggtcaatttcttttaaaatgggaagtttatattcaattttattataaatgggaaagttagtacctccaatgaccatgtgaagcatttgaagccgaactatttctatttgaaaactttagtttttgtagagaatagtgaattgaattgtgtgttgtatttcataaaatagtatatatttatatataaagttagagattaaatggaaaattaccaaatacaaaataggaaactactacatacaagttaccttaatttttacaactaatattcgaacactcccccttaagctggagcataaatgttaatcatgcccagcttgttacaaagataatcaacccgcaccttattcaaagtttttgtaaaaatatctcctatctgctctctggtcttcacatatcgtgtggatatcagaccttgttgaattttctcacaaacaaaatgacaatcaatctcaatgtgcttagttcgctcgtggaacacgggatttgaggcaatatgaagagcaacttgattatcacatcacaattttgctggaatagaagtcttaaatctgaatttagtcaaaagatgataaatccatattacctcacacatagattgtgtcatagctctatattctgattcagcactggatctagacacaacattttgtttcttactcttccaagagatcagattgcccccaacaaatacacaatatcctgaagtggatcgtctgtttaccttggagcctgactaatctgcattagagacagggccgaccctgaaaatatatgggcccaagacgaaataaattttggggccctcaaaaatacattaaaaaaaatatcaaaaaaagagtgttatgggatttgaacgcatgaccttgaatattatggctt

SEQ ID NO: 298532 - DNA, 4875 bp, Cannabis indica
gacactaatccccattcgccttggttaattatatttaattttaatgagatcctagtagcataatttagatcacccaggtcgttatcggtctcttatttatcttattaatttttaataagatatatttgaaaaatgttattaaatattaataatccatccctaaaacgtagagaatttattaattaatatcagttacactacttagccatttatttaaccaaagctgcactaaacgtagaagacggttaaagtcataaaacgacaacgggaagtgtgaacatgactaataaccattatggaatttatgggaccttgagttgggggagagctttctttaagagaatgatagatgaggatctttacataaaacaaaattactatcgtttatactttataataatcatatttttgtaattatgccatttttttggtcactttacccttctttccaaaattactcttgataaccatagggttgagacttgagagtgatggtgttactgagctcaattataaattcccaataatgttgtgttcttgaggaccacccttgaggccaatctacagccaaatgtctactaccaacaaattatttatcaatcaatacaaagcatattatatgtaatgtggctgaaaaaatggcactactaccaagcaaaactcaattaatctgtaactactaaggtatgaagttgatttaattcagattcagactatcatttattccatatgcacttgtaaatctaacacaaggtactaaaagtcttcagacacaatattagaacaaagagctagtaaaacacaatgtaggaatggaaaggaaaatggaagataatcaagcagcagctccctctccatggagtaacatctgatcgaagtgccaaactcctggaaagttcaaagtcaatacacacaattcagatacaaatgtacaaggttcatatcaaagaacagtgaagtatattgttatagttcagcagaagagaatagataatgaaaaataccatgtcctttgccaaccctcctcagttgggcaacatattctgatattttcttaatggcttccacctacaaaagtaaattatggaaattagaagagtcaaaatcatttaataccatatgttcatttcctacctctcttccacatgaaacaagcttcaatcataaatggcattctcaatgttgtaataatgtgtacctgctcagttaaaaattcactttcaacgaaatctgtcaactgcacatctttgcttctgtcagcaacctgttaaagtcaaatgaccaaagattaaagaacataggctaaagaaatccaagatttcccacaaactaaaactgaaaaaaattataataaggcaaatcccatacgctgtgtaagtggaggagcttctcatttgtcagcttctccagagataatgcaagctccattgctgatattaagagaaataggcaagggaagacgacctagttagttggcatttaattccaaaacacgcagaaactaagattcaaataaactaggttccaaggaagtactatataaatttaactctagcaccatttaatgctcataagttatagcatcacagtctaactcaagaccgtaacatctaaagaaaagtcaaaggagactaaatgatgatgatagataaccattggaatagtacaaaattatgacatagtacaaaattatgacatagttttcaatggtaggttatatcccaatacaaaggctatcattaaaatgttgtggtacctactggtgccacataacaatgctttctaatagatagatagatagatacaattatatgcatttgcaactaagttcaagcgacaggtcaacaagaagaaagttcttattggatgcaatactagtttaagaaacagcaataaatgggttcacatcatgcattgtcagttgtcaccacaaacagatatacattaggagaaaaaaaaaacactaaccaaataaagcatctcctttttcaggatgatcaaactcagaatgaggcatcaatatagactgcaactttacttttccaccacgcttgttctgattaaaaacaaagaatattagaaccttatctttctagtactaaataaaaggcaaaaataagtgtaaaccgacaacaaaaaactttatatgaaaaagtttaaaagtcttcaaacacctgatattccatcaatttctcagcatgttccctttcttcttcactagattccttaaagaatctgcagacaaaatgtttggacaaaattaacaaaagggtgaccaaaaaagcctgaaagaaaataacttctaaagaattcaaatacattacttggcaaagcccttgagcgcaacgttatctctatcgaagtaggcatacaaggcatggtaagcgtaagaaacgttgtactccacactgaaccgtaaagaaaaaccattagataaacaaatacacaaactgttgaaatcaaaatatgaaaaatagatgaaaattggaaagaaagagggaacctacttgatctgctcgttaatagcggcctcacactcgtcggcatatttctgtcgagcaagagagacttgatccccagctgggacaagatcgagctccttcttgacctcttcaaatggctcgaatacgacgccagtaagaggacgactgttggcaccctttgaggccgagacagaaaaaccacctccattcttggctgacgagtaacggagagtcgagaagagagaattgggagaattcagaggagaaaacgagtacgaaagaggggaagaagatgagggagaaggagatgcagaggaaaacaagggaaccagagcttccccatgagaacccaaaagagaagaagccttgagaagcatggtggagaggagaggagaggaaaattcaaggttgaaaatggagggcgtgtggcttaagaggtgaggataaagattgagatggaaaagtctatatgaggtggtagagggaggtggtgaaccgttggatgaagtgacaactggatggttgagattgaatcctggagataggagcgtggcaggctcgtggcttgatagtaatggtgggttgccatgtgtggaaatatctggaatattggaaattaggtccccactcttttgtattttccacaaactcacagaacctagtccagaaaaaaaaagtgtggaaatccaataaattcagtcttcttttaatttttgcctaatttaaaataaaaatactaatttcaggttcaggtttcagcagcgttctcaatcagttaatatattgctgactaattcttacttaattttggatctatttccaattttttgatgacattaattaaaatttggtagaagttttgatgtaatatttcaaccattttcgataattagaaatatataatattcaaatgttaaaaaagataaataattacaaatatatgtagtattaaaaatattttcattcagatctttctctcgctgaacagatatttctctatttttactattaattaacttttgtcttttctaataatcttttaacaaaattacaattagatatgagagtaaattgtgaaactggttatattttggtgtgtggggtgtgactcattttctgcttgacataattagattacaacgttgataaagtttttggattagaaataaagtttagtagcctattgacagattgagagatcgatattaaggaaaatacatgcagaatgcaaaccaccaaagcataactattacgcattgctcttgagaattagtaatattgcggttaaacaagagtaacggtaaaaggtattagtacctagcaagttcaatgccttatatatagtataattaagtattaagttttatataatttaatataataattttttaaaattattattaatcaattgcatggcgccatctaataacataaccaaaatttgctgaccaagaaggccaattttgtttttataaaataaaagattgtgctatctaatttatatcattatataaaactacaactggtaataattgttcgtaagaaagcaagtacactatgtaaataactataatataagtattaaaataataataattatgttaataaaaagtgtgattaataattatatcaaattcatatataacttaaaaattaatttattttccttaagggtgcatttagaaaaacactatgtaattaaaattgagtgtaaatcagagtaattacgagctttgacgtgtttattcaaaagtaattatacgataatcatgtaattgaaagtaattgaggggtatcaattacactttccaattctcatgattccatgagaattgggtataattatactgtgtgattacacaatattaatatttttagataattaatattattacattatttaattactaaatcatttgccaaagcatagaaataaaaattcatatgcaattattacttaacatcctaacacacattgtattttaaaatatagtataattactctcatatacaattaattattattctagtaattatacaattgcatccaaacacacgcaccataaataaattttgcctcacattccttcataaatgcaaactcatttataatagaaatactaaatgttgtagcaatatctttctcaatacaaacaactaagcaatcattcaaaaagttgttttccatcttgtttctaatctttgttttgataattttcataattaagaatgcacattctgtagttcttgttgacacaagaagagtaaaaacaagctttttttttttttttttttgaattaaaggatggaatttattcaataactttcagtagttacaatagacattaattgaaaaggagcattagtcccactgaaaatacaatctgacttt

SEQ ID NO: 298533 - DNA, 2618 bp, Cannabis indica
ttagagatatatcctatatatctcaaaacttgcaagacacgacactatttttaaattcatgagatagattcgtagaattggagaagaacgaaaacttacatggttttctattctacgtattataattataaaaagtaaacagatttcccattttattccttgctaattttgagaaaccaatttgatataattaattcctataaatagtggacacatatctcactatttagggacatgaaattcatttagaaaaaacacatgaaatttcaacaaagaatcataaattcgaaacactcagagatcattgtaagagcttccacgagaaaccaagtacttcttacttctcttctcacaatcaatacaagtaaaaggagaataggctagtaccacaacatatggtcaaatttctataacaatcttagtattttctttactttatatatttttattattgttgttattcaattattcttaatcgttttaatttgacttatagtcattcactaaaaaagaagcaacaaaaatataataaaacaaaatagagctaccctatttttgtttttgaaaaaatgaccaaatgcattaattgaagaatttgactctacctttttcttaatataattgatgagcttcttttactatggaagagttgaaataaaatcatcatgataagaaaacaattgagaattttttttcttcttttttcaacatatgtatatatttaactttaaatgttgaacttgaacattaatttaggtccgtgttctacttcttcatttttttttttaataaataaagaaatatggttgaacatttttatataattacgtaggaccaaaacaattgaaagtgattgtgacacaacaagtggaatacaaccgccataagattcacaggtgattcgcaaatttgtcttttggggccaatcacgtgtgctcatttcctccacgcttccttatgttgctgcattataaattataatgctatatatatatattaattccaatttaattattttatttatatacaactcagattatatcaacttatatttaaataaatatgtattgaaaaattttacaatgtatctttttaaaatagacatattgatgtatatctatttgttttagcatctaaaataattttttagtcaaattttttctcatagtcatatacgttatagttaattaagacatcctgcaaaattttaaaaaatttgaaaaaatttaacacgccgaaaattacgttcaaacagtgtgttgtacgcgtgactattttgttttaaatagactgtttgaacattattttttatattgtaaattattctgaatttctcaaaattttgtaagatatcttaaatagatataacgtacatgaatataaaaaaaattagactaaaaaattcctttagatgccgaaataaattaagaatgcatcagtacatctcttttaaaaaagtacattgtagagtacccatatatgtacacacatacacatattaaatacttcattttattaatttgcatccgatcgacttaaaaaacaaaaatctaagataataatacaaagaaaaaatcaatatctggcgcgtacagattaatatttctttaattagttaaatgtatacgttatgtaatttgacagttttaattgtattaagcaggtatgtggttattgtatatatagttgaatgagaatattagtattatattctataaattgttaatgtttttatatatatatatatttatataaataaagattcttctatagcagccagccggccaaattaatgtaaattccagtaattaatattctgtgctgtatgtaatgtttttgtttttgtttgaaaagaagttgatcaaaattgatctggccggtgtcaataattttcaattttctaacttaatttacatcatattctttatctaatcataataaattgttttatggccgaaaacctaaaatattgtttctcaacaaccgaactgaagataattaaaaatacagttaatgggcatgcatgcagtaaaaaaaaaagcatttattattattttttttaatttacttatatattattattttttttaatttacttatatattattttttttttttaatttacgatttggattgttccggtaatttttatgtaagttgttatatgaatttcggttctgatttaacttgctccgttagttgttaagtgaatttctatgtaaatttccgtaaaaatacaaatgaaaatattttaaagtgtaaatatgaaaatacctggaaaaaaatgtacttatggaacaccttaagatatcaaacactataaaaatataaacatattaatattagtgtatttttaagtgttatacattttaatttaatataaaaaactgctaaacatgttacctttggtgccgtttggtaacacttttttaatcagttttctgtttttaaaattgaaaaagtgaaaatatttttcaaaaacatgttctataaaactgtttttacttttcaattttttaattgagaatcaaaattttaaaacaaaaaatcactttcaatatttttaaaacaattttttttcttaatcaatatcttggacttcgatcatgacccggacc

SEQ ID NO: 298534 - DNA, 2581 bp, Cannabis indica
attaagaaattgcaaactgattggggggagagtatcaatcatttagcaatttggtcattgagaattgcattctctttcaacattcgtgtccacacacttcagaacaaaatggtcgtgctgaacgcaagcacaggcatatagttgaaatgggtttaacccttttagctcaagcacacatgccattaaaattctggcgtgatgccttccaaacctctatgtatttaatcaaccgtttgccaacacctgtccttaaaggaaagtcaccaattgaaagactttttggcagaaacctgattacaattttctgaaaatctttggaacagcctgctatccatgccttagatcctatcaaacacataagtttcaataccactcaaccaaatgtgttaatctagggtatagtgagtttcacaaagggtacaaatgtttgagttccacaggaagagtctacatcactggacatgttgtttttaatgaaggagaatttccatttcaaaatggttttctcaataattatcaaaaggaaacagatattgctgttcaatctccaagttcctggtttcagctccctatacagcagcaacaaacaaatcaaaccagcaactctcactctcccacaaatgaaactgaaaatcaaagtccaacatctcgctctactgcttcatctgatataaacctgtctgaatctacccgagccacaccacaatctatgttgcaaagtccttcacacacagatcaggtagatatttcaaacaatctctttgtcgatttggattttgcttgtgccactgctactgaccatgtgacagcaggaagtgaaaatattaactcagttgagcagcaaaatcaggttactcaaatagtccaacaaccgagtcatcctatggtgacaaggtccaaagcaggggtatttaagccaaaagtttacagttctcaggccaaatgggaacaagacttagcagaacctccatcagttcaagctgttatatctcacaaggggtggaataaagctatgtatgaagagtactttgcactgctgaaaaatgaaacatgggttcttgttccatcaaagacctggtcttgactttggggaaacatttagcccggttgtcaaagcttaaccaattcgagtggttcttactatagcagtatctagaggatgggatgttaggcaacttgatatcaacaatgcgtttctaaacggaagacttgaggaggctgtttatatgtgtcaacctgaaggttttgaagacaaatctaagtccaatcatgtatgcaagttggtgaaatctctttatgggcttaagcaagcccctcgggcttggtatgaagaattaaaacaaacacttatcaagtggcagtttgttaatttcagagcagatacttcattgtttctgcttaagactccaaagttcgttatcatggtgctgatctatgtagatgacattgtcatcactggcaataactctcaagaagttaataacttcattgccaagctgaataaggtttttgccttaaaagatcactggtgcttgagttattttctgggaattgaggtgtttagagatgcaactggaatgtatttgtctcagggaaaatacgtttctcaactgttaaagagactcgaaatgaccaacatcaagccctgtgcaactcccatgacaggaggcaaaccactatcttttgcaagatggtactgaactgaaggttttcactcaatacaggagtgttataggagctttgtcacacacacaaggcctgacattgcctttgctgtgaacaagttgagccaatttttaaagtgtccaacatcaacacattggacagctgtaaagagaattctaagatacttgaaaggcacaatacaccatggaattcatatcaagtatagtgacaaacttccaattgttggttactgtgatgcagactgggcttgttgccctgatgataggaaatccatagctgggtactgtgtctatcttggggactccttgatctcatggtgatcaaagaaacaatcagttgttgcacgatctcaacttgttgctgaaataacttggcttgaatcttttctcaaagaaattcatttcagcttacctaccattccagtaatttggtgggataacatgagtgctattgctctagcctcaaatccggtttatcatgctcgcacaaagcacatagaacttgatgtgcatttcatccgtgacaaagttctacagaaacaagttgaaatcagacacatctcttctcaggatcaggtggctgactgcttcactaaaggcctaacacgacaaaagtttcagctcttctttgacaaacttggtgtgacaaactcacccctgcgtttgaggggtggtgttaagacagagtacttaaatggttaaaggagaggattagtattaattgtgtattagtcatgttctctttattttgttcgtttgtcttttgtttaacaaattctgttttcccttttttgttttcatcatcttgtacggtgccacttgtcactctctcagggccggccctgaaacaaagtgggccataagggaaaaaaaaatttttgggcccttatgttaga

SEQ ID NO: 298535 - DNA, 2706 bp, Cannabis indica
aacttaaattttgaaaatttagaaagaaaaaagaaattagtttttctctcaatgttcttgctcatgtgttgagaactcaacaagaatagatctcatacactttatcctaataacccacactatttcttgtgtgtggtggattgacttagaagacactagtgtgagttaaattacaatttcatcatcatttggattaagggatacaacatacgagaagtttcgaggatactctgataggcttcaagatgtatactttaaaattattattattattattattattgatttaatgtacacacatttggaggttcattgtgatatagtatgatgataattagataatacaaaactctttctatacgtacctgatttagtaccataaaactaacagatatttttgtacattcttggatgattaacgacattatgtattgagttgagaagatccttgaagttccttcattctttaggaaggatatttcaattaaatcatcatttttggacatgaaaacaagatctgttgagtagactaccggtggtgatccataaagttagaagtatttgttggagtttttctgttgtgatctggcgaggaatgtgagtgcttgtcggtacgtgatttgtatcgactgttatcattagcacatctgaacttcctggtgccgagatgtcaatggcatgattttgcaccctgtaggccatttgatagtgtaatatagatcttaaggaatcgagttcttgatctatgcccacaatttatagttgaaccttcaaggcatctaataatcgtttatcctttatgcaaaaaataggatagaatgtaacaataactgtgcctgtattgagtgttgcttctaggatgcctatagaggcatgttagaattttctcattcttgtatcaagcaatggttttcttgcacagactggtaagtttttcctcccatgatgggttaaggcaagtctgattgctccaaaatggatgtgagttagacctcggtctatccattgttgtggaaactcaagagaaatttgtaaagtaattaattgttcttactctgtagcaggaaagaggaaggttattggtcaaatttggtgaattagacatattctttaagtgttttcaagttttgtttaatgagaatttttattaatctagtaaaaagttgtggtttggagaaagtttaatatgggtttattaagggagtgtaggatagtacaatttttccatcgttggaaagatacgaaacttcatacaaagcatcgagtttgcttttagaagatcgtcgcaatgttaggtttgttataagaggcatggatactggtgtggtatgtgttgtgagttaactgaaagaggcaataatatcaaaaggtattatcatgatgtatgagagtgagatttttcaatagaaaaagtaaggaaaacaaggccgggatttctcaataggaaaaacaagaaaaatgttagaggaactttgacaccaccttgccattctctttccaaaatgattgaatcaaaactaaagagcaagcgcacaacagtccctcacgagtggatggtttgaagactcattgatacagacacttcacagcatcttcacgtaggaaagatacaagtgatgaagaagaacaatttcaacacgtacactgaagagagagagagagagtggggtaatgggcgcgtgggtagctgaaagcaggacattgttgggggttcagaaaacaatgtgctgaaagtaacagcaatagtcctaaatgggtcgcccaaaagaggaacaatgatacggacaccttacccaatgtccccaacacactgtctctcctaaacgccttctcttcttattcaccatcttatttggtcccttcctttcaacataataaaattcccactaaaactcaccccctctaccctccattaaaaagtaaaataaataaaaaccattctcacatttcaactactttataaatacaccactatctcttctcaatattatttttctttctttacacaaaaatatatatgccgatgatggagcttcaacttggtttggctcttcccacctctaatttccacatagatattccaatcgagggctttgatctgaattataatcatcagggctttgtgtcttgtaataagaagaagaaacgaaagtgtggccaggcgttttcagagcaagatattgtaacggtgcctaaaacgcttcctttgttgttatggaacaaccggaaacccaatgatgaagatgatgaatccaataaagacctttttaacaacgacacaacttacaacttcatcaagtaagtcgtagtgtaatgatcatttagatcccacatcgaaaatctatcttttggcttaagcgtttctgtaccatatatataattgtgaacaggaacgatggtgaaggagatagagtggtggggtggccgccggtcaaggcttggaagaggagacttatttgcttccatggcggcggccgagctgtggagaatgggtgcagctgtggtggaagaatttctaggtttatgcacgtgaaggtcaagatggaaggaatggccatagctagaaaaattgacttaaatctccatacttctttcaacactctcactcataccttaatggacatgtttggaaaatgtaagtatgaaattcttatattatatttttatatatatatttataacgtatgttcaaatatttaaatagtg

SEQ ID NO: 298536 - DNA, 4015 bp, Cannabis indica
aaaaaaaaaaaaaaaacagagataacaaaacggggtgtgtttggaagagttctccatacgtggccaactatttgtatacgtacgtagacaaatcaagaggtctttttcagcgagttgaacagctaagtgtatgattatctaatgatgataatatcatggtactttctgttcttagttatgatttattaaatatgtgggaaaaatcagaacttgtatatttcttctgtcttttatcatgactagtttatcatctgaatttttgttaagtcaaattcgtgcatataataattctatattttttagaatagttttaaaaaacgtgggcagtttctatatcggtcaaagcagtcgatccatttccttaaaacaccggttttgaacaagtacgtgccatttctaaatgggtcactcctaataaaagtgtccgacacaaattaagatcaaaattattattttttatttacattatatatataaaaaagaatttcattcgatactctatttaataaattatatgttgttataatagcacttaagacttcatgcaaaaaaattcctaaccataacgtggaaaacaagggtcatcttcataaatatacagatatatattccctttttttgcttttactttttactagttctcttttttattccaaagtttagtccaatttttcttttctttttccacaatatcatgtatgaaagtctaacgatatcgtcatttaaaaataaaattggatcagagctgatgaaacactaaaaataagattagtgtacaatattaattaattgcatcgatcggaagttagaaggaaattaatcagaaatttctgcagtacttaattctcatggtttgggaaaatatatattacatattttagctagtgtggtaagtaggtaggtaggtaggtaccttggttttgtagagcacactccaaagccaagtcgatagcagatttcttaaaaccaataacggaaactttcttatccttaatgagatcagaagtggcatctttgttaagtttgcagtaatcaattgtatgcaaaacttttcctccaaatatctcaggtcccttcttctctggaaactctggcattctcgctacatctccataccttccaatgcacaccaccacaaactcgaaattgtacagctgtcaacatccaattattatcatattagttaccttataatcatcatcagtgaatttattaattatttcttagttcaatgtatgtgacatatacataattaagtgtgtgtgtatatatatatatgtacgtaatttagtttgtgtggcatgatatggcgcaggctgcgcctcccgcacgtacggtttgtagtacgtaccacgatattagtgtaatataaaagcaaggttggttatatatttgaccaattcttaatttcgcgccatctcttaacatcttttctacatcaataaattaaaaagacataatattattggaaaattttatggttcactccaaaatcgggtgtaccaaggcatactttgtatttctaatattgatttaatcaagatatctttgaaaatttttttcttctcaaaattaaaataatttaatacgacgaaaataaaatttaactatttttttttgacaagaaattatatatagctcaaacaaattatttcaatctcaacttgagatcttaaaaaaaaaaaactaattacaatgaccaaaaccttctttactttatacatatgtatatgaaataaattttgtatcataatttttttagaattttttagaatttgtatgataacaaataattatactctatactattataataaaaattataattataattataattatttggattccaacatccacttttatgggtgcaactagtctctaaattaattaaaaaaaaaaaaaattatgatgtaacttggaaaatgtgtgtattgatgcactttctttttatgttttttaatatgtaaatcgttgtaatatattgtttaagacataatcttgtcaattttctaaaaaatcaaaagaatttaatatattgtaaataagatattcaaaaaattgttttgaattttttaaaaatttataatatattttaaataactatattcagatatcgagaaaacgaaaatatagtgcatcatcggtacacctatttttgaactgatcattttatcctctaatagattataaatgtccacatgtgtatatatatataattatatctacctgaatatcgtccgaattgttggtctggacagcaacttcccaaacggggtgacccgagaggaggctgccgtattcttccggtggtgtagcgcggagatcggcgggttcttcactagtttttccggcaaggtagcggagccccaccaccttagaattgaaccttacgcatttgaggatgtcaaagtgacgagcgtaggagttgaggtagtctaacacctcaaggtgggaaggaaagctagactcctctctctctgcaccaggccatgggaaatccgtgaactcatagtctaggcgagccgattggagcttagtggacctgtaagagcaatggctccacacccctccaatcgtctcactcccttcaaatactataggatcatggtgtctcagctgtttggctgcagctataccactaaccccagctcctattatcccgattttagaaaaaataggagtacgagccatttctatatattattatattaacagtactacttagattgattattatgagattattagttttggtttttgcagatatatatttagatagagagaaagtgaatttctatagtactgatatttgggttggggtgggtttttgttgtgagagcatggtgatctatatatagaagttgcatgagagttttgggtcaagctcagaagcacgtgaaatagactttgatatgtctgtgaaagtgttggaataatattattgtaattggacgcctaattaaaatgatatatattattttcaatgtatatatatacatgcatacataaatatatatatatatatgtgtgtatgtacgtatacgtaatgtggaaattggtttgttaagtttgggaactttccctctaattaagtgactttcttttgattattatgggtagtgtggcaagaattgaatttctttctaccttcaaattaagaccgcgaatatagtatttgatcctccttttataatatattataaccattattatgtatacatataaagaaaacaataatatcttcatattaatttggtcaaactactatacacatatgtacgtatatagttttaaataatagtttatatgtaatgcattaaattaattatcgaaaaaagtatttattaatattaaaattattaatcaataatttagttaagtttgtgtattgtttggagaagtacgctatcttttctcatgtataataaaatagtgagtatctaataataaggccgtcatatattttgtatatgcatattatattattatatttatacgcgtagtctctccaattcttgtgagattaattacatgccaccagtattttctcaaaaaaaaaaaaaaattacatgccaccacgtcaaaataagagcatgtatatacgtatatatgtatagatattccattttgccaaattacgcctggatgtttaaacctacggctacatgatacacatacatacacatattatacaaaaatatactccttacaaaacttttcaatctgtacaaattagttgagaattctatcttctttactaattttctcttttttaaaaagaaaaaatctaccacaaatttctatttacaattatagaaactttatacaccttagcctccaaaatagcaatattcctagtttttcaaattttgtacacaataacatacaataaaagtaaaaaaaaaaatctcttttaaactttaaaatttactccaaataggaatcctggccaccattttttcagtgttgcaatcacaatcagctttcgaaattttcttaaagcatataagga

SEQ ID NO: 298537 - DNA, 3185 bp, Cannabis indica
ccttacaatttatgcgagaaggagacaaacaatttgttgggtctataatggatgctcttgtttgcaggacgtcagcagaagatattaagtctcttagactgattacagctatcaaaactccatatctacctgatggaaggtttgatctcgaagcttatgatgcattggtgaatatgcagattacaaatggtgctgaagccgtgattgtgggcggcacaactggcgaaggccaattaatgagctgggatgaacatattatgctcattggtcacacagtcaactgctttggtggatcaatcaaggtgattggaaacaccggaagcaattctacaagggaagctattcatgctagtgagcagggttttgctgtcggaatgcatgctgctcttcacataaatccctattatggcaaaacctctttggatggattgattgcgcacttcaatagcgtgatttccatgggtccaactattatatacaatgttccgtcacgaactggacaagatattccaccaagagtgattgatagagtagcaaaaagtgccaacttggccggtattaaggagtgtgtaggaaatgatcgaattgaagagtatgcagacaagggaatcgtggtctggagtggaaatgatgatcaatgccacgatgctaggtggagtcatggggctactggagtcatatctgttaccagtaacttgataccagggttgatgcgagaaatcatgtttcgaggaaagaacccttcacttaactcaaaaatattgcctcttgtcaactggttattccaagagccaaatcccattggcttgaacacagcccttgctcaacttggggttgtgaggccggttttcaggctgccttatgttcctcttcctctggaaaagaggctggaattcgtcgacttggtcaaggaaatcgggcgggagaattttgtaggagacaaagatgttaaggttctcgatgatgatgatttcatcttggtgggccggtattgattactaggtttctttattgtattgtattctattttaggcgctatactcttgctatgaagaagaggtcataaataaactttcatgttatgttacagtgtgaagcagatttttgactgtgttggttttaaattacagttgacgatggtttcgtgttttcctgtgtgcgtatgttttaattacttctgtgcatttatgtgtcatctacatgagtgttggtgctgtagcctgtactgctgtattataatccattgagaaaaaggattacataatatttgaagcttattctgaaattttaaacacttcatgtcactttcctattggtaaatttatttaccttgcttgtggctttgaaccaaagaaatagatgatgattaatgaaatgaacaattagctctgcaaagctacactcatatccatcaacctggcagaaacgacctttttctttgtttttctttttcccctttctctccactattatgattaacgatgtaggtcatagctttaacgtaaatttcacaaagaacaaactgagcatattcatgtcatataattgggcatcggtcacgaatgaatccagtctaatttaatgcacatttttctttttttttttttttttgggtaaaagctcgcttttcatagaagttaacaactataaaaattcataatttaattcctacgtgaaaggattacaacaactataaaatataatttgttgtatacataaaactagattagataagatatcatttgtgtagcttgatcagtttcccacctcgaatatattatactatattaaaaagtaaaataaacccacaaaagtaggtacccatagaggaagattagacactaaaataatatttcttcctagttgagttgagatgatgacaacttgttttgaagctgagataataaggcttggttctcttggtgaagaagaagagctttctttcttaacctctgattctcttccatgatggttttattctcaatataaagtctcaagttcttgacttccatatccactttacttgattttcttctcctatttcatcattaaagaaactcttttttagttttatatataacttaattatattagacaaaggcagaggaaaacagagagagagagaaaatacagaggaaaccaaagagagagagagagaagaagaaacctgttaaggccatgaactcgaaggttgtatctcttggaagagggtcttctaaggcgaaaagaagagtataggccggtaatagcaatcccagttatcatttctgacgagttcatacacattttgtcagagagagagagagagataggaccataaaagattacaagaagtatgtcactagctagaaaaagctaaaagaaagtatggattctttaagatgggaattgtagatttaaataggagaggagatattattatggcttgtaatgtagtaggaggaagaaaaatgaaaaggtgagagatatagctgtggttttgtttgtgtttgtgtggtaatgatggcaattggcatatacaagaggagtcatcattacaaatggccattttgaaatatgcagaagaagaaggaggaggagattgaaaaattttccactctaatatttatttattaattaaaattttgcctttttgattgctttcgatttcattagagtagtctttttggggggagagaatagaagcctttagagtttagactatagtacactattgggggctcacacagaaaacgactgtatctgtatacaccataggcgtataataatatataatacattacaccatagcggtcttcctctttcaaaagaaaattaattatgtaaaattttgactattgtattattacatttcaaaacaactctcaccaaagtttgaagaaatttctaacgttgttggctggttggtatataatttatatatacaagtggttaaaaagggtggaaatcagtgcttcttaggttacattacatacatgttgtttccatgaaatttcatgaatacatattcgagaaaatgacacgttacacgcatcgtacggatacatgcagtgaaaatttgaagaagaaataagtacacgattagctcatttaaacgtgttaaataaataaataaaaataatcataattaattgtactgctttaacgtaattaacaaatattttatatctcttcaaaaaaaaaca

SEQ ID NO: 298538 - DNA, 4170 bp, Cannabis indica
agcagatccatcaccgtcgtcaccaccaccacattcctaagttcagaagacactctctcactcttgatgacttccaccattacctcttctctgttgacttcaatccccctattatggataaggtctttttactcttctctgttctttgattacttttactctgctttcttcttctatagaattttgttcttgggtttttattcttttattacttttttttttctgcgtatagataaggaaaagagaaaatgacaaaaggaaaaaaagacaagttttggttgtttaaacggattataactttttttttggttaaaattattaacaggttcatcatgacatgacggctcctttgtcacattatttcatatacaccggccataattcgtatttgactggaaatcaaataagtagcgattgcagcgatgttcccataattaaggcactgcataaaggggttagagtggtggagcttgatatttggcctaattccactaaagatgatgttcatgttcttcatggaaggtattttaaattgaattgttttacaactcttatgtttataattagactgtcatgccatttatttgcgtattattcacaaacgtaaatataggactttaacaacaccagtggagcttataaagtgcttgaaatccattaaagaacatgcttttgtggcttctccataccctgttatcttaactcttgaagaccatcttacaccagatctccaagctaaagtagctcaggtgattattgttattcttgtcctaattttgtcatacatagttgaccaagtcttttttttttttttttgatttaactctctgtctctgtctctctttttcgctttagatggtctcggaaacatttgaggagatgttattttgtcctgaatcctctgaaaagttagaggagttcccttcaccagaagagatgaaatacaaaatcattatttccaccaaacctccgaaggagtaccttcaagccaaatctaataaagaatatgaagatagtagctcgttcaaaaggcgagattccaatgaagattcacgaaagacagatacaactgagcctgcaaatcatgaagatgaagaagaatatacggtaaataggcaccttctcaaaaagtgaagctttgaatactgatatataagatgaatgtgttaagaagttccattcactactaattgtttttgaatttttgtatcatgaaatttgtatttgcgtttgtagagtgatagtgatgcaagtgattcaagtggaaacaacagtaaaagtagtaaaaacgacagaagaagagaattcaatggtgacagtgatgaaaacaacaagagtagtagtaaaattgatcgaagcttgtcaggagaaccacccgaatacttgagtatcatagcaatgcattctggaaaaccaaaagggggtttaaaggagcaacttaaagttgaggttgacaaggttacacgcttaagtttgaacgaacaaaaatttgaaaaggctgttacacttcatgcctcacaagtagttaggtggtacacttttccttttaagctttttgttgtcctataatatggaacttctctcaattcttttactaactaaagggtattattgcaataatcttgttcatagatttacacagaagaatttcttaagagtgtatccaaaggcttctcgaattgactcttccaactacaaacccttaatttgctggatgcatggagttcaaatggttgctctcaatatgcaggttaaattttatttattcttttttttttgtattaattttcttaaatatgtaacaagggctgttgttaagttgttttcttatcttttggcagggatatggtaaatctttgtggcttatgcatggaatgtttaaagccaatggtggttgtggttacgtgaagaagcccgagtttttaatgagcaagggaccagataatcaagtttttgatcctaaagcgaaattgccagtgaagaaaactttgaaggtgagagttctttgttgtttatcttgaaacagtactagttgttatcctctctgtttcaaacttggactaatgtcgtttttgtaattgaaaggtgaaagtgtacatgggagatggatggcatttggatttcaaacaaacacactttgacacctattcacctccagatttttacaccagagtaagtcccttccttgcttttttctttcttaagtcaatgctactaatcttgcttaataaataaaagtgatcatttgtacttttttaaacatacaggttggtatagcaggagttgcggctgatgaaataatgaagaaaacaaagaagaaagaagacaattggacgcctgtttgggaagaagagtttacatttccattgacagttcctgaattggctttgcttcgaattgaagtgaaagaatacgacatgtccgaaaaggatgattttgctggccaaacttgtcttcccatttctgagttgaaacaaggcattcgtgcaattcctctctcggaccataaaggtgagaagtacaactctgttaggctgctcatgcggtttcagttcgtctaatcagaatttgtgttatatgatatcaaactaaatattcaaatattttactgtttagctttttctatataatccaatcaaggtttttcttaatgtgattcttctgtataaatgcttttatctatatgatatgattttgagagcattgtcaatttgtcatatgtcaatgaagaaaggtttttgaacaaatgaagaattgtgagtgtgggaacttcacaaatttgtgtaagaaaaaataaaaaatgtggaacttttgtcacgatttcatgaaatattcaattcacttgaaaacattgtagtagagtagaagagagggaataaacaggggagtttatcaaatatttatgtggttggatggtgacttgacttgttatacttatcgcaacttggctttcctttatggagctattttttttttttttttgaggagtaatattaattgttgctggttaccatttaatgttttttctttctatattggtaagtttttcttttcagtgtttttccttcaaaaaaaaagtgtttgttttctagcaagaaattgcacgctgtgttttttgatcgtttatcgtacaaagccaagcatttcagagtctcagacactggtggattgagcattttgctactaaattcaaatctaattttggctgttgtcaaaaggaaagatctaattttgtcttactatctagaatggtgtgaacgttttagaccaatagacattttattttttttgaaagggaccaccaatagacattaaaagatattcatgtctactgtgacaaagttgcgttgccagaaaacaagaaaaacggtacgccacaaatttcattttcattgattacattttggccattaataaaccatattttgataaataaagactgtataatcacttatgaaaaaaatactacccaacgtatcaataaactttttcaaataatatcttcaaaaaatacttttttccaaatagtttgttattgttcaatggactacatagtcggctctcacgacagactgagcaggcatgtggtcatggttctcacttagtcaggttccttaattataaattactatttttttgacgttaaaagtactttcatttttcttaaaaataaaatactattttatatataaaaattagaaaaatctcaagagtggccttgtaatttggggattgtttcacataccaaatactattttttatacatatggtatccccaaacttcaattcaagtgagacactacttagtaaaattgaatgtaattagatagaagttattgaatccaataattttaatattttagaaaatatttttaacacttaaaaatttggacaagacaattaagtacatgttaaagttagaagaataccctaattaactaatttttgtactataaatttactttaaaataaatatataataataaaaagtttgtcaatagttcaagtgttaaatataattttttgttaataattttcatctttaataaaattaaaatatattgtgtacattcttttagacctcttacttttatgatgtaagtgtatatttgtacagacattcctaattaatattaatgctatggatgattatttttttacaaatattaa

SEQ ID NO: 298539 - DNA, 6981 bp, Cannabis indica
agaaacacggctccccgatttggttgggacatcaaatgataaaaaaagacatacaaataaagacacgcttttcaattccaaatctaagatatattattcagcaaaaaataaaacaaacctacaatattacattattactaaaaattacactaattattaattattatgtttctattttttatttaaaaaaaaatgaaaagaaaagaaaacatgcgcatgagaatctgaggagatagcattactgtcttttttttttttttttggtctaactcaatattactgttattaaaattgtatttatgttcacgtttggtctggtctggactgctcctcaagcctcaagcgaagaagagtaaagagaaaaacagatggaagctcagctgaagatgatgatgatgatggtgtcgattgcagcactgttggcactctctgcggctgggaatgcctctgctctcactgaatcacaccaagaaagagtcttttctctgtttgacgaggatggctcctccgccgcagctcaacaacagcctcagcctctcatggttcccctcactcttatctcctctgctgcttctactggagctggtttgatctctctcactctcttctttttagccatagatctcttcaaactcttaaacatgtttcacctttattttacattcctaaagttccttgcttttcgtaagaacacacacttgtttggaaaacccaagttgggtcctctctcactcacatattcagtatcacttttttgaattttgaatatcaaaacgacagtgtgcttggatggaacactgcccggttaccatattcacccaggctccggatcgggagcaaacagctggctcattcagttggaggtgctatctcactcactcactcactcatctcatttcactatctcaactcattcatgtggatccattctctaacttgagcttttacttttaatttggtttctattctattctctaatagggaggagggtggtgtaatacaatccgaagttgtgtttatcgtaaaactactcgccgtggttcatcaaaatttatggaaaaacaactgcctttcaccggaatattgagcaataaacctgaagaaaatcctggtctcatatttatttaacgatatactgtttaagtatgcttagtttgcagtgtacattgatttaacgagcttacactatacgctcacagatttttttaactggaaccgagtcaagctacgttactgtgatggggcatcttttagtggagactcaaagaatgaggtttaaacaatatcatgattaatcatacttactgctacctacccctttgataaaaacgtgtttagtcttttccttttcattagttgtattgatttctagaatgatttggattcttctctcaggcttctcaacttaatttcagaggacaaaggatatggttggctgccattcaagagttattctcaaaagggatgaagaatgctcaacaggttttgattgatgctctttacagccaatttcattgtgtttctttgaaatttatttggctttgattgatgctctttagctattatccatgccattgcattttagactcttctatctggatgctctgctgggggtctggcctccatactacattgtgacgagttccggagcttcttccccaaaactaccaaagtgaaatgtttaagtgatgctggattcttcctagatgcgtaataagccactcttttagcttctataaatctttattattcttgtggtttatgtcactgtggaaaacacaatattgaggatgcaaacgacaagcactgtcaatatgatagtttgtttatttaactgtgcagaactgatgtatctggtgggcacaccatgagaaatttgtataaaggcgtggtttccttgcaggtagtgtgaatttataaagctactgttgggtctttgctgattcgatccaaagttccctaagttcatcaatgtgttctattgttgtaacaaacaatttcggaataaggcttggtcgaataatagtaaattatggctttcagaaacatttgtgcttgataaacttcttttttgtttttatgctgacaaaatatttttccagggaatacaaaagaatttgtcaggaagctgtaccaaccacctggatcccacctcggtgagcttctgtcttttcttgattgtgttataattgcacaagtttctgctgggaattgataaattgtctttttctctctcagtgtttcttccctcaaaatttggttgcaaatatccagactccaatgtttctattaaatgctgcttatgatgcatggcaggtaatgttctattttcatactttttattattcataactatatgcattattgtatcagggaccttcattctaatagcattttctttacccctcttccaaacacatggagaggaatttacagtcattacttgggatgcttaccgagtttactgtaaacatatagtctagcattgtcaagtttaatcttttcagattttggctacaacaacattctatctctccctctcttttcttttcttttcgtttttccttagctaagtgttacatttcatgtgtcgaccaacagctccaagctagtttagctcccccatcagctgatcctagcggttcatggaacgaatgtaaattaaatcatgcacattgtaatgcatcccaaatccagtttcttcaaggtgatcttttctaacatgtttttattttctttaagcatattatattcacccacattagcttaatgtttccatttcttctatctgaattaagcagacttcagaaatgaaatgattagtgccattaaaggtttctcattgtccagtcaaaatggattattcataaattcctgttttgcccactgccaatctgagagacaagatacatggtttgcggacaattcccctgttctcggaaacaaggcaagctctacctaaatctcttattacctaatttttcatatcaatggcagtaagattccttttaattaagttggtaggcatactataaggtataagtatgagattgctgctaagagtgatgtcctacaggcagatgctttaagaagcaacctggaaggcctaagagtacactgaatagattaatattttaccatagcaaacagttggggtgccatgtaataataataaactaaaaaatttatgtttttgtctgttgaaatgaagggtagctaattgactttggtcacattcccattctcaggcaattgcggtgtctgttggagactggtacttcgatagagaaaaggttaaagaaattgattgtccatatccatgtgacaacacctgccacaatcttgtgtttaagtgagtacttaaactaaccattcattccttagttgtcacctactagtactacctaccattgaaatatcaattgaagaaattgtatcaatcatttttatataaataaaacattcaatgttttgcttgcataactgtaccattcatttcagttgattttgatctcttaaccaaagaagaacataaaactctaatccaatgctctcctgcctggatattagtatattcgttttaacaattccgtgaacttgactttctaacaccctagatattagattttttttttctctccatgtcaatcctgatttgtgagagaaactgaaatgcatatttatcattgcagcaatgaagattcatcccccattcccaatctcatggtctatgaatctaagtccacaagattaacaacatttatcccccaaaatctgtcatctttggcttccatgacgcctctaatatgttttcattgcatcattctattatgttgtcagggttttcggatgagtaaatcaatgctattgtcctatggcctcgcattgattttattttcatacaatttcctgcagtccagagcatgatttttgtaaaacgcacttaatttgtaactttgttcgatcagtgtaacatgtcttggtaatgcattcttaacgtaaaatttagatagagggtttactatgttggatcagtgtaacatgtgttggtaatgcatatccattgtagtaattattgaaaatcacacgagtacaaaaatgtgagcaaatgacattattcctctacacccaaaactaggcaataaaaggccatgtttttgtgtattagtatttacaaagtaggagaagatgtacagagcataagtagccagagcaagcactcacaacaaataacctcaaaagccaaacaaataaatatgttgaaagtaaactaataactgtattcattccccttcctacaactgtgtatttacattgggatcgacattcttctcatggtctcacccccactcctatccccactcaaattgtatcaaaagttcatataacaaatcaaatgaaagaaaaagaacaccggtatatgccgccaaaaaaaaaacagagagaaaaacacgaagactaattaaaaatggctaaactaaaccaaaatcaagtaccgagtcaagaagttgcgtgtcgagatgtggatgccagtgccactgcttgtgcccaaaccttgagacgagccttgacatctcgagggtcgtcgcctggagtgccacaattcgtgtacaacagagaaattagaacaacaataacaacactactaaacaaacaccaatatttgaagtagatatatgtatatgtattatggatatatacctgggctagagatacgccaactaggagaattgccaccgctagtagaactggcagtgtcaaaggtcgaagggataataatattagaggggacaacagtatccaactccaactcaaatcccagctctttacaagccttgacttcgtccaaatccattcgcagagatctctgccctccctttggcctggttatgagaacaggcagtggctcctgcggctcctcaatcggctgatgatcatcactactcaccatccgactatgactatccaccaaatagtctttcatctcccaaaacacactgtcacgcagcaatctctctctcatgattctcctcctcatcctcatcctccgccgccttctgctgctcttcatatcgtccgccgcctcagtctcgctggcacactctttgtagcctagaaccacagctgggatcggcgtggtaggcccccgcgtcctccgcctcggtggggttgccgggagtgagtagcagccggcaggggatgcgtctttgtctgagtcggaagatagtagtcctttgttcataggaagtggaagtggtttattcccaatatcggagaatccatcttccacgtcgccatcgaagctttcaatggacaagcgtgacatgtacgggcccatatcaatatcaatatcaccatcgttatcatcatcatcatcaggaccatagattgagctgctggtacagatggaaagcctggagaagttttggtttgggttttgatgaagaagatgatgaggatcatcgaattcaacatcagcatcagcttccaataagtcatcttcttgcatagaaataaatgagcgaattgtcatactctcatctgaagccattggtaaagaataagaataagaatagggacaagaaggagaagaggaagagtgagtgaatgagtgtttgatgctatttatgatgttgaggagtgtcaaatgtgagagtagtggcgtttgagcttttgtgtgtcattcgattctattctactgatgatgataaggtagttaaaggtaataagattttcatccccctaaacaccttccactatttatagctccatcctttgctttttaatattcattcaaatcattcaagaaatttccttatatgccctttcctcatctacctttattactccactttttctcttttttctccttgtcatggtcaaatcacgatggcccccactttttggtgagaagagaaatggttttgaattaaagagtagagtaatggagcgtgtaattgtgtcacaatttggtaaaaaggaaaagtaatatattaattggtatggttgagcttatttttgttgtgaatatccaatagtgaaagttataagttgaaagaactaggaaaaatatgacaacactactagagatagtagtgtatggtaaccgagttaactgttaactgtaagaatagtaaatgtggtgatgaaatccaaaatgaggagtttttttctttattggtgtgtgtttgtgtatgtgtaaggttatccaaaactaaaacggaagaggataaagatgaacccttttcatcacaaacatgtttgtaacagtttgaaatatatctttattcatttatttattttttaaaattgaattttatttattattaatatattatatatatttgtttgggctaagaaatcattaatattgtattaaggaaaggtttggttggtttgactgcatttggtttggtttggtttggtatacgtggcaacaaagagatggagagtgggcccagctatccgaccatagacatttgctgatgtaatgtgaaacgcgttttgaacactgaaataataaaattttaaaaaaactcatctcctactaagagtcatgacacgtgtcaactctttcatttctaatcattctattcgtattcttttcttctttcttataatttttcagatatttactatacagctcttttgtcgtcttctttcatacaggtcacatgcattatcacgtgtgtgattgtgttttctcataattttccttttcatgttttttagtttgaaaagtgcttgtatatattttttaatattcataaaattaaaactataattcagtttaaattttaaatatattaaaaattgtgttaaatttaacataaattaaattttatacaacaataaatattattatttttatttactctttttactactcattaatataataaatagtttagaaaaattctacaatgcacccttttaaaatagatatattgatgcaccccctatctgttttagcatccgaaa

SEQ ID NO: 298540 - DNA, 2102 bp, Cannabis indica
tattataatttttttaacaagacatctcctaattctaatcagatgtattctccaatgaaatgatacttatagttataagttataaattctatgttttggatgaggaggtgacagctaataatagtgtaatgctgccttatatagtttttttttttctcacattttatggtttttcatttgaatattttgttgggattttttcaaaataataataataaaacaagtttgtttgagaataatttaggcatatgccactttccatttctaatggcatcatgaaatgattcttaacaaaatgtcaaaattaatttaattaataaaattttccttcaaatgaaaaatcattatgttaggctttgtatgtagctatattatataattcaaataatctgcacaagatttttgttgttgattgatgggataaaaacttttctatataatattttccttctatttttacataatgaacaaatatttagggaaagagattaaaaacaagtacttaccaaaaatgtcttttgaaaaagaaaaaaaaagattgtgtttagttataatcaatcgatccatagtatttgtaatcatttatttcctatattgttactaataatatattctatagttgcaattggatttcaagaattttgcatattaatttctttccatatcctaataaattaatccataaagttattattggtgaatgtaatacaaaatcataattaataaaataaactaatttgtaataaaaatgctatagatatttttgttaaggaaaaacaatggctacattaggatccacacaagatgactaatttaggaaagaaacaaaaaaaacaccaccaataacaaaactcaataaagagttaaaatgtatgttacacataaggcatttcaaaataactacaaattattttagcattagccaaaataacttaccatggaatttttgaattaatgttaacttagagaaataaagcaataacattcaacttaccttaaactgattaaagtctctatttaacattttaacaaatcaaagtaaaatgactgataccaatatgtttaagcctactcaaactcgtaaagaaaaaaatgcattttctaataacatatttattattttataataagtagggatatgaatgaggcgagaaatcaattagaaagaaatatccttgtccataattttcaagtaacattctattttttaaaaaaaagtagttatattctgattccttcgtaaggttgttcttgtcaaatttaatattcgaagatgaaaaatattcttcatctccattttgtctatcgtttagacgaataatctccatccatgtcaaatcgacatccctatttatatgctaaaaattgccaatgcttttcacttattctttttccaacttgacacataccattcacataatagccactaccaacacttcaaactactatttagatagtcttccataatcctagaaactacatacactaaagcaaagaagaaattttaccccaccaaaagttaagggcaatccaaagcaaaatcataagaaaaaggagaaaagggaatatataccaataaaggggacaactaaaagaaaaagacaagtcatatggccaagattgcacaagtaggtaaaatctcactaagagtgtgccacacaaaaatcttcactttctttccttttttcttttcaaagaaatcttcacttttcttgtaatatcaaagcttcacatcaccatcattaatttttatttatttaattatagggttcagggttttaggcttatttttaaaactattaagtttctatattaggttagccaaaaaaaaattatatgctagctattcttttggcacacatatatcatgtttgtatttttatctcacaagtcaaataacaaagttgtagagcaataattgtgaatagtccatgagagtgtaaagttcaagaaaagaaacctagggtttctcaccattcattcacactatccaatatccattgttgttccatacaatacatgcaagtccatcaaggcatgtatgtttagactattagagcatttttaagtatagtattttaaaaaatttatattatttaaaa

SEQ ID NO: 298541 - DNA, 7619 bp, Cannabis indica
ttgtctttaatttatatttcaattttttaggaaattgatttcttctttatttttaattgtaatcggtttgagttattgcgtgttacttgtttgtattcattatgttatataaccggttctattttagttataaccagtttgagttctttcgtgttatttgtttttattcattataacactgttatagaaccggttctattttaattataactggtttgagttattttatgttatttatatttatttattatgttacagaaccggttatatttcaattataaccggtttgagttattagtttttattcatataaccagttatatttttagttatatatgagacatttactttggtaacttttccagcgacgttgacttttccgttaacttttccggcggtcgtgatttttccggtaactttttcggtgccggcgacttttccggcaaaacttattgttgttttataaagggtaaataccatttttggaccctgtgttttgtaaaagttatcaattggaccctctgttttgttaaatgacaaagtagactctgtattttctaaaactgtacaaataggaccctgaattaattttttgtcaaaataaaatttaattataatccgatctaaaagtgttataacaaaattgtttacattttctgtaactgttcgtattaggaattgttttcaagttgattatattagaagaaaaaaaagttgtcaaaaattaagctcagggtcctatttttactattttagaaaatacagggtctattttatcatttaacaaaacacagggtccaaaatggtatttatcattttataatatatgggatttctatttttttttttacaaaaatatggcataaaaaaaacccatataaatgtaaaaaaacaaaaaacccataaccacttagctttatttatttataccataaaaaagtaaactcttaaaattttctaatattttggataatttttactattaaattttaccataattttttttatcatttaaataactaaatgacttgtaccaatataaatgtcacatgtataagaatgcatataaaccgtccatgtagatatctttaatttattaaattgtttgaaaaattctaccaccttcagagaaaaatcaatgtatggataaaaaagaaataaaacatagcatctgaatttagaggttcttgtcaatacaaaattaagtaaaacaacagaaagaaagtgagacttataacagtcaagtttttggtatttttaactttatgggaaacgatcccctgtgatcaccactcttttatccgagttttaatccagttctttttcttgagaaaacaaaatgtgatgcaaagcaattatcagtcactacaaattgatcacgaagccacttgtttgtactcattttcctttgatatcttattttgttagcgtgttcaatagtaaagtagcaatcttagctgcaccacgatgattttgatattaatttggtcattaaacaaaaataaaataaaaaccagtcttcacaatttacaattttttttgtttggaggtaaatttctattctaaaaaggtgtatgcttttagaaacaaagaccgtccaatacagagaagtgggatgatcaaacgaggcattcgaaatgcaaaagtgaataacttgaaataattttgccaacgaagctgatcaatttgtccaatgcttactaccataaaaagcctcagagaaaatttgatctacatattttaagcttttacccctagcaagaacctgaacacatcactcaatgaaatgattccttccacgcgcttgctccccgcctctacaatcacaagtctcctaacacctacaagaagaagaaaaagacgctggtaaagaccatatccgtcaaataagctaatgcgaaagataagttacagatggttatttgtagtttaccagggtttgccagtcgctccattactttatgcaggggatcagaccgcaaacacatctgacatctcagtccactgaagaagccacgaggagaatttacatcttgtcccagttgcaatgcctgcaatggtaaacacaaaatgcgttcagctgactaacttttctcgtatattgttcaaacctgaaagtattgttgtggttttgtcaattcaatagccattttatggtaagtaagctttcgttaaatgcagattgtacaaccaaaagttagttgaacatgttcgctccattaaaggacttttacagggcttgtactactatcaggcttggatgtttattacctttatcagacagacaaatcaaagcagaaaaatgaatagagaagcacacatgaaagcaataatttaacagttacctgctggacactcatttcatcaaggctaaactgtgcataagttctatcttttgccaaagcagtgatatcactgtgaaggatatatggtacacgaatatgttagctacaactgaatgcataaaaacacccaagagggacgatgggcacggcagagtttgaggaaaaacaatagtacctccgtgaataaatatcgagcaatgaatcattttcatcaactatgggtactgaactgacttcggctgcaagagaaaatcaaaatataagacagttaagagtaagatgtgagtaaacgaccaaacatgttcatgtaacctgacaaaggaaatgcatcttttttctcaaaatcatacagttacgttatgatcattaagaggctgatacaaatttcacaatcatgaaacatagtacaagcacagttgcagacaaaatatgatagttggctgataaaggaaaatctgatcagaattcaaaacccgcagcagatagatagaagaaaaagaaaatcaccttgaaccagtaaagatagggcatcactcagagaggcagtgggtctcaacattgcaagaggtcgtccatttggatctccaatttttggaacccaggtgcccacaggaatagcacaaattggctgttgaagaatgggcaaagagctggaagaatgtctaaaatgcctacatatacctgagtatagatatatattgacatactcccagggattagcattgattaattatgttatgcacttcaaactaacacaagtaataagcttacatttcagtattccagacaaggaagcaagatgtagcagttggggaaatgaaccgtcttgtgaagaaggttggacaatgggaactgtagccacattataattcaaaattttcgaagcaacttctttgagagagtcatatggcccagcctgaaagttggagtggttttcaagtagagatacaacaaggcactagctaattgaactgggaaaatcaattattgcaatcaatcacagcatagccaaacattaaagtacatggaatcaaaggaaagcaaacctaatactacaaaagacaggcacagacaagtcaagttagctccaactacttaaaaccttccaaacattatattataagatcccttaagctcaagagtctgctacaagtgtaggtttctacttacttggacaagatcccgagcgcaagattctccatcaatttgaattggcatggagagttttgcttttctttctttccattctgctatagtatgggtttcaagctcttcctcagccacattcgatccatgtctccgcagcttcaagaaatgatcatgtatacttgttaaatcgagagtgtgtatgtgtgtgctcccataaacttccttgcgagaaagcaacaatatatagacacaaacttctgtgaaagccagatgtctaaaagcaaatctggccgttaacgatatggcacttttgtcttagcatgtagatttgtaatacactacatacggatccaagtaagtccatgatcatcacactaactatgaaattttgatggtaagaaggaagcatttaacgtgtgaaaacataaacaataacaaggattttcacaagcattaatattaaaaatcgtttgaactggcaatttaccaagcaaataacaagtaatatcatgacttgaaaaccataataacaaaccaacctaataactaggacgcagactctctttcttgaagcattactcaagactgagatcacacatattttgtgactgacaaataaaacttagtcttaggcaatagatagataaaaaaaaaagtatctatcttttgccaaccattgtattacatctacacttcatgctttcttaattttgacatgtaaaaggttttacccccaaatcatgagtgcataaaatagcacttatagagaataacaaagcagtttcttaacaaacctctctcaaaatgaggatgaagtccaatgcagtaagaacagcaacaaactgtcccctggagaaatcccagagaggagccacaggaacgccctgaaaataacatgtaatagcaaaacaaacaactaagaaaatagtcgctagttagtgagaaagtaaatataaaaaagaaatacacactcataaaacttaatcaaaggactaataaaaaatgaaagaactcctccccctttcccctgccttgtgcataaaatatatctacctgctcatacagaatgtggaatgcctgcttcactggtagattaatatccaatgcaacaacctacaaagttgagcaattatgagcttcagcatattaaactgcaaaacccgaaacaatgaatatgcagaatataccaaaaatgagaatcactcaagggcaaataagttacaaagtgcagaacatttaacacagacatagcctttggaataggattaagcactcaagggaaaagcaattatgagtgtcaccatagtgctaaacacaaatcaatgaatatacaaaatatattgaagaagtggattaagcattcaaaccttgcccgactcaggaagcaagttgtaagcagtatttgcagacaagaacatagatatacggttccgagagacctctacatcagcctttgataaacttggtatgacttcctgcaaaagaccacctgacaagatgacctaacttgtaaagcaagataacattaaaaagtaataaaatcaagtagcaactctcgacatagaatgaacatactaataaagtgaaacacttctaaagtaccatatagccgttccaaaatttgaacccaatgaactgaattaaaactaaaggttcacgctcattccacctaactgtcaacaatcatattatagggaatatgttccatagaggactgtgccctttttatcttaaaacaatgaagagtgtacagagagcacattttcatagcaaactaaaatcagaaaaatgataaaaagaaatgatctacttcgaaacatttaaagagatctctcaaaacttatgccttaattctacaaaaactcttattcttttaaaaataaataaaaatgtgaaagacaccaagataaagatgcatcttcacaactttgtttcacaaaatctcggagattagagagcaattcctaaagtaaggcattaccccaaaaaacaaaaaaaaaaagtcaaccagctaaaaaagaaaagagaactattaaatacaataaaggagaagcaatcccaaaactactgccaggaaatctgtctatgcagaacctcatcaactggaagaatgcgggaaaggatacataaaactccagtatggatcctttcatttttccatagaaagagtgcagttattgtaaatttagaatactaaaatgacagcctttgtgttatctagcaactgaacaattatacttccttggttccttttattgaattgctgggtgtttcgaaaacataatttaggtttgtgctacaatcccaaatattagaagttaaacttcaaaagaggtagaccaaattaaactagcaaatatccttaccataggcacagagaaatcattatctacatccatactaccaggtggttcagagggaacacctgtcagagccatgtttgactctgtagataccaagatagtgttcacgatcccataattcccatttataaaattctcattctcatcgtgccgccactctccatcgacattaaatttatactgcattatacacaaaatatgtatgcatcaggaaataagatcaaggctatctcttaagatttctatgtctgaatatgtaagatatctcatctcaactcaattcattcataaaagccaagtttttcatatcagggttgagttcaacagtttcaagcataagcattccttaacctgatggaatcccggagtcaaattacaaacaacttgaaagagagttgaacttccttcgaccggagacatagagatgtgttctgcccacctgtacataaaagatcgatctacatctatgttacatatccaaattaaattgataacacgcgttgaactttagtcggaaagccataatttttctccaacaaaatccagttaaagccattcgattcataatttcaaaattctagcctctaacctcgtgaaagaaccactaaggagaacatttcttccaccataacgccacatgaacagagtcggtattaaaaccgatccggtaactctaccaccaccactctcatgtcctgtatctggaccagaaccaaacatttcccaccaaattatgtactcaaaatgcaaaattcaaaccacccacttgattatctaccacaaaaacccgattccaatcacaaataactaatccaacaaagtttttccgatatcttctccataatcacacttcaaagcccatcttttcaaacacaaggggcttctttcctaacagggatcctccacagacacagcagaggaccccttaaagcttcaacatgcagggccagcaaaaaaataaaacccgacccccccaaaaaaaaagagcctcaaaattctttcaatcaaacctatttatcccaaatcaacaaccttgaaagaaaaatcacttcaatctcatcagctcccaatcaaccctcctcaccatgcaaaaacttacaaatctaaaaaagaaactccttcaatttccagcctttccaaattagcatccaactcaaaattaaaataaaaaaagtcaacaaaccaaactgctatggctaactccacaacaaaccctgaatcttccccaatccgagctctgatccgaccgaagtagacacttcaaaccccaaatcaaaatccaaaagctctgaaattggtaaatggtggagagtagagaatggcttaggagtaaattagagagaattttaggggtgaaaagctgagagaaaggaaaaaagataaaaagaaaaagccctaattctggtatgaaagctgacaaggtgtgcgtggcattgttggatcttcaaaagcgcttttgggagtaaagaatctcaactcaagaacgcacaccaaaaataaaattacaattaacattaacgtaaattaaattacattaagaaaaaaaaaaaagaaaaaacaaaatgaaaggaaaggaaataagccataaaacaaaggaggtaagactaagaggtaacaataattgtgacgagtctattaatgcaaataataataaattaataatagtattgtagtattgtagtacaattatacacgtatttctaggaaaataaaataaaaatacaattaaggtaagttagagaaaatataatagagtattcat

SEQ ID NO: 298542 - DNA, 2242 bp, Cannabis indica
aaaaaaaaaagttaaacaaaagcaattttcctatagctagctatatatagctacaatctctctcccatctctctctgtatatacatatatataaattacatatagctctacaacgatatgtatttagagtatatatagcttttgttttacttttttggtattttttttattttcaaagttaaattttgggagttgaaaagaaactcttttaaatgactcccattggaggatggaccgaaatttttggggtcccttttctaccaaataaaaatttagagaataacaacaaaacgaaggtgataaaaggaaaaggagatcagattggatttggtagaatgatagatgtatgatacacaagtggggttttcccagaatttcatgctggatacatagtcttttagagctagtctctctagatatggtccatatggaaatgtagtttttaattagactaaaatattataatataataatgaaaagaaaaactatatattaaatagaggaaaggatatgagggtgtggaaaatatgtgggtacggagggggactggatttaactgcgaccattatattattagtgtggaaattattaaaatagaatattattattttttttttggaataaaaatagaatattattattattaattaataatatttgtgttttgttggggtggtgggatagcatgaaacatatgattatgggtgtagcaatgagtagtagtgagtgggtcccttctaatattgttttttttggattgtaagcgtgggtgcaccacttcccactatagactatctatactcggctgcacagcccttctcccgtcaactcagccctaacacaaaccacccacccacccacccaaccacaggcacacacacactttaatttcttctttttttttgggggggtcactagctcatacatagttatacatacatacataccaatatatattatatactgaaattgatactatatatgactgacataagtgtggtttagaaaatagaatgaagtggagtgtatagatggtataagatataattaattgtcaatgggaagaaataatcataaatcttatatatatgttattaaatttctacattatccactctctaccaatttttatattgatttttaagtgaactctatttcgagactgttgtaaagtagttcaagattttgttaaagttttttattaaatctatcacttgggaaaaggaaccgcgtacttatttgaggataaatatgtgtatcagtgtatgtatatatattggaaatttttaatatataagcttgtaaaaaaaatctatatataggagtgtcattcaatgaataaaagagtgtcatgtacgtgggtgttgttttttgttttgagaaatatcatgtaattattttatactttatcatttttctctctttgtctctttaattccctttttcttcttctttgtgtttgttttcttattgtaaatttgtaaatctgaatggtatttatatattccatccacccaatccttaaaaggcagacgaaactcaactaatttacattcatatattcaatttaattgaggatttgagaattttatttcaatgtttattttgaaaattttctttcatttttattttaggtctataaatttatgtgtttttttatattcttaaacctcttccctaaacctttaagactagaatcacaaaaaatatcatttaatctattgtggatatatctctaaagtacaacatgagaaaaagagatagaaaaaaaaaatgagaatttgattataggatgggttcattgaaagaggtggtgattgggttcatccatggaggtagtggttggacttatcaatggtttgtgaaaggaaaaaggtccgataaaatttcaaagagagaaatgaaaaactgagagagaaactaacaaaagaaaaaaaatatatatatataaaaaaataaaaaataatataaaaataaaaatgctcaataattcggtgtttcttgtttaaacaaaacacaacctcattaaataacgttacacgttctgaatgatttgatagatatcaaaatttgaaaaatatgatttaatacataaataatcactgaaatgaaatagtaaaattgaataaaattagataaaaattcttaaatttaacaatctcaatagttgaagagaaatttttaacgattagaaaaattcagagagcatgatttgataaatgtcaaaattcaaagataaaaa

SEQ ID NO: 298543 - DNA, 4843 bp, Cannabis indica
tttctaacaaagtatttttttttatagaaaactaggtctcctaatatgagcaccttagacctcttattaagtatttaggatatcatttaaaattctaattcataaactcccatggatgttatggcatggactcagtgtaaatgggagtaaaagagatttaactcattcatgtacacaccataactcctataacactaggaattttaaattaagatgtgtaacacatttttatacacttaatataggtgataattgtggagattatacattgtaacaagtaactccatcatatatcataaaattatgacaagtaatatagattttcatatacacacttattagtgggttgtatattaatagtgctcaatattatgttgtttattatattgttattagtataataaaatattaaatttacatatttttacttaataagccatttttttctagggctataactctcctaagttaatggtgggttataatttcggattacaaattatatgacattaaaaaaaataagattattagcataatttgagataaaaagattatggggtatagcatatgtttattgtcattccaatcataaaaactcaaatttctcaataataataatgaaacaaaaatcacacaagatacttaatattttacatgggcttttacagtagcctctattcaaacatttaaccaacaaaataaaccttaaaactatcaaagtacacaatagccaatattcaacaaactagtacaaagttaaaacttaatttagaacatagaaaacttacaaacatattacaataatatgaaacagtaataagttacagaaattttgttattactacttgactgcaaccatttttgtttcaagtttctcttcctgctcggaaaattgtgtacctaaaccgaaatgattcattagtaaccaagtaaaagtgagaagctctccacccatgctgggttgttgagcatgaacgatgggtgtacaattaatggcggcgtaaaacatgaactctaaccatacaagattcataattttcaagcgatcttgttggtcgaaattcaagagctgttgtgcaagtatgcatgcatcaaagaagacagatttggttttcatgcctctcacagctgctggtctaacttttgcttttgtagttttcattttgtttaaggcctcatcatgatttgatgttgagtgtttgttgaaaaatctcttggcctctgcacaagtatcttggaaaacaacatgccaattacctaaaactggagacaacattttaggctgtgtgataagcaagtaaaacatatagtctgaaagaatcttacacttgtctttttcttgtccttgttgggataacaaatctcagtagctatgtgccaaagaagaaggctttctatgtattggaattctcctatgctccattttagtttaacatagctatcattagtatcagttttcaggagagctgaatcacctctttgttgacttatctccattgcttctctgaaactcattgcttcctttgattttattttcaaattcaagaaaataaaatcttgtagatcatttgtgacagagagtgaagatgagtacctcataacttgaattccttcaataatttgcccagcattaaacttttcaaaaacattatacaccaatggacaatcctttaagcaatagtttatcatatcatactggaacaccacccttgaccatctttttctttttaagagtatagaaggaacatactttgtccaactctccttgaggagatcatgggtccagtccgaacagaggagcataatgaaagatacgaattctaaggcaatggctccaccaagtaacacacaagtaagagtgatttcaaggcttccaaacttgtgattgagtaaaaaaaacaaatgttgtggctgcaccaaataggaaaagaaacccgatacagcgaaaaaccaagcctacttgtcatggagtactaatacttttgtgtggagaaccttgaacatgaaactcagctcatactctattactctggaagcccactttctatccaacgtcagaaaataatttttgcttgattcttgatcttggggtgttaaaaagaagccaacaatgagccctttgaacctttcgaatagaaatcgagcagccttgagttgtttcatctcgtctgaaagctctggactaaattgtattctaactagttctggataagaacgattttctttagtagtaatagtagtagcagcagtaacttctccttgaactgataacttgaccgatgaagaatgaaacaacgaagcctcttcgtaatcaagcccagggtctggctttggcaatgaagttctcccgaaattgcttaagcttgcaagataaagtgctctaattctctcagagtacttgataattcccacaaacaaaacaaggatagtgggaagacatagagaatttgttggaaatgctttgtataaactataagtagctgcaacaaactgtacgatgagtccaaaaatgtggcgaagccagaactcattatcctcaagagcaaaagaggtaatggtatcaggaccaccaagatgaaccaaaagaaatgaagcccaaaatgcatggatttcttgcttgttgggattaacaccaccacatgattctttctcaccttggctttgggtaattaatcctattgcgaaagcagcaacccagtcagctagcaagtaggccgtccagattattgtgtgcaggattgaactcttacacgtttgcctgaaacgtcctaaggttattaacaagaattgtataaggaggctcaccattatagaccctctaaggttccacacatcccacagtttttgcactttatcgagtgtacttcccatcctcatgcctctctttgattcaacaacttcaaaatacctatccctttttttattaacaaatcaatatgcatgcatcatccactctaagcaagaatatactcaaatggaccccagacgaccttggacctagcgctaggtccgagtcatctaggtctgggtccagggttcaatttcggatcttggttcgggtctaggtttcgcaacgggtcttggtccaagtttgggtcttagttcgggtctgggtctgccggtccgggattcgagtccggttccagggtctgggatttggggttcgagtctagactttggacccagaatttcagctaagagtaggggtgttttggtacgtttatttaactcaatgtaaagatcagattacaaaaatataagtgcaaatcgccccattaaaaaaaatagtttccaacacaatgaattggtcggtttatactacgttttattcaactcaatgtaaaaatcaagttacaaaaatttaagtactaaacaattaaattcttaattttatctactgacaataattttcttaagaagatctgaaattaatttgaaagcaataaaagactaagcaaataacaataatcaaagttttgagcaatcaaaataattgtatcaattttctatggtgtaataaaaattttaatccatatttccatttcatatgatatatctatattcttattagaatatatataatctaaattatatgtaaaaatcctacacttctataataaattacatatataatttgcattaagcaaaatcctaattgctacacaaactatacaggtacgttcatccaatatcgaaatctatgtctattttactattgcataatcaatactcacctttcaaattttgcattgaaatcatgaacaaatagttggtgatcaagtaattataagtattaaacataaatgaaataggtgcacaaaaaaaatttgagaagaactaaaattgcattaaaaccataaagaaatataaaacaatatacattaacaccctaattagaaatttagctactaattggcattgtgaacaactgaattaaactaaatagaaacatgaaattaaaagaagaagaaaagagctcatcaataaacaataatggtagtctctctagtcccttactacctccaatttggtatcccacaagtctcaaaattcaaaagctctcctctcccttcgaaattagggtttaaaaacccttataagcacctaatccagtgggttgtggcattttctagtgaatgtcgcgaccttcctcctttgtcaatttaaatgtagcgagtcgcagtattgtctaatgaatgtcgggccggggtaagcattttttgggtagggaagtctcttcgcgtgtcttcgcactatgcctcaacattggggtgcctgcctaatttctttgattctcaatcattttgtccaatttttccacaagagtgtcctaatattaaatttccatgccaagcgctactccaaccaacatcttcagatcttcaactttaagggcctcaattgcactgaagcttttaaattattcctcaaactgttcctttggcgcactagcaacaaaattataataattattactaaacttgaaaatattaataaactaaagcttaaaatagtacaaaacaaaactacaactaattaaaacactttgaaaacatacttaaaaataacaaaatttagaacctaacagttttataacaagactgattacattttttgtatttatttgtgctaaaaaaatttaagttggttatgttgaaaaaaatttataaaaaattattataattttaaacaataaaaaaagtcaatttatcatttaataaaacagttcaataaataatttttaaaaaacacaaaattcaaaataatattaatctttatttaaaatgttttgatatcaaatgtcacatgaagtccatttccaaaaaaaaaaaaaaacctacaa

SEQ ID NO: 298544 - DNA, 1894 bp, Cannabis indica
tcttacaattgatctccgagtaagtctctgttagatatcgctcttttctctattgactattcttcgtttagcaaaatttggccccctgaatggtgaaattgtgctactatttatatgagcttattacatgaagaatttttttcccttaatctataataaataaaataagaaactaaactaattccataattacaatgaaaagaatgggaaaccgaaactcattgcctttattctttgccctaatcccacgaatgtaggggttatcttcgtgtcttggaacgaacgatgcctatctctaaaatttccaactcacatatcttgtcaggtgcatgcaagttgatcacgcaattgtgcctttgtcagatgtcccttgatgactatgttcagacatcctgctatccgcagacaacatagacctttttacaaatctttaagggttcttaggaatataaccttttgtctaggtagggaattatagaacacatatcatccaactcaatgacatgtcatagtacaataaataggataatatgttcctttggccaacaagggtgtggtccggcaagaacgccttggctggccatttccttcagttttggtcctatccaattatatggaacccttgttaattggtgtgctctgcaaggtaactttgctcacctattgaaaagtcatgttccacgtgacctcagttttgcctaagtgtacatgtcacgtcgaatgggcaaaaattgagataacacattcaaattgggctatcatttagctaaatttattaagactgaagctgaatcttctccctccacttcgcatgcatcatcgtggattttttttagatctttgcctagatagtagtccatgatgcactccatgttgccatctctttggtttgacaaaaagtaattaacggcttaacctggtctcttttttttttgcgcttgggagtccataggacatgccctattttaatgtaaatatgcacgttccgtttgatgaaattgtggttttgtgtttgattcgagctttcaccaactcaatgcacagaggcgacaagttgatgtatctctcaaccatttacaccaaaactaatgtggaatctattatatgtactatgtggtcgatatggtttgagagaaacaaggttgtacataggagaactgtaaaaaccagaaaactcacttttctattatgttgcgaatcacttgcaaagttttcggtctactcaaacaaaatatcatcagcatgacacctttgttttacgacctcctctaggtgctactattccagctgttgttccatggcttccagctcctccaagtgatttaaaatttaatgtggatgcggctgcagataaaaacaaaggaattattggcattgatgccatcattcgagattctcatagttgagttgttgcttctttttcgaagcctattattggtaactttgcatcacatgagatggagacagaagctattttccacagtcttatttgggttcttcaatttccacaatctatcgcccatgtcaagactgatgcctttatggttttgagtgctttaagttctcctttttctgcaatttcttcttttattgacttaatatatagatatttttagcctgctatcctctttttctagagttgctgttactcatgtcaaacgtttagccaatatggctgcccattatttggctcggtatgctccaaagttggataaagcttgctcttagatggagaacttttccccgctgatttactctcctattgtaagtcacttacatttcttatttatgatagtttattatttttccttaaaaatatatatctattctatataaagtgtgcctatataaccgaattcttggtttatgagaaattcgtgggtgactttttatt

SEQ ID NO: 298545 - DNA, 5214 bp, Cannabis indica
ttttttcaaaaaaaaaaaatgtgtacaacttaaccgctggtataccatctagaaacaagtgagcagaagtattaatggccatacatatgttacaaaactatatagtgcttaagagtgaactcaaattaagtattatgctcatggtacttcgtcaagctcttaaaccagggttcaaaaggatctcagcaaatgttctcacatacaatagagaaaggagatgcacttcaacagcatcaaactaatgctacaaagtgcttaaaagcgcacccaatttcgaagtggaaatcgataatgatagaccatctaggaggtctacacgtgtgcctaaacagaatccaaagtatttgtattaggaataacagctatattagtttatgcattttttcagttgtcttttatttaataaatgagatagtggaactagtctttgaacgttgctatgtgtttcctgaagaatagggtgcttcatgcttagaattaggaataagttgttgttctgaatattatatatgtaatcaccattgattaataaaggcagtcatattttaaatcattacttggtttgattttcaccctaagaagatctatagttttcctggtttaattctacctctgactgggacctatcagataataatttttaattcataaatgaatatataatctaagattcccaatctagtacagccatcagggaacagatgctatttaggaaaatcatggtagtcatccagagaccttccggtcttcgcaagaccacacatacttctgttgtgttccagacaacccagaaataacattagttagctccccaacgcccaaaatcttggacaaaggataacatacttgcgatccaccacttctacagtgaagttattaataaagtgtttatctctagtccaagcaatacaatccatttcaaattggtaacaaaacccaaaaaagaaatcccaaaaaattttcataggtatccaaatgagatgttaaaacttgaaacgcaatgtatgctatcaatttcctttcttcctattagtaaatataagttaaaataaaagggagaaacatgaacctttttttccctctctccaaaataaaaagtacaaaattttccattaaaccttcacacaacacatcatttttcagtttcaaagtaagggaaaaaaaaccaggacaaattaaagtttacataacaatttttaagaaaacataccatgaaacaagtaattcaatgataaaatacacatataatgctcaataaaaatcacaaacaacaacaaggagaaaatatatacatgcaaagacgtgataaaagagagagaaggaaggaaattaccagagtcagggaagacaaggttgaaatctaattgaaatgggacattggcgaatctgaggtacaagtaaagaggcaaggaagaggggcaagcagttgggagaccgaaacaaggcttcctcaccacgagagtgtaactttctccttcgcccactacaccttccatcctaagttcgggaatcacaaaattgagaagaacattaaaccctaggtggtagggtaagtagggttttgggtttgggaaactcgacaactgtttatgactctctaaaaagactctagtcctctacacaaacaaatcaattctccacaaaagcaaaaaatgaccagtgatgtgaagatcgattcggattctcttcttcttcttccttttttttttttttttggttattttgtcaaagggttactatgttatgtctatctattggtccaagtcaaaacattttttttttttttgtaaaatgagaacaatttgtatgcattgctattagtggtgtctactgtctatcacccataagacgtgtcgccttaagacgtgtcgccttaagacgtgtcgtcttacgattgattagcgatactctctaaaatctattatattaaattatatggaacccgatactaaattagaccaatagcgatattgacacgtaggagggtatttggcaatactggtgccttttagcatttctcttttacaaatatagtgttgacctcatttttaggcggaattagtaaagtgtttagataacaaatgaaccttgtcaagtgagtttcttgctatctctaaaagttacaagtatattggcaatgtaatagttctcttgagaatataaaaaccactcctaaatagtgaatatgatgcactatttataatttataagaaacgggatgtcaaatatttatatttaattatagaataaataatgagtcaatcccataaatcctctcatttctcttgattattgcaatctctcaattatagaagtgttaattgacctatttgtaagaaaataatttattagaatgaatttggacattttctcctatgaactcgttggtcgaacgctttctgcgagatggctctttagttgctcaaactattagttggtatactccgtcatggatatgcctgatgcttgacaaccccatctagtctacacaaccaaccaatgccttccagagagtcatttcaaaggtccctcatctacttaacttcttccatgttcgccacgtataatatatgcttagatttttaatatcgctcattgtatttatttcatttttaatattatatacttttatagtcataaattattaatgcttggttctaaattttattaaaaataatattacttgatttcatgtatttgcattaacttgtttcacatttaatgcttaaaagttaaaattttaaagcaaaaattttttatcttttgttagaaaataattactttgattgctaatttaattatgagaatcaatataaacataaatcttttatatacacttaagtagattctaaaaccttaataattctccctaaatatcattacaaatatttgttactgtcatttttacaaatttattttattttgttaccaaaaatctcatcattttcaaaactaggttatagttttaataattttgattaaataagtaatttcttcgatctcatacaattcttatggatttgaccttgttcttcataatttctacatacaataaagatttgtgctcttgcgagttgataaatgcaaaacgtaccattttggtatcaacatcaagttacaaagttttgcatcttagtttttggggttctaatcataggcctctacatgtccaatttacttccgatcttaacaatgttatttctggaccaaggatgaaatctcgattcactttgaacaagcttgggctgatgaatatgattttgggctattatttcttcttcttggaatgctcctttaggctcttttggtgagagtcctattaataaaattaagaatgtttctgttgtcattagtaattggaattctaatgtttataggaggcataagaaaatttttttaaaaaaaaattgcaaaatcttaatcctattgtttcttcttctaatttggggcgaatatgtttctcttgaaaaggatcttgatgttcttcattgtaaggagaaaaaatattgggcttctagatcaaagacaaatttggctcaagattggtgatcataatactagttatttccataagagtgcttctgctaggaagaaaagaaatcttacccactctttgcttgatgataatatttatctaagagagggccaagttaatttagcttttgtgtttcatgactacttctatgagctttttagttcggatttcacttttgtagattctatggggccagtcctcaatgatgtgtctcctaaaatttctactacaatgaataactaattgacccagccgcacactcgtgataatgggaaaggtgccctcttccaaatgcatccttctaaagtcctaaaagatatggtatgtctgttggtttctatcaaaattattgggatactatgaataatgaagtttgtaattattgtcttagctttttgaatgagaatggtagcaatgaaggtattaattcaactcttatcactcttattccaaagtttgatgaactatagcgtgtttctaattttgggcctattagcctttgtaaagttctctataaaatcattgcaaaggatatgactaatagacttcatgagattctggagcaagttatctttgatgagcaaagttcttttctctctggcaggttgattactgataatgacatgattggttttgagtgctttaaccatctcaagcaccgtgtcaaaagcaaaacgggggtttttctcttaaacttgatatgtctaaggcttatgatcgtgtttagtgattttttctttattttcttatgcgtaagttgggttttcatgagagatagatttcattggtgttcgcctatatttctttggtaaattattcttccaatctcaatagtgaagtcttgggtcacattgttcttggcaagggactccgacagggtgatctgctctcgccctttttgtttatcatctatactgaagagatatttgtgcttgtgccccgggattgtttgaatggcttaccgtctggcatttcatgtggcacttctggaccgcttatctcccacctctcttttactaataatagcctgtttttcttcagagctacagagtttgcttgcattagacttaaacaactcttggaatggtataatagtgcttcggatcaacaagttaacttcaccaactttgttatctgctttagtcctcgggtgcatgctagtgctgctcaatctatagcttctattcttggtgttaatgtggttgcttgccatgagaagtactttgcgcttccttgttatgaggaccaaagtaagaaatgtttcttctaatatatttgagactatgtgtgggataaacttttcaactaaaaatctttatctttttcttttggtggtaaggaggctcttattaagtctattatccaaacaatcctcacttattttatgaatctgttcagaattcctgttgcgttgattaatgagattcatatgcaatattctcagttttggtggggaggtggagttgataaaaagaaacttttttgatgtacttaggagaaacattgttggcacaaagaagataataggttggattttaaagatctttttctattcaaccaagttatattggtgaaacaagttgctcgtctatactttgatccaaagtctcttgttgcaaagttgttaggctaaaattagtctaagtttcaggtcatattttcagttagttttcactctt

SEQ ID NO: 298546 - DNA, 1901 bp, Cannabis indica
tgccaacacatcaaaagtaaattccatttcaccagcgcaataccaaacttttgtgctggcaaaagtgacatttctcgtagtatttattggagtaggtttagcccattgaatctctaccgacaaagagactagtgccaatgaggcatctccatctacaacccttagttggagatcgtcactcgcgatattgcatcttttttctccatcattggcaatcactgaacaattgattttagcatttcccactctttgagttcctggtaataaaatttgactttagatatattccgatcaagttataattgtaaagctttagctttaaagtgttctttccaaactttcaattgcgtatcttcttaggaccgatatcaatttaccacatctactcccataccaattcaataggggttgcttccgttgattagttagctagaagagtaaagaaaaatgaagaatataataataatgtctatatttgataatttagagcttggttctctcttgcacaggatacaaccaactaaaattctccacacattaaaatcactttctcacctcttttattatatttccttagaagtatgtactctatcctcactctagacaatccaatatactattgacttggcagtgactctgttctctctcttttactctttgggtgtatttatatgtaaggactcatcgacattatcttgaaccacaaaagtgttgaacatgacaacacgtgaaaagtgttgaacgcgaaagcacgtgaagaacataattacttttattatttcgaaagtaattacactaagacttgaatacttttactagaccacaatgcaccaagcactcacacttttattttaccacttgacaaccttactacacacacatatacaattcacacttaggaaatttattttggggcactttagaatatacacttgtatataagcaacacaccatacactacttcacttattttttgcactcaccacaaaggattcaaggttcgtatatatagatggtgtcggtcggtggtgatgaattaaaaatttgctagagctttctagaaatttttttgggcttatgtctaaggcacaagtgctagatagcacttaatttatctcaacatttcttaaagtttctagaatgttcaaagtaggtgttgactttcaacactccccctcaacaccttttcatattgagttgttctcttaacttttaaaatcttgaaatgtcgagtcctttagtgaacaagtttgctacctggtcttcgctctttattcggtgcatctccatatcttcttggtgtactttctctgtgagaaaataatcatgcatctccacattctttgttcgtacatgaaatactagattttttgccaaacgaataacattgattatcacaatgaagttgcactacataatcggtaaagtggtgcaaatccttcattagttgcataatctgtggttgataacaacactgtaaattgccttttgctacatcaagatattactatagatccaaacatgaatacataactagttattaattggcaagtatcatggtctctagcataattagcattgcagtagccaataatcttaacctcatcacctttcttatagaagagaccatagttaatggtatctttcacgtatctcagtatttatcgtactacttctaaatatagtttctttggttgttgcatatattggctcactatccaccttcatatgaaatatctggtcgagtcaatgtaaggtagattagactacctacaagttgtcgatacattgctccatcttgcaagtccttcccagcatgagcatataacttggcattagcttccattggtgttgagatgggcttgcactcgagcattccaaatctttgcagtaaatcttta

SEQ ID NO: 298547 - DNA, 1839 bp, Cannabis indica
aaatttctatatatgacatattaaatgcgttttgaattcaaataaatcatcataaacaattattttaatatcaataaataattttcataattaaaccctaattatctgctagtttccaaatttaaattaagcggtctttacaccagtccacctgtcttatattgtgacaataccgccgctatacacatctccgaaaatccggttttccatgagcgcacgaaacacattgatattgattgtcacattgtgagggaaaagctccatcaaggccgtctcaaactcctacatgtttctacaaaggacaacattgccgatatcttaactaaacctttattttccaatcaatttcaatctcttgtatccaagatgaagttttataatttgtacacttcatcttgagggggtgtaataggattgggcttttatattgggtttttattttaggctttgtctttaggtatttgccactttgtataaataccatttttcccattttattgggtaatgagaaatatcaatttctaatattctaatagaataagaagaaaatttaggagatgcataactgttgatgtttgtttttattttgatagacatggaggagaaaattaagatgttcaagtttgtttttattttgagagatttacttttcatattttgttaactacaattgtatgtttacattataacgtttaaatagttttttgtatgtataattaattttagttaatgaactataactaaagtataaagcaaatagcttgaatagaaaacaagggaaaaaaagataaagttgtctgcagcatttagcaaggacagtgtccgctctaaatgaatgtttataaaaatatgtatactttttataaggactttttcctctctaaaaacaaaaaaaaaaagaattagtgcctttttatagcaaggactttttcctctctatacatatacaaaaaaactttagcaaggacttattgtcctctctaaaaatgcatatgctaaacaaaatcatgccaaaaagtggcgataactaaaaaaatattcagcttagacaaagtcctcgcaatagatgagcattaggcatgacaatttttttttcagtaatagcgactatgaattagcgagaggacaaagctaaaaagctcatttgttgtggtgaaagttattaaatagtcttttgttttctgtttaaattaaaaaatcaaagtgctctattcaaaaaaaaaaaataaaatcttataggaactatttttgttttcaaaatacaaattttactttatttttgtgattaaaaaattaaaaaaaaaacttaaatattaatttaatatatatttattctcgaaactatttgtggattagtagtcatctaagaataagaagtgaaattaatcgattaaaacggatatagatattttacttttacacgtcattttgtctttatttttttttttgcttcctttctcaatattccgatgcttgttgttttacgtactgtatattagccccttattatgtgacacattaaaaacattgttcaataataataaaatatattagtaaattgctccatatatatattggcaatgaattatacataatatagaaacaaaaacgatttgggttactccactcacttggaaagtcatagcattttgagatggaacctaaattttgttttctgaaggaaaacccatatatatacggtaaaacatagcacttaaagaacagaaaaatgatgaagaatagctcaaggtagacacagactactcagtattggtatttgtatctgtgtatataaatatatttataaatatatatcgatatatatataataataacaat

SEQ ID NO: 298548 - DNA, 2319 bp, Cannabis indica
ttgatttaaccaaaatgaaaattttcttaagatcgtggacatgatccacatgtagagtttcttaggcctctcttgtttaattgaaagagtcaatcacataaacaaagatgtcgttatatgagttggcacgacgccgttttgatttgtttttcttttacttctcgagactgtttcccgacactactcatggttatgccttgttatcacattatcttttttctgtttacaaaattagcttattttattaagaacgacttgttagctgatgtaatttttaattggtcaaaaccaggctgaagggctattggtggagcaatgtttgacctctgcctacgaattgattgagattttttgtggaagcatttcaactaatctttctctcatgctaaagcagaggtatgtatgtgacaatctaaacattactaaatgttttccaaattaagtaaattctaactgttaaaatctgtatagggaatgccctgaagaatgtaaagaagcagtgtcaactcttatctatgctgcagcaagatttgctgatttgccagaactacgtgaccttagaaatttgttcactgaacgatatggaaattccattgagtcttaccaaagtaaagaggtagtgtgaactttatatgtttacttgaaaaataagcaattctgttaaaaagacttgctcttttgacttaaaactcattttaatattctcttttttttgcttagtttgtggagaagttaaagccaactttcaccaaagagacaaagcttcagttattgcatgatatagcaggggagttttctattgaatgggattcaaaatctttggaacagaaactgtatactcctcctcctccacccatcaaagtaagtccctcaattgataacattctaagcttttgaaacaatgcttaaacacaaagccaatgtgtctaaaagttagcccttttatcaatgcttcaacccttatacagacaaggagcaatgtcaatgaatatcatggatcaaaccagagaaaggaagaagcttttcccaaaagaagtgaactcagctttaaatctcgccatagcaatgtgcagagcagtagtgaagaagacacatttacagatttttcccaagatgagaggaaaacttcttcaagctcagcaggaagtgtttctgaagatgacacagatggaaagaagcctttcttttacagattagctcgtcctccttatcttaaaccgaaatcagatgaaccaacaacaaagctgaacaatacagttcagcaagaagaagcaagtagtccccatgtaaacacagctgttgtggaagataagccgaaaccaagatcagttaggagaagaaacttgaaaccaccaccgggtcacgaaacttcaaaagaatctaacatgaacaaaaggccagagttggccatgccaccaggccgggtatcatctctccccgctgagccttcatctcctggggaggcatacatggggcccgcccgagcaacctcgttccaacctgatatgatgagttcaaccgctcatgtccatcctaaactgcctcctgactatgaggaatttgctgcacgcattgctgctcttagaggaaaacaaaggtgaaacaaaggacattatctcgatgaagatttgtttcataatgttattatctggggatgattaatattgtagtcctaatccaactccaaaggttctaatcattggaatatatatgaagatatcaaatgaaaggagtgctcccctccagccctcctagtccttgtcctaatacttatactattagtttaacgttattgaatgatcatagggaaaaaaaaggagaaatctaagcaattgtatgtcttaacactttattgatctatacatattaatttggattgtgatcctctctttctttttgcttattttgattctcattcagttagtataccttatacatttatacctataccctatacctatataagatgatcacaatccggaaattcttcaaggttaatgaaatttgaccaaattagagagtgtcctagtgtgcaatagaatgaattccgggatatgagctcttgtttataaaagtattatcaaatgtaattttgcacttgggaaagggttcaaggtgttggattaaaaaatgctaagtgggcacatatgtataatgtatatgctattataaagtgtgatacaaaattaagtgaccaattatgttatgggtatcaaaagggtattaaagtgtcatggaattaatgtgtagataccataagctaatttataatttgttgaggggccaaattaaaaatacccaagagttattctaagatga

SEQ ID NO: 298549 - DNA, 2561 bp, Cannabis indica
catacctcatcaaagagtactctataggcagtttaaatcatgataaatcttccagtttctgcattgcaatgggtcaaagggcctgagcaatatagtaaacaactctaactctcattttcccatggcagtggctagtttttcccctacaacaaacgatagctacaaatatcagtatgaaaacaagaaaactaaattctggacagagatacagttaaataataaatacaaagttgagaaaaaaggactcaaaataaatagcaatggaagaatttacagccgcatttatgcacttagtcgatactgttatccaagcaatgcattaaactacactcatgtgagccaacctttatcttaaaagggcacatttatcaacagtaaaagtcctaaataaaaatatacttgagaagtgttaggccttcacaaagaaaaagaaaaagacagaaaagtgaaaactgaaaagacaaacttttggggtgcatttatttcaccaaacaaaaggaactaaaaacaaaagaagtgattgagttgagattgagattgagacatacaatggaagagatgcttggacaaagtatcattgggcatatactcagctaccaagagtcgttcatccccttcagcacagcaaccaatcaaattcactaatctcgtatgcctcaccttcccaactcctgctgcctcagcctgattaatcaaactcagtacccttttaagcaaaatgcaagaaggccccatgcttgtttaccaggaaaacaaaataggaaaaattaatagcttaaatctatatgaaatgtcccatttgagttcaaaaccagaagagcccagattttttttcttcctcttctagttcatatctaatgcatcacctaatactaaaaacacaaaaaagagaacaatgtataaaactcaaacgacccaattacacttctttccaacaaaaaaaaaaaaaaaaaaagcaacaacttttcttttcctttctctttcactttctcagcaaccaatcagaagaagaaaaagaaagtgtagtctcttctcttaccacgaattgttgagcatcaggccacgattgcttggagaagcgtttaacagctaccaatcgattattctgaagcttccctctataaaccacattgggagctttctcaccactctcagagacaatatagttagtactaaacccatttgtagcctttcgaagctcgctaagaccatactctttaaacaccggagttcgatcctcttcctcaacttgattctcatcagcttcaaaacccaaaaaacaaaatacccatttaacaatcaatctacaaaaacccaaataagaatactaagaatcagaaaataaaatacctgggtcgggctgagcagtggggttatcaggggaatggaggtgagtagtcttagactgaaaacaacccatatgaaagagattcactttcttcacactctctctgtctctaactctatatctcgctcgctttctctctctctgtctctacacaaaacccattgttttagagctatttcaacatcaaagcagaaaagaacaaaacttgagtggtggggtggctaatacagttgactgagtgaggagaccagtaattgaaaaatggtttgagtcacacagtgatgagtagtgagtgagtgtgttaagggtggattttccaataaagtgagtgcttttgaggctctttctctctcttctctacaaagtaccactagttacagagaagcagattaagaagaagatgaagaaaaggactttaaaatgggagagtgaccgagtcagagaaagtgactaagtgagtaagaagtgaatctttaagggtagaaaagaaagaaaacagaaagagtagggacccacttgcaaaatacaaatgaatgaataaaaaggaaaagagaaaggtcacatgataggtctatgatgagccacgtgccactttcttttagtttcactttcaaactaagatataattacataacatacataaggaacaaattttgttctcttctcttgggttgtatcttgtatgtattatgtcactttaactaactgttggatcaaatttattctgtttgagtatgtattatgttcacttctatatctgtttatttaatcattataaattaaagtcttccaactaaatttatgatttgtggactttaatgggtaggttttaagtattattagaaaattttgaattcatatgtttacttttttactaagggtgcacactaagtgggttttattaggtttcaaatttttgggttcgggtgtatagaattagtaactcgaacgtgttcatttgtgtgattggatttttgagttcagattgaaccgagtacgggtgggttttgattggattcgaattggactgactttctttttttcattttgaaaaatattagttttatatatttttttattgaaaaaaattgaaaaaatgaaaagaaaaaaaatgaaagcagaagaaaataaaaatgatatatcattatttagaattaggtttttttttttaattttaagtttatgttttcaaaaaatatttaaaaaaaaaata

SEQ ID NO: 298550 - DNA, 1441 bp, Cannabis indica
taccattttttttttttatttatttattttttttatgtttttgcactaaaaaaagtatgggaaatttgagaggggtatttttgggttttagataaagtggtcatatattttcaatggtgatatgtattagtttaggcataaaatattaagtatatgtaagtatagaaaatcaaatttctcatattattttttttatcaattctttacacaatcagcgttctattttttttaatcttttgcctttttgttctttcaaaaaaagatatatattttttattataatcttttattgattattatttaagaaaaaaaaactataagtctatagtacacctccttatatccatgtctaatttatttttataatcgtatacgttataattatttaaggctgttatactcattttttaagcagttaatgaatgagcctgatcaactcatgatttatttactaggcaaatggataagattcaatatatgcctcaagaaacattacttaaatgacataatcataaccatatatgcgaccaacaagacatgaaacttttaagctcgagaatcacccctcactaagagattttcctttcaataagaacgaaaaacattttcgtaataataaggataatgtcttatcggttacaatactcatttaaagagaagaaagacacatatgatacgcttcggtcgaagatggttaatttacttaagcatggtcctagtggtcaccttggaaggttcgtgatctggatcaagtcaacctttgagaagcttgactctatttacaattctttcgatacgcttttcgagaagaatggtcttacataaacttgctcggctacaacgtgttgtgaccacatcaaggcaaccgttattccgtattttcaaaatacaaatggtcacttatattcccacctattaaataagtacttgaaacatggggaacgtccacgttccataatcatttttagattggatcaaataattactatcctattcctataaatagcagtaagaataatgtaattaggacaataatttttttaacttacagaaattctgtcaaatggtaaggacatctaaaaattcacaaataatatagactcatggagtatgtagattttaactaaaccacgtaaaaatatgtcttctttttgttttccttaccgaattatgtatcatttattacttatattattattcaaaattgattatcaagcttaaaggaaatcattgtttcacttctaaatacttataacaactatagattccatatctatgatcaacgctcccactcaattgaactaccatgctcccaagatgtaaatatcggccagaaccattagttagcttccacgaacacctaaaagaacataaataatacaactaagttgaacctaaccatatcaaaattaagatccatagacctaagatcaaccattga

SEQ ID NO: 298551 - DNA, 3243 bp, Cannabis indica
ttatctaaacctatggcttgtggtatgcctggttaattacttactctaatatcaaagaataaatgttggtgagattcgttatcaactacacacacaagacagacggaagaagacaactccaataattttccaagattatcatgggtaaggagctggttgttcatagttttccaagtaatgaaacgatgtttccagacactcaatctatgccaaatatctttttgcataaatcactctattagcattaatcaaggtgttgtagaatttctaaattttgaattttccatttggaccagcctttacaagatcttatatatcaatggagtttctaattttgattagtttcttgaagtaccaacttgagtcaatcttcaaaggaactaaccagaaatttcggcctttcaaataaatggaatctatccatttcacccagagattgtcttgtttggacataatcgcccaaatatatttgccatcatcgtaatgttccatttatggccttcacaaaaaccaataccaccaaacttcttgggaaggaaaactttttccaaggaaggaagatgaaatttacttctatttccattagtaccctaaaggaaatctctacatcacttactaatggcagcaaaaatcttctaaggaagaatgatgatacttaccctaaaaattcctaatgcccaataaaatggagtgaataagtttagctctcccagcaaacgaaaaatccttgctcgcctaattatttagatttctctgaattttttcaagaatttcaccacaatccatagctttccatttcgttggccttaagtacactcaaagatacttcaaaggaaaggatccctcttccatgttcataatgttcaaaaatttaatcttaatatcagtcgatatgcctttaaagaaaatatgagatttcaatttgcttaaagaaagaccggtggactcactaaacctctaaatagtcgaatgaataatttgtaaggatttggaattacattttcaaaatataacgagatcataaacaaagcaaaagttgattagttttaaagtcttgcaaagagaatgaaaaccaaaccctttaacagttgagcattgaaggaataattcggtcaattattccattacaataacaaagagaagaggagagataggatcaccttgacgaagacatttttctcctttaaatctaattgtgtaatcgactgttgagcataagagaataagaggtccccctaaacaaatcaaaatccaataaattaaccttgaaggaaaataaaattccttaaggagctctgagacaaagtgccaatcaactatgtcataagctttgctgagatcgattttcataatacttctagccaaaatattttccttgtataaccctttagaaagtcttgaaagatgaggatattatgagcaagcaatcgatttttaacaaaggctccttggttgttatgaataagagaaggaagcacttcagagagtctagcacaaagcattatagagatgcatttatacaaggtattacaataagcaataggcttgtaataaatcaatgtggaataattattcaccttagggataaaacaaatagccatttcattaagacctctagggaggaggccatcttgaaaaaatttgagaattgcttcagtaatttcatctccaatctcacaccataagcccttaaaaaagccagcaccaaagccatccagtctaggacttttattggaatgaacaccaaagattgcatccttcacttcagcatggaaaaggtggtaattctattctctattatccctttttttatgatagcatgaaaaaagtgtgaattttcatctccaaattacaactaattaacattactaagctgatgaacataactagcatatctgagtttcgctaagttaaactcatgaagcttctctttttcctcccacttacagcttgaacattagtaggatcattggcaagcgcaccttgagctaaattaaaactctcttggcctcaaagatcttgtaggatatcccccatctccttccaaaattgcttcttaagaacatgttaaaatctataaagtttagtaactatacctaagagccccttcttagtagtaggtaatctccaattctcaagaacattctctttgtaattttcatggagcatccagcaattgaaaaacctgaaaggttcaatcccaacattactatcatcattgttcttaataacacagtaactatgatcaaataaattatcccatttacaaatcccttctgtactaggaacaaaatcataccaactttcattcaagaagactctacccaacttatagtagattctttcccccggttcatgcttattagaccatgtataaaatgagccagaacaattcaattcagtcatttggtcatgagcaagccaattctgagcatctaagacatcagaagccatgacttgtcttccatcaaatctgtcctgataatcaaacatgaaattaaaatcccccaatacaagccaaaacaggttaagcttcccaataccagcaagcttatcccacaaagtcttcttttcaacactagaattcaatccctaaacaacagtaagataaaattttgagtcatggcctgagattttgatcttacaatgggcgagttgagccttctccaagagaacttaaacttttacaaaacatttctgccacattaataagattctaccagataaaataggactagaatagtaatcccaattgggaaaattattcaaagttaagttggcaaccttctcatgacaaactttagtcttaaaaagagcaccaaagcctatcttattcaaatgacaaatatcaaggatagtgtgctgtttactatctttattcatgccccgaacattccaacctaacaagttatactactctgggattcaaagaactagaattaagacctaactccccatcctcaggctcttaaagcattgtaaaaccattgttaattgaagctgaaacctgttgaggccctacattttttgtacccttccttcttggagtaatccaagtattatcctgatcaaccaaattaccagatgttgaaaccatttttccctcgtctgatcttaattttgcaatcttgttccaaaaggaacaatttcccttgcatcttccctctgaataaaactgttagagaattagctgtatattaggtgtaaaagaattagggtaacttgtatttagtagtttcctat

SEQ ID NO: 298552 - DNA, 4505 bp, Cannabis indica
tccatgagtgaccttatcccaaatgtattgagagccaacattctaagattagtaatttatgtttttgcaagctgtatcatgctataggaagtataaaaacatcttttagctgatcatgtttataagagccaattttgtttggaccgttccttttacaatcagagtaaatatggtcagatagtcaattatatattgattacgaaggagtagtcaagcaagtcaatgatgctattcgtttttttttttgtgggttctatttgcaaattttatgtttgaaagaaaaatattttataatatggtcaccatgttgatttctattatttatctgaagaaaatttattatattagttgttgctgttatatttataggaaattaggattcgggttattgttattattattctttctatagcctataggtccatgatttgcccccataagatttaaaatttgattcctactgggatgttcatggagacatgccaaaatttcataccttcaaaaaaattgtaggttcaacgggagcatttggtagcatggacatgatttctgtaaagttcagcttgtgcccttgtttctatccaagtatacattttatgcatatttattgtcatgatttcatgatcatgtttgtgtcgcttgatttgtgcaaaacattatataatatatacgatgctcgatgtaggagacaatgcagcatacgaagactatgcaaatgattattctgctattttgtaaatgagtactattatttgtaattaatgtatcctcattgatggcaatattttctaccttcgacattattttaatgtttgttctgtctttttttttttttacattagggatggtcagtgtccagaatacagtggggaggagcaagctatttgtgctgttggtcttgcaaaatcaaaacctggtgtctttgttgaagctattcaatatttgttagttttagcaacacccgttgaggtgatcattcttactcggtcttcttgttttcttccttcaatgtattattttcctttattcgcttatttttcttattagtgtgtgcttgttaacagctaattctggtaggagtatgctgctctggaggaggtgattgtacagatccatatgcagaggtctcactacagcccttgccagaatatacagttccatcggatggagtcactatgacttgtatcacatgtactaaggcaggtcgtattttcctggctggccgtgatggccacatctatgaactgcattattcaactggttcaagctggcaaaagcgttgccgaaaagtttgcttaactgctggtttgggaagtgtcatatcaaggtatttatgatataaaattaagatgttttgaggtcattaagcttttgtaaatttggacatttgggatttgaaggtctgacctagatggaagctgagtgcattgtaagagtcagattaacttactgttttctaatttgataagatggactttgctattcccattgccgttcatcagctttaaaccatgaagtttgttttttctttaaattattattattataattcttcttcttcttattattattattattatatgttaccctgtactgatacagccacactttttcaggtgggtagtgccaaatgtatttaagtttggagctgttgaccctattgttgaaatggttgttgataatgaaagaagcatgttatatgcacgaacagaagaaatgaaacttcaggtttttattctgggctctaatggcgatggtgcattgaagaaagtagcagaagaaaggaatgtgatcagtcaaagagacactcattatgggggtagacaatcatcaggacaaagagctccaaatcgatcagcaaaaccatccatagtttcaatatcacctttaactactgtggaatccaaagggctacaccttgttgctgttttatcagatggcagaaggatttatcttacaacctctctatctagtggaaatttaggtggcttcaacatgaatcatcataaacctacctgtctgaaagttgtcacgactagaccctcgccgcccttaggtgtcagcagtggtcttgcctttggagctttgtctctttctagcagacctcagaatgaagatctttcattgaaggttgagacatcatattattctgcaggaactcttgtactttctgattcctccccaccaactatgtcttctcttcttgttgtaagtagggattcaagtgcacaaacatctgtgtcgagtacattaggaaccagctcaagaagtaatcgggcattaagggaatatgtttcttctttatcagttgaagggcgaatgctatttgtggcagatgttttaccaatgcctgatgctgcaaaaacagttcactctctatattctgaaattgaatatagtggatttgaaactttgtgtgagtcctctgaaaaggcatgtgcaaaactttgggcaagaggggatctttcaactcaacatatacttccaaggagaagacttgtcattttcagtaccatgggcatgatggaaattgtgttcaacaggcctgtggatattctcaggagattgtttgagtcgaactccccaagatctatcttagaagatttctttaatcgttttggagctggtgaggcagctgcaatgtgtttgattttagcagcaaggatagtttattctgaaaatcttataagcaatactgttgctgaaaaggctgctgaagcctttgaggatccaagagtggttggaatgccacaacttgaaggtagtagtgccctgtcaagcactaggacagctgctgggggattcagcatgggtcaggtggttcaggaggccgagcctgtgttttcaggtgcttatgaagggctttgcctgtgctcttccaggctactttttcctgtatgggaacttcctgtgatggttataaaagggggttctgtagatgcttctcccgagaatggtttagtcatgtgtagactatctattggggctatgcaagtactggaaaacaagcttcgttccttagagaagtttttacggtctaggcgaaaccagaggaggggactttatggttgtgttgctggtttaggggacttgactggttcaattctttatggagctggttcagaattgggggctggtgaccgaggtatggtgaggaacttatttggtgcctattcacgcagtactgaggctaatggtggtggtgcgtccaataagagacagaggttaccatatagtcctgccgaacttgctgccatggaggtaggctggaatagtttatattctatagtggactaaggtttctagacatcctttttcaatttttgttttggttatgcaggtgagagcaatggaatgtataaggcagttgcttctcagatccagtgaagccctgtttttgcttcaacttctttctcagcatcatgtaactcgcttagttcaggggttcaacactaatctgcgacagtcattggctcagttgacatttcatcagctagtttgtactgatgagggtgaccagattgctacaagacttatatctgctttaatggaggtaattcaagattggaaaaatgaaaacaattgagcttggtattcttcattctgaacttttttcttttttctttttcagtgttacactggtcctgagggcagggggactgttgatgatataagtggaagattacgagagggctgtcctagctatttcaaggagtctgatcacaagttctttctagctgtagagtgtcttgaaagagctgcagttactcctgatcccgaagagaagaagaatcttgctagggaggccttcaatctcttgagtaaagttccggagtctgctgatttacaaactgtctgcaaacggtttgaggatttaaggtcagttgaatagatttagggaagtggagagctattccttgtgtaagttggtttcattatatcttcaacaatttaaaaatgcgttggttacaggttctatgaagctgtggttcacttacctctgcaaaaggcacaggctcttgatccagccggtgatgcttttaatgaccaaattgatgcacctgctcgagaacatgcacttgcccagcgtgaaatgtgttatgagatagttgtcagcgcattacggtctttgaaaggtggggcttcacgtggggaatttggatctccggttagacctgcagctccaaaatctgcccttgatcaggcatctcggaacaaatacatatgccagattgtgcagcttggtgttaaatctcctgatagattgtttcatgagtacttgtaccgagcaatgattgacgtaggccttgaaaatgaactattggagtatggtggtcctgatttggtgcctttcctacaaagtggtggccatgaaccaatacaagaggtttcttcttgaatattgattttaattttgatcttttccagcattaagatcgtattttcagaaatgaactaaacatttgttggctagcacttcttgctacctattttttcttaaaaaa

SEQ ID NO: 298553 - DNA, 4333 bp, Cannabis indica
atatttaaaattccgtaaaaccgtatttttgtaattttagtgttgtttttgtgtatttgtgaaataatccctagttattaagcattagtggtgcctaataacttctagatatgttgctttgcgattgactagcaatactctttaaaaattattatattaaactatatgagacctgatacttagttgaaccaatattaatattaacacgtaagagagtgcttggcgccactggtgccttttaacatttttcaaattaaaagagaaatgctaaaagcaccagtggtgcctaacaccttcctatgtgtcaatatcgctattggcgcaattaagtatcgagtctcatataatttaatgtaataacttttaaggagtatcttcactaagcaattgtaaggtaacacgtctaaaaggtgttatgcactactgatgctcaatagcagtgctcaaattaaaattataactattcacaatgttgtaaagtaattattctttcaaattttatcatactggacaaacaaaataacattgtgaatatttatatcatttgtacatacgccacatgtgtaatttaaaattaaaaaatatatgtatttattagaaattatttagctaaaaattaattaatgattaaaaaaatttaagtaaaacttaattaaaaattcaacttattttttaaattaattacacatgtgacactgacagaaatagtgtatactgccacatcatcattctttttgtcacatgtgacaaaatttgacagaatgaccactttacaatactatgagtagttcgatactatttttaacatgctaaaaaatttaggagtacaaaagtacataagtcatagtttaggaggcaaattttttaaataggtatgtaaaaacttatatttaagtggagacataaatataaaagtttatataaaataaactaaattataacaagctaacaacgtaagcaaagtgacaaattaatagaattttgttggatggtactttaaaaatgcaaacggaataatagtttgacaggcgttttcactaaaatttaaacttaaagaattaagtgcaaatgaaataagagttgtgaggatttagtttctaaaaacttatatatagaatacagataaatataaatataaaaagtagtgctaaagaatgaatagattggtaggactttaattctattattaacaattttaaattttttatttttgttttatatgtgatactacaaaaatattttttatggtacaaaatatctattttaatctctgttttttattgtttaagtactaaaactaaattcacaaaaataataattaaaaaaaagctcaaatggaaaaatttatttgtaaaaataattatatttatatttttaaattgaacaatttgtgtcctcaagcagtgaggtgagtccactattaataggggaagaccatgaacaaagtggagatccaggtcagtgattggtgatactctgcgatagaaaggaataagagttagatcactaaacgaaaggagacatattctactatgctatacctctgtaagtattctataatatatgcatgatattgatgttaaatattaatttacgtaaaaaataaaatcattcctattaagcatgttttcctaataggtggtactttggatcagttctgccatcgtatagtgtaatttttggctccttgaaattggatggaagtagttctgcttgaaaatcctttgagaaaaaggtttctttatcaaactcctcattatcactcaattctccttcgaggtagtaactatctttcagcgtaggtcttgcatctctgcttctagctccttcatcattttgctcaacttctcttgggggttagcagatggaagtttgaccctcattagggtttgtatgggggttgcgtgaggtacttctccaatttaattatagtgtgacttctcaccgaagttgagggatagggtcatacatttgcctcccacttgagagggagtcataggcgaggttcccctaacatgaaaccttttgtatgaagtttctccttacaaccatatggtgtttccttcagagtgttcttctgagggaggtcagcttgagttgtcctagcagatccgtagggcacccttttagcgataggtctttcttcgactgtcctcgtagggtatcactagtagagaacatggagctccccttgttaacttgcatggttgattgtcctctctcttatcatttccctttgaactttaagagcgaggcgtgagtcttgcctttgagtatgctattcagcacatttttcatgtcggtcatcgtggtttccaacctccgatttttcaaatagaggttgtttatctcctcttcatagcagtggatttgaaactttaactcactaagtacacttgtacattctttctaaagtacttacgctttaaatgattgaggttgcgacattagtggcgaggcaggatgagatattgtgagggtgatggagctcttggtggggccttacttgatggtttagcaagtggtgtcagaatcctagttgagaggagtgctctattttttggcacgttgactatcagaagagtggtaggcgctatcagacatcctactggaagtggtggtctcattggagaggtgtcattttttggagttgtaaatggttgtatcataggggaaggtacttcttcctcttctctgtgggagtatctctccggagaaccatggatctccaatggtggtggatttctcctaaactccattgattgaacctcatccatgtataactctattaggttaagatgcctaaatcatcttggcatgcttaaatagtgatgatttcttagaaaaaatatagcttaaagcttgcctttcccatagatgatactagattgttgacgactgattcttgtcaacaaaataaaggttgaaaaattacaattaagatattaaattaaagagtaatatacattaagaagcttgaagattataaagacaatggagaaaaaaaaagtctttgtatttcttagagaaatattatagtgattttctaacccccctcttcaatagaagagaagggtctttataggaggctctcttgaccctaatttacaggttgatacttatgtggtccttttagggaccatttagtactttgacggtgtcaggtgtaagtgcagctggtagtggagcagaagtagtggtggtcaggttgtactaacataaaaagagcacgcctccattacttgtcccttccgtacctcatgtacgtttattgcactaccttgggtcttgtaggaagtacggttgaactttctgacttgtccttgaatacgcatgcttcctcaccctttttcccttgtgcttaaaaatttactaagtgttgaggccacgagagccacctttttagagagctagatggacgaaccaccttcatggggtccaaggtgggtaaaccaccttctcagaggctaagtaaggtgggccacctcctcggagggctagatgggcaagccatcttcatggtccccactacccaaaagagagaggagaggtgggagagtgaccatggcacaaagagagtgttggtgctaagacctccttggtgccaatgagagagagagaataggagaagaagtgtcaagtcttccttggcaccaagacctccttggtgccaaggagagagaaaaaagtgagaaagagaaagaaaaaggagaagaagtaggggcataagtgccaatgtctccttagcgctaagacctccatggcgccaagacctacttggcaccaatgggagagagaaaatgagaaagaaagagaaagagaagggagaaatacagagaaagaagtaaagggccaagacctctttcatgccaaggagagagaaaaagtgccaaaaagataagggaaaaagaaagtgaaagaagtgaaaggccaaggagaaagaaaaaatgccaaaaagagaaaggggaaagaaatggaaagaagtgaagggccaaggccttccttggcgccaagacctccttggcagtaaggagagagaaatagagaaagagagaaagaaatataaagatataaagaggaaatgatgacctcttggaacccatcttaagcaccatgaattctcacttttttgtattttaattatttattcgacatttattgctttccaatagggctgagcataaaatttagaaaattgaaaaaaatcgttcaaacttacctaccgaatacctttggaaccgaaactgatgaaccgaaaaccaaaaaaatcactaacgattaaaaccgccattgaacagtcagttttttttgggtaataaaccgatcgaaaaaa

SEQ ID NO: 298554 - DNA, 833 bp, Cannabis indica
ttattcataattatctaattagagttttgctaatccatttcctaacttagggtattacacttatgggcccatcctctccaagaaaatcctttgatagggatacttttggctcactgtgaagaaggattacacgaaatacgtacggaagtgtgaacagtgttagagatatgccaaagttctgcgtgcactgcccacagagatcacattaatgagcaacccattgccttttgcattttgggaattgatttggtaggatccctccccaaaggtaaatgaggagtcaagtacgcaattgtcgcatttgactacttcaccaagcagatcgaggcagaatccatgaatactattacttccaagaaggatttggattttgttatcaaaaatatcatgtgtaggtacatactcctgtataaaattattccagacaatgagaagtagtttgataacgatcctttcactaggttctgtgcccagcatggaataatgaagagcttttcagcggtagcccggccacaagctaatgggtaagtggaggtcgtcaagacaacgttgaagaagaaacttcaaacctgcaaggcccactggccagaggaactcccccaagttctataggcctatcaaacagtagaaagaactcctatggggtagatgctgtatgtaatggcctatggatgcaaggcggtgatcccagtagaggccatagtcccttcctattgacgagatacctacgacccttcttgcaaccattcctcactccaagagtcgttataattaatcgaagagcttcaggagcagtcgcaagttcaactcaaaatgtaccaaggaaaaattgc

SEQ ID NO: 298555 - DNA, 2746 bp, Cannabis indica
atatatatttttttaaaaaaacccaattaagttaacaactaaagccttaatatcataaaataaaataaaataaaaactgacataaaccagatggataccccttttattgagagacattaaaaaagaccaaagcacaaaaaacaagccccttaaactactcccttgggaaatgaaagaaagaggagttattatctgttcttcttgttcaactccttttgtccatagagatgtttgccaaagatggtgagagagagttagaagaagaagcctagtcaagaagttccatagtttgaatcttattgttattcccatgaatcatcaaagaattagtatagtgatcatttttcagctcattttgtttaactttgatcatgtcaaagcacaaggtctggggcctgattttgctggcccagatgacacagatttccaaccaagtctagctgttgttataggaattttaagtgtcatgtttgtgctaacatttttcctccttgcatatgcaaaattctgtcacagaagagagtctgctgttcttcttgtaaaccgaaacccgaaccaaataggcacaagcaacaggttttctggtatagacaagactgtgattgagtcacttcctttcttcagattctcctctctaaagggttcaaaagaaggcctcgaatgctcggtttgtctatcgaaattcgaagatatagaagttcttaggcttttgcctaagtgtaaacatgcttttcatattagttgtattgattattggcttgagaagcattctagttgccctctttgcaggcagaaagttagctctgaagatcttgaactcatcacttactcttcaagtatgagatttttatggaacaacaacaattataataacagtactaaccaatcaaatcatcatcatctaggtggtgaagaagagccaaccatggagctctttgttgagagagaagaaagccaaagagggtcttcaagattcagcattggaagcagttttagaaagattgaaaagaatcatgatgatgatgatgataaggaaaagcaattattgatcctccaaactcatcatgatcagaatcaacaacaacaagtgttacacaagcacaaccacaagattgtcgtttctgatttcgtttacaagaacaggtggagcaatgttagttcctctgaccttatatttctcaactctgaaatgctaaacgacatgtcaagcaccagattccaccacgcctcaaactcaaactcaataacaataacaacagaggaaaacgacgagattacaaagattaaagaagagatggggatgaaaaggtcgtttcagaacaaagttggaacaagtatcaataacatcaataataataataatgttagctcaagttctgtgatgagttgtggagaacaaagatcagtctcagaaatcactgcacattcaagatatggaattttggggtcaaacagtagactcagaagagattcttctttgactgatcagaacaatgttaaagaggaaagaatcagaagggcttggctcagtattgctaaaaggacagtccaatggtttgcaaacagagaagagaggccacaaaaccaaaatctacatccctcaaatgtatagaaatcatccaaaaaaaaacattattgcatctcatttttttcttttcctttgaagacatgtttgtggaattaaaatttcttgtagagtttttacttttagtctcttaagagctttttttttaaaattttccagttatatatacaaagttgaagagatacatatatacattaacttttcagttatcagttatgaatgtatatgctttagtctaattttttttggttaaaacatgatatgggaacagttttttttcattcatgaattaggtattgcattattgaaatggaagtttagttttggtatatgcattcttaaatagacatttaacaataatgatgagattttattaattttgaaaaatagttgaataagagaaagcatgggtgggaagtgggaatgaagcttgatcggttgaggttgagaggttacaccattgaggagtgtttcaattttctgtgtccatttaaggctatcttaaatttagagacatattgtcacattgtggccacacccacatatgattatgccgcacgtaaaatcaaaattaaaagtcaatggagtttccactttttccatcctaaatattacacattacatatatgatttatatgcattcacatgcataaaatgccataatatctattgttgggatataatataatataatatgccattttcaatgatggggaatagttgtattttatttttatttttttatatttttctttcttaaataatatttcgggaggctataaaattaaggttacttttaatgaaagatttagtcaggttgtatttaaaaatggtttaaaaatttattaaagtaaaaaacaaggagctctttaggtaggccactccatcttttacattatttttacactattattcatactttattttaattatcactttttcaacccaatactctaaatatcacactaaaatatatatactattacttttaatttatttaattaatactttcatattagtattagtgggtccgtgctcagtccaccaggataaaatttgagttcatattacttgtattgtaatttgtaaatttattctatataaaatgtggctatataacaaaatttttagtttatgcaaaattattaggtgatttttttt

SEQ ID NO: 298556 - DNA, 10736 bp, Cannabis indica
aaaaatggcaagagtacagctttgagacagcagagacaattattgcaataagtggttgacacgtggtttggattacgtaagagccttaccctccacatacttcttcactaacaaaacgacaaagcccctttctttagtcaatcgatcatttcagtcttctttctatctttctttctttctgagtttgagttttctctgatcaagaaggagatgggttacttgagaatgaaaactgactcggacgctaccgatttgcttggtaatgatgtcaaagatctggccaatgctttgaaaaagtttgccaaccattccattaagctagcttcccttggctttggtacctcattcctcgagtgggtcgctgcattcgctgctatgtatgtctctccttcttttcttccccattttattcttaacagatataaatttgcttaactattattcttaaaatacttgttcataaatataagaaagaaaacaaaacatttaatttaaggatccttacagttacacacttttatgctaaaaagagccacttctttaaatattaattaagtacacaggcttgatcatgctacgttgaattcgatgtttcaaaatctaaaatgatgtatatgtactacatacatatacgaaagatgctatagcttatttttgtattccatactgaacttagctttttttactatacattatatacaaccgaatactatatgttgagcttctgcagatttttcttttggtgtctgagcgtctttatcttatttggtatcttataccgttatactgtgtcgttataaaaagaatgaaaacgacagtaaaaaataccttttctcctattttttttttttttatccttcagataaatttatggaaaaagtaaaggaaaaaaaagtatataaattcccatgctatgagaaagtgtttgaccaagatccagaccctcccctgttacttaaatttagacaacttttttgtacttggagattaaatatatctggagtttccaaactcataaaatgtgaaatattagttttaattactgaaaactaattgagttttgagatggataatactaaaatgtgaattattagcaaaattctggtgaagggtcgtgaacttaatttaataaattgtcgagtgagaaaattattgcttctagcacagatcatcagatcttgttcttgtatttattatcaactttgtatttttatatacacccaactaattatttgtcgtatttgcctaatgtagctatttgttgatcttggaccggacaaactggaaaacaaacatccttacttcactcttaattccatacattttcttcactcttccttccctactgttcgacttattcaggtaattaccaacttaaggaacacttttgtttttaaaaatgtgcttaattatttatttattagttccttgtacaacttacttataaacatcgaaaaatgattattcaggggggatgtgggcaaatggattgcttgtgttgccattgtattgcggcttttcttccctcagcactttccaggtatagtttctatatctcgtattatatgatcatagcttttaactgcatctacaaccatcgtttgaattttttttttactgattttcggtggttatgtagattggctagaactacctgcctctttgattctgctcatagtggtagctccaagtctaattgctgggtacattagggatggctggattgggctagttatatgtcttgtcattgcatgttacttgctgcaagagcacataagagcatctggtggcttcagaaacgctttcacgaaagccaatggcgtctcaaacactgttggtatagttattttgttcgtcttccctgtttgggctctggttctggacattctgtagatcaaaatttctgatcagttcgaggattgcaacactcttggggattggattaatttctgctgttcatttcttccgactctaagagaaattcatttgtcattgtgtgtaacttgtgatcatctttttaatgtttgaatttgaataagtgtatgaacaaatctgtgtggaggacttgattttctttgacaatgttttatttttccaactatggtatatcaggtgtgcactaccttttaaagggaacgtttggcttcttaattgaaatctttggcattagtttttctttttgttcttttttttttttctttttgttctttttttttttctttttttcccaaaggtaggtttggccttccatggagagttctaaagtcaatttaaatcttgcattggaggaaatggtctaagctttctcatattagtacaatacaaagtacagtttgtgatggaaacttttcacatcttattatatccataatgttttgtcaggtataacaaagtaacattaaattgaatactgtaatcacaactgttcaggtaatccttatttatatagatacaaaatatattctaaatcactccttggacaaactgattcaacaaagcttcatactagaacacaacaactcgtactggaccaagttcaactgctctcgttcgtcatacccttgcctcttttgcttcattgtacaatttatcaatacagtcctagagataatttatgtaagacatcattaataaagaaaacaacaaaagaccaaaattcaatatcttgtgagcatgtcataggcaactgattgaaactttgaaagagacacgagtcataccttgtaatgtttaagcaattggggtctcttcaatttgaaagttggagttataagatctctctccatgtcaaatggatttggctccaagtaaactgcttttaacatctcaaaacctcgaagctgtagtaaagattctcatttaagttagatgaaaaagcataatacataagctactatcatggaaactaatgatcattttcgacaagaattgtagagttctatctcaaaaccatttgatgatgagtaaaataaatggctcaatatttttacatttattcatgtaagacaatgtttgtccaacaattttcaacataccttgtgtttctgagcaatattgttgagctcatccaaaatgtatttacttgccttcggattttcacaaagtgatttaaaatcatcagtcaatttacgggttgttgcccagttctccagagcaagtctctcagggacaaccacagccacaagaaatgactcaaagctgttcccatagacccaaatctatacaaaatccagagacataataaatagaattgaattcgtgtacataggcacctaagaatcaaataagagcatccctaattgcaatattctttaaagtgctaaaacctttcacattatttttgacactcttacttctacaaacactccaatgttataaaacatttcaagaatgctataataaatatattatttgttttaattataaaaggtattactttatttatcttaattttttataaaaaattaagatagcgtcaatgttaatgtatgacatcaatacaaattcttaaaataacatccacttctcttcaatggtatagcactctcatattttgccaactaagttgtccaccttagcaaacattctctaaaatttaactattagagatgctctaacaaactaggtagtggggagttatattttctatgagaaatgctaaagggagcttatagtgtctaatacttttgtgagatgtaatattactattgatgcaatttaatatcgaattccacttattttattttaataaatattataaagaaccaccccacctcatagcggtgttaggcacctcgatgccccacaacaatgcttgtaataaaaatggtaggttattttggggaactttaattggctttatgaatatatttaagtggggcagggaaaattgaagggaatcatgaatggtgtgaatttggattagcgttgttgctcctagggagaggggtggtctctggaataccattaagttttctgtattattatttttctgtgttgtttgtgaatttatttgggtcttaacagtggtgtatgctgccaaaaattcatgctacaaagaaaaataccgatgctatgagtgggcattgtaagtatatgccctcaatgttctcaacagcaacatattccccttgagagagcttaaatatattcttcttccgatctattattttcattgctccatttggttgccattcaccaatgtcacctgacatttcaaaatcaaataatatttaggctttctcactctttgcacatcttttgtttaactttggagatttattatcaactgagcatggcatttcattttgacatatacttaaattaagcacatagatttactaactgtctattaaacatattttttttctccctcaatgtgatccacttatggacgcgtcatacttctactagtttacttctttttggagctgttaataaaaagataggtgccaaaaacagatatttttattaaagtgccgatatgtacagctgaaaaatatgcatttagattaaataacttgtaaggtcttacctgtgtgaaaccaaccatcaactaggacatctttagttagatcttctctcttgtggtagccagaaaacaaggttgttcctcgcaaacaaatctcgccacgaggcttgtcagaaagggcatcatatcccatttctggcactgattcaagccttacttcaatagttgtgatgggtactccaacagttccaatcatagggaaaatgttggcaatggatgtaagacacccaccacagctttcagtaagcccttacatatagaaagataaaaattaaaaaggtaaattgatggcaatagtcttatgaaggaaataaaggtaaatgtttaaacttgttatcatcttcattagagtaaattgcaatattcatctgagatcaaattgacgtgtaaggtttggcagattaatattgtttggcgatattgaatttaattgttttataaactgttcaattaactctattgtaccatatccttgtgttacagaagcacagcttgtgaccctcaaatattcctccacatggtgaggcaaaggtgcagccccggaaaacatgagccgaattcttcctcctaatccttgttttatctagataagccaacacaatttagaatgaagaattatatttgaatatatacaatacatgctaaaatcaaatggggaagcatgtcttgccttgtcaaaaacaatcttgtccataaggggagccgctttgtcgtgtggaagacccttttccatatttgccaacttgctgcaaatggactctttctcagtaggacagaagcacagtaaaggtatatatatatatatatttatatataaatgtaacaaagaaacgtttgcagtatctcatactagttgtatgcatattggaacaacatcttcttcagtgtacctccagatgagactttatggaatataccttcaacgattgacatttattttagttttgactgacagatcatgagatattgtatggtttcatattctactaatctaaattttgtcaactttgaaatttacctgcatatatacgatcataaactctaggaaccccacaaaatatagtcggtttcagttcttggaggtcatccatcaaaaacctgatatcctgtaataagtccaaaccaattctcagttccttggagaattaaaaagttgcaataaaaggatataaaggaagaaataattcttaatcttactcctcgccaatagccaattgcgctgcccttgtagatgcaatagttctccacaatttgatcatatacatgagccaaaggaaggtaggaaaagtacacatcatcttctgagaactgtaattgaaaccatctcatgtaaatatgtagacgtgtacaggaaccttgtgagatgcacagtttttaatttcttcactttatagagtttcaatttagtgaaaaatatccttacaaaaaaaaagtgaaaaatataaatacataatgtacaataagaactcgttaactatatagtattcaaaaattttaacagaagaacattcaaagtaatctttagactttttactttccttagaaaaactactgtttaattaatcttttttctaaagaagtccccttgtaatgacctcaaaggtcctatatatagtgagttctctataattttaaacttcatccgatccctaagtctgagaatatctggttactttcacactagataatctagtactttagatagtctgttgtctcatacattctcaattgcactaaaacttcttcttctacttgtacctcagttgaaatgaattttgtctcctttatcaatactcattgtgtagtcactatcttgtttgtgatcttttggcttaaatgaccctagtctcgatattttctccttacttctatttgtatgaggacacgggatacgtgggagtcgaacgcacgggtgaacgcgcgcggggaagtgagctgggtgctggtgcgtggaggttggagagctaggtgctgcaagctggggagctgggtgttgtagtcttgggagttgggcactgcaggcgtgtaggctagggagctgggcgttgcaacatggaggttgggcggtggtacgtggggcctgggtgctagtcgctgcaggctgggcgttggagagggaagaagaagctgatatgatgggagatctgatgaggagacaaggacaaaagaggtagggaccactctttgtccattttgtttatcttgagaatcttgtattattctttctacttatttgttgtccataagaacattcatttattggactttcgttgttaacacttgccccccagtccaaaagagcacttttgagtgatctgtttttctgcaattgagttattctttaggccttatgcgacgcatcttttctggtggaacatctaacatgacgtaccgaaatattgatgagaccattcaatgaagtagacggtccatgttgtttctcctgtgtgcatgtgactaaccccatcctttgatcttattttcatcaaacggttgccattcatctcttcttcttataaataggctttcactttcacctattcttatctcatccttacttctcaccacttgctatctcctttagcttcctactccttccaaagtcttcttacatttcgagccctttgacatttgttctttctttgagtttcgacatagcaagcctcttcctactcaagcaaatcttgtctagtaccttctttctctattcacattaccttttttatatatatttatacacctacgacacttgcgggtaccactcaaatttatgataactcttattagtctttggtctcccactaaacctatccattcgtccaccctccccctttattttgtcgggtgacaaacgtggtctaaggaggcccttttgtgagtgagttatagttggtggtgtgttctcacactgggtcagcgggtgttggtgcccacattcactttcttcgaacaatacttctgccttgccctccccacattcactttcttccctgtcctccggaggaagcagtatggcgtacaacttcttagcctttaacttatcttttgtcaagaccaatccgcagtcaattaagttgggcaaagttagaatatggtgatagagcttactttcatagtcaaccttgaacaagtttagtagtctggaagaatactcctcttttgtgagggaaggagagtcacgcgccgctgcaaacgagaaaaggaaaagagttgaagggtcatcatgaagaggttctatattaattaattggtgtaagtagaagcaacaaagtcacttaccaggcatccaaaagacttcggtcacacccacctgactgggcacatagaagaagtcttgtttccaagcctttcttgtgttaaaaactgagcggacgactgtcaggtcagttgaaaccttcttgtgtatgtaataaaaatctcggaatgaggagttttgaagaaagttatacacatagtgtacctccctaacagtgggagccccactagtgactttcttgaaagcgatgaagaagcaagttaaaatgttccattcgttaggcaaaagttgtaggggagctatgccgaaataattcaggaccttcacgaaaaaagggtgaagcggccaagcgacacccgccttgagaatatattcgctaaaggtcaccatgcctttaagtggtaaatgagcacgatccccgaggataagctcaaaatcctacctcgttgcatattggtgcactatcctctgaaatttaggccgagtcacagtactctccatgtcggccatcccgaatcaactagtcacgagcatgggaggggcgcactagccttggtcgagcggcatggtttttccatatctacaaaatcataaaaagagttagaacgagaagagacacacttcatgttcttcattcggcgagcaagaaccttctgatccaatctaggcctcactgaagcttcattccctagatgtccctgggcaacgacgaatggtgagcagtaataggaggaacaacctcctttgcctggctggcggataggtgatcccaaagccaaaggcatgggagctaggcaagggggggacgactcaggtagaaaaatttgttccaagtgagcaagtttcgccactatgtcaccacatagccgcttgaggagggaaaggtatgcatccgttttagcatgcccctaaccctccaaaaactcactctcctcgttaagcctagataaatgctcttggaacttaaaatttcatctagtcattttaaacgctcagacatcagttggtgataccgtgcccaagggtctacaacgtccccatccgagttgaatgaaagctcaatagggaaaattcgctcggggatgaaaggtgatctatggtcttccataaaaaaaagggagggagggaggacaaggcagaagtattgttcgaagaatgtgaatgtgggcaccaagatccactgaccaagtatgggaacacaccgccaactataactcactcacaaaagggcctccttagacacacgcctagtcaccgacacaataaaaggggagggtgcacgaatggaagtgattagtgggggaccaaagacaaacaagactttaacaagagttatcataaatttgagtggtacccgcaagggtggtaggtgtataaatatataaaaaaaaaaagtagtgaatggggaaagcaggtacctaacaagattggctttagtaagaagaggctcactacattagaactcgaagaaagaaaaaatatcaaagggctcaaaatgtaagaagagtttggaaagagtaggaagctaagggagatagcaagtgaagggaagtaaggatgagataagaataggtgaaagtgaaaacctatttataagaagaagagatgaatggtaactattggattgaaataagatcaaagagtggggttagtcacatgcacacatgagaaacaacatgtgacccacctacctcattgaatgatctcatcaatatttcaatacgtaatgtcagatgttccaccagacgaggtgcgccacatagggcctaaagaacgtcttaattgcattcaaaaagatcacttaaaagtgctctttttaattggggggaaagtgttaaccacgaaagttcaataaatgaatgctcctatggacaacaaataagtagaaggaataatacaagattctcaagacaaataaaatggacaaagagtggtccccacctcttttgtccttgtcctctcgtcacatctccccatcatatcagcttcttcctcacgctgcagcaaccagtgcctaggctccacgcatcagcacccaggctccatgcaccagtgcccagcctccacgttgtagcgtccagctccccaccctgcacgcatacagcgccaagctccccagcctgcaactcccagctccttagccttcacgcaccagcgcccagctcacttccctgcacgtcgagttgtgtacctggctcccacgtatccagtctcctcatacaaatagacgtaaggagaaaatatcgagactagggtagtttaagctaggagatcacatataagatagcgactaaagaattaatattgataaaggagacaaagttcatttcaccgaggtacaagtaaaagagaaagttttggtgcaactgaggatgtgtgaaacaacaggctacctgaagtactaaggtatttagtgtgaaagtgaccttacattctcagacttagggatttgatgaagttcaaaattgtagagaactcactataaatagggcctttgaggtcattgtaaaggggcttctttggaaaaaatattaatgaaatagtagttttatgaggaaagtgaagagtctaaagtttacttttaatgttcttctattaagatctttaaatactattttgggttcttgatatttcgttgacgagtttttaccgccaacaaataatatttaccactttgtctgttagctctaacatcttgtctgtagacaatatttctgccatgatggcttcattagaaagaataactccttttggttctccagttgttccacttgtatacatcaatgtgcagatatcagtcctttgtttttcaggaagttcaccactaagatttccctgtttatttagacaatagttagtaatattgtttataatataactaaccaatcaaaaagtaataaataccaaaaaagaaaaaagaaaaagtatatagtttagtatatgagggga

SEQ ID NO: 298557 - DNA, 3849 bp, Cannabis indica
aaaaaaaagaaaaaaatttagaagtttaattggttaacatattaaaattatgtatttttggcatctaaacctttcaattgttctttcacttgcactaaaccctccatgctcaaattttagtggtaaaatcctccaaacaattgaaccattagcaaatttaaggtacaatccttttttctcagttaaatgtcagcatgaattgcttacatggatactcttctacattgttgacctcagaatttggccaactaatagcgggttcatattaaactgatgcttgccacgtgttacacaattaaaattagaaagttaatgaacacaagtatttttacagaggttcagtccccttagttagcgggtaatgacctactcaccttttaattgtatcgatactgagagatatcactattcagatcactatatgtgagatatgatatagctctcttaaggttacaaattaggaatcaaagatggaaaatctcaagtgttgagagatgctatagtgggcgtgtgagagagaatgctattagactcaaagcttgactgctaaatgacttagggacttagttgcttaggctttttagggttgagttaagactctttatataggagagcttaaaccctaattgaaaaataaaatgagtagatatttacatattaaattgattaaatagaaaagattaaaatgccctttaaaaataggtattttttatctactttattgggctgttaggcccaattcgcagtccaccttgtagtccacgtgtaagactgtgcaccagaatcttgccaggtccaatcctggttggccaagcacctgtaggaagtaggctggccaaccctgtgctgtccagaagctggctatccctaagatctgacactaccggttccaataggtgccattttacaagcgctccatcccaacattacaaatgaggaatagggcgaatcacatcctgtctcttcctatagagaagagaaacataatcagattggctagtggggccaactttcagagctatagcctgtaccctcctgcctctggagttgtgggggcctagggcccattggttggtgtaaatggagcccttactgctgagggggtttgtcctagtgataaaaatgtccgtggcatggatgatgatgtgcctttgtcttggatagcttaataccttgattgcttgggaccaaatttacaaacctaggaaggctagagacctcaatttctacaatatactcacctaaaataaagcaacaattggaaagtatgtctaggagatttcaacaaagaaggatgacatgtgggtcaagtggaacaataatgtatgcattaaagaatataagtggtggttctacattgctccttcttagtgtagttggtactagaagaaggtggttgtagtgaaggacgagcttaaaaaatttataaatgagttgcaattctaaacaaaaaagtatacggaaatcaagggtataagctcatttggctagatgtggataaatttcactagagtaaggaggtttggggtcgatttaatctccccaaacatatctttatgttttggctagctgtccaaacatgcttaaagaatagggacaagtttaatcgccacaatatggtccaagattgttcgtgccttctatgtggaattgggaaggaaacctgtactcacttgttctttgagtgtatttttatcaagaattgtttgaaggaagtttagaaatgactcaattggaatgtctcggctgaatctctacaacaacctttgagatggattgttagagtaagtgcgagtaagtcaaaagaagcttaatttttctgcttgcactaatgccttcgtttactatatttggtaagctagaaatgatgcttatcattcattagaggttgttataattgatatatgtgtaaagaggataattgaaactgttaaaaataaattattatttgtttggtcaaagaagattggcaagcaagatagagagtagtttgaaaaattataggatatacattcttaatttatacatatatagttttaagcaggccttgtgcataaggtgtggttaagataattttttaaaatttaatatttgggtatataagagtaaacgttgtgctaaataaatcacacattaattagacagtcttatagtttttgtttttttttttaaaagagtaatgctattaagtactttattgttcccaacactattgatgtgacccattatgagtggttagcgatttcctatattatttataaaatcaaattgtttaggacccaatattaattcataccaatggcagcataccactttttgtagtacttggtacaataaagtatctcatagcatttctcaatttcaaaaatactagttggtctcataaataagaatgtacatgagggaggtggcaaaggataaaagcacaaattaaatatggaggaataaaataaaagtttttattttatagcaaataatagtaaaatattttagaaaattctacaatgcaccccctttaaagggatgtaccgatgaacccttatctgttttagtattcaaaataattttttagtaatatttttttctcattgtaatgtacattatagttatttaagatatcttgtaaaattttaaaaaattcagaaaaatttaacatgcctaagacagggttaaaacagagtgttgcatgcgtgactattttattttaaacgcgtgtgaaataggcttattgatggtgagaactcgtcaactaacttgttggccaaaaaatcaaactcttcttcaaacatagaaataagatgaagaaaaagataaaatacaaattcaagtgtctatctcaaagtagagaaaaaaatggaaactttatattactctcattatagtggtttcaagaataattttctaaccccttctcacatttaaggaaagggtattcataggctctaatagcttggattacatggtggtcctaagcgatagggtatcgctttcatgctgcttattgcaagtgcaggtggtggtcttgtgtcttgttcacttgtttggtgttaggtggtctcgagtcgcaggagtagtggctgcattatacccttagtcaattcctcatgctctgtaggtgtggtacctccactattaatatctccttgcttgagatcttgcagaaggcatcaccgtactctcctcacgtgcttaccttgtccttatgaccatatcctggtctcttcactctcttctagcttgggaaaattccaccaagttttgcaaggtcatgcctgagtgacatgtgtaatgttatggtcgagtgacttctctagggtgcatgctgagtgacttctcaagagtgcacgccgagtgacatttatggatgcatgccgagtgactttcacaatgtcattattgagcgacattatgaatgcccttaccgagtgacatcatgaatgtccttaccgagtgacattcacaatgctattgtcgagtgacatagcaaatgtccttgtcgagtgacattaacaatgtcattgctgagtgacattgtgaatgtccttaccgagtgactttcatgggtgcgtgccgagtgacttctcaatgttatggccgagtgacattgtcactctctctagactgagtgacattgtcagtctcaaggctgagtgacattgtcactctcaaggctgagttatttctcaatatcatggtcgagtgacattgtcactctcaagaccgagtgacttctcaataccatatcccagtgacattgtcactctctaggccgagtgatattgtcactctcatggctaagtgacatttattggaaaattgttgtgctccaatagaaatatcaaaccaaca

SEQ ID NO: 298558 - DNA, 7114 bp, Cannabis indica
ggttcggtcagctagagttgtccttgaccaatggaagaatgctcaatctcaaaaaggtggtgctttgttagttaatgatattaacaatgtatgtgagcgttggaggaatcctatgttcaaaacggttaaggtgaatgttgatggagctatttttgaagcagagaacaagtttagggctggttgtgtggctcgtgattccaatggatgcttgattgcggccttgtctgtgagccgtcgtggcttagtcaagtcagaaattgctaaaataattgggatcaaagaagccttgagttggataaagaagaaacaatggactaatgttgtaatcgaaattgatgctttggtggtggttcaagctattaatagcgctattcttatgccttctcagtttggattattagctcgggattgccttgtgttgctttcttctctttctaatgtttatttgatttttgttaaacaatctgctaataaaattgctcattgtgttgctatagggtcttgttatttgtcagattgtgagtttagtgagcatgatgctcctagcgcttttaagaatattgtatattttgagtgttttttgaataaattccatatttgattaaaaaaaaaaattaaacataggtgactttggcacgtaatatttatctagtgtacacaaatatatttatgtttttattagtttatataatattaattatttatatattaataaaattattttaaaatataaaaaataaataatagaaattacattttttttcctattcttctttctctagaaccatggagaaaccatcatcaccacctcaaccaacccatttctttcactcaccaccaccagcctccaccacaccaccacctcaacctatttttcatatccaaaacataccataaaactaaaaacaaaatcaacctatttttcaaaccacctccacctcatttttttcctccctattcttctttgtaaatatgccttttaagttgggaataatgacaaatttttcaaaggctgcaaattaagataggagttgtggtggagaaaactcctcgtatatacatttttgacgttatttactttcctacgcgatagaaagtaaacacaataaaatcgtgtccctattaatttattatctctaatcaattctctttttatttttttaaaattgaatttgtctttaatcaattattatctctctctctcttttttttttcttaaaaaaaactaccatcatcgttgaattattattatttataaaactaccatcattaccattagtatcccaaaagaaaataaataaatattgtgaaataaaataaatacataaataaatgactcaaaaaaagaaaaagaaaaagaaaaagaaaaaataaagaaagaaagaagaagaaaaaaatctaacacatgtggattgactagtctaatacgtttgcttttctctgcgtacgaaactttccttcaccgttattttttgggttcatataaaaaattaaaatttccaactttgtttggcagacgagaaaatcttttctccccttttgccccccctactttcactgggatcttttcattattttcctcggccctctgcaaattgttctatatttcacattcggtaagtgtttttgttttgttttgtttttagctgagtttgatttccatcaccagcttagaagtattaattatggtatattgtactttgccatgtctttttgggaatttcgtttatcttccctctttgcttggcacaaattacttattgtgatttttggcaagttttggcaagttttggtttctagctccggttttgatttgtatgcgtacggttttgttggagagtaattttggtttctagctccggttttgatttgtactgcttggttactgatgaaggcaggtgctgttaatttcttcggcttgagttggttttgtattattctgtaaataatgggctactttaattgtattcgtgtgcacaatcttggtgcaggggaatgatttttaaagcttacgatgcaattaaatttagtttctctctttctttattatagaaacgtttcttgcaaacattgtataaattacatttggggttttgtttgatttaggggctgaggtgttggattcattgcaagctgtaaagatttggtttggtagaaaatattaattctgctaaacctttatcctgatgggttctactgaagcagtgttgcaagttttttctggaacagtaccttgtcatttttttactgactcgtgtttaagcaaatttgatcccattacttcttctaaacaccacataaactggataaagaaaagagtgtcaaggaatatgcagtcactggcttgttcaactatgcttcatagcgggcttcgaacttatccctttcatgggatagggagtggttcatatggaaatatgacaatgcttcgtcgctcttggcttcagagttgcaagtgtcaacagtcagaaagtgttagcgggctaagtgccgaagatataaatggagggtggtttgtagatagtgcaaagaaattggatacaatcaatggtgcggtgaatggaccgaatgtgttggagtttcaggatattcaacaactgaaacaggaagaggaggctttgaagtctaatggtgctaatgggacagttagagatggcttacataagacctctgttgattccattgaggatgaagcatgggatttgctacgagattctgtggttaattattgtagcagtcctattggaaccattgctgccaatgatccgaccagctccaatgtgttgaattatgatcaggtcttcattcgtgacttcataccttctgggatagctttcttattgaagggggagtatgatattgttcgaaactttatcctgcatacacttcaattgcaggtattttcacaatttagcatgcctttcttttttgttctttctgtaaatcatttatgaagcattcgctgtctggttaaattcatgcacttatttgttgtcctcaatagtaaggtgatgaattcattattctttgtctagttttgacattattgaagcatcgaatcatctaagttgaatttttttgttgccgacggatgaatatctttatgtgaatttttaaccctataagtctatgcaaatataatatttaacagtgctccacgcaccctagctatctggttgcagggttgccttaatgtcttcataaatccataggaagattggtttaatactatacatattgcagagctgggagaaaacaatggattgtcacagtcctggtcaaggtttgatgcctgctagttttaaggttcgcacagtgccgctggaaggtgatgaatcagcaacagaagaggtacttgatccagactttggggaggcagcaattggccgtgtagcaccagttgattctggtaactaagtttacttgacattaatgacattctttgaatcaaaatacatgcttgcattagtatactgctatatttgtattcatcttatgaaattttcaggattatggtggattatattgctgcgtgcatatggaaaatgttctggtgatctttcggttcaggagagaattgatgttcagacgggaattaagatgatattaaagctatgtcttgctgatggttttgatatgttccctacattattggtgacagatggttcttgcatgatagatcggcgtatgggtatacatggacatcccttggaaatccaggtaaaaagtgtgtttgtgcttgtggttattttaattatcactcattattcaacaatcacgttctgtgttaatcacgaacaaatagaaatattaaatttagccatccagctattaaatgtggtgtggaaatggcggaattagattagacccatgtgtcaggactcataagcaggctgcaggggcatagcaagcacaaatttaaagttaggtaaaaaacaattataactaaatattgtgggtgccaaaatgaaaataaatattattttacctataaatctagaacaaaaaaaatatattaaggggggaagggttgtccacagtcatcacttgctccttcttggctccgccactggtcatgagggttaattttggaacctttgatgaaataatttcagagacgaggatcaaaagagttaaatttattggagttgcttcatctttccacgatcattttcacagaaaaatcactttaaaccctttttcagtgcagtacagcgaccagaaagtgaactctgatgttttaaacttctgtttgttaacacaatttactgggattgaaatgctgcttatattttgctgagtgcagcacaggagaatatattttaggagtctaagtgattgtttttggtttttattgtttgttttcgcgggttcaagttatatttgattatttgtaaatttttacttgtgtcataactaggtgaaatttgtaattttattttttccatgttcctacaaacttacggcctgtgatttttctgatattgatttgagcaagttgatctttatgtgttagactggtggtgtcaggcttaatcatattttagtgctagacttgtttcctggaattctggtataatatatttataacttgaagtatatcttcatttttggtgctagttttctcttatcaatggcaccttaagtgggcagacatgaacttcggaaatattaatttacataaagttttgcaagggaaggtttttttcctttggttccatggcgtgcttgtgttgtgaacaatcgattaagtaaatgagcatcatcaatgggctacagattaagagttttctatctgatttgtttccaagagtttcaatacatgtatttgtagtccttggcttttgaaaaatcactatgacacaagtttatagtcctttgcttattgggagtaaaaacaaaacttttcttttactcggaaagaatctacttttcactataataggaaatcttttagtagttatccattagacaacagaatacactgtaactcagtagatttgaattaggttgttcaatttaccaaattcttgcaattttttttatttgacagaaaaacaagacttaattgtcatgtttatcatctatagaatgtgctcttttatgtttcattctcccattttcccagtatgattaatgtatcctgttttatattatttctggttctcgcaggcacttttctattcagcgttactgtgtgcacgtgagatgcttgctccagatgatggatcagctgatcttatccgagcactaaataatcgtttgatagctttgtcatttcacatcagagagtattactgggttgacttgaaaaaattgaatgaaatataccgttataaaactgaagaatactcttatgacgcagtcaataagttcaacatttacccagatcagatttctccttggttggtagagtggatgcccaacaaaggtggttacttaattggaaacttgcaaccagctcatatggatttccgattcttttctttaggaaacttgtggtccatagtatgcagtctttctacagtggagcagtcccatgccattttggatcttatagaagctaaatgggcagatttgatagctgacatgcctttgaagatttgttaccctgctttagaaggtatggagtggcagatcataacaggcagtgatcctaagaacacgtaatgtcctaaactcattatttccatattctcattttctttatatttcattaggctctcaatttcacagcttatttgtttctgatgcaggccttggtcctaccacaatggaggttcttggccaacactcctatggcaggttggtctcttttcaattttattagcatgtgttttgtttaggcagtctgcactggagttagctttctacggtcgttcgcataaatatattttagaccattattttctaggattgcaaaaattgactacaatactttttgaaacatttatggtgttcgaatgctaaattttcatccctgatgaacttgtagttttctgtctctgaattattgaatatccattggaacttcaatgttatgtgtatgacacactctatttgtctttcacagcttacagtcgcatgcataaagatgaatagacctgacattgctgcaaaagctgttgaaattgctgagaaacggttgtcacgagacaagtggccggaatattatgacaccaagagagcaaggttcgttggtaaacaagcacatctgtatcaaacttggtcaattgctggataccttgtttcgaaaatcttgcttgctgatcctagtaaagctaagatgttgataactgaagaggattctgaacttgttaatgctttctcttgcattcttacttcaaatccaaaaagaaaccgtagtcgaaagaattcaaagcagacctacataatttgagttctacaaccattcattgagactcgttaataggtagtcaagtggattgtcaatgtataagatagggggggtaagtattctctttacttattgtaagaggctgtctttcttcatatttatctagattgatatgctgctgataacattttatacaggcttattcttgtatacttgcaaacaacattgtattgtaaaggatctgaaattttatgatagcacttgttacaaaattaactcaggtgaataccaccactaaattttataccctatataaatatgaggaggatgtttcagaaatatgtacttgtgaaatttagtatcattttggggtttccattcattatgattttggtcataagagaacaggaatcattgcatgacttttcttcctcctttttacttgctagagcttttaagattctaccatgtttacttctgccttttaaatattgtttacaagtacaaatttataaatatatatatattttaaatttcatcaccagagaataatagaacctaaatatcctagctgtgcacacaaaaaaaaaaacttatttatgtaaaacacaaccataagcaaatagcttcctggcatttctggtccataattggagctaaaacttccaagtttcaactcaaacttgggtgttgatgcattggctaaattggtataggtgtaatgtgtttttttttactctaaggctgaactcattt

SEQ ID NO: 298559 - DNA, 4863 bp, Cannabis indica
aaaatcaaatgctgaagaatgttttacaaaatgcaacactaccaaactcagaagccgcaaaagcaagctgaaagggggttggtgttcggttatattaagacagggcttaaatgacattttttcggcctccaaacggctctatacagtatctctccctcctatccctgatggagatccttaaacctaaataattcataacccatcccatccctcttgatgctttttcccttttcctttcctttttttttctttttcgattttgtttcgatccactggcgaccggcttgggactgcattcacgagattcaattaacaaacaagaatagaagaccctgctgactgattctgtagaccaagttaggagccattcacagccatttccggcgaggatttgggggggtatcaatgcacactcatctccactcaactgcctattttcgggtgtggctgctacttgtaaaagctctgtacagtttttagaagaagctgcttcatccttctctcggtggttctcatcaggttcaatgctgttgttatcaggacagtctctggaaacaccatgctcattctgttgatgatgatttacttcacctgaacacttgttatcctcatcagctgtgtgagaagatacaggaactgtgcttgcagctttattgcagggtagcactgcctggcttagtgtcgtacacaaagcagcaaatacactgtcttttggtttcgagtttttacctaatcgatgtttctttccttgctcaagttctttgtcctttaagggcaatttccgcttcaaccttaaggggtctattattgttccttcatcttcatcattctcaggttgtttccttggtggtggtttgtagtcttcatcatcctcatcatcagcataatcaaccagacccacagagttgggactacaaaagtagaaaacaatgcacaaagtttatagcagagttattattaaaaaaacatagggaaaaaaaactgttacttatttcctttttaggataaaatataaaataccttgaaggggtgtaggttgaagcaactccatttgctataacaggttgagatactccttttttgttgttatttggcattgatgctgatgcagtgtcctcttcatcactatttacacacaaggacagtaatcagctcagttctctaagttgcaaaactaaaatcttgtaatttcaaactgaaacaatatttaatttatacctgtcctcattgaaatattcttcctcttctttctccaaagcacgctcatcaattctctttctgggctccgccactgtaacagtgcttctggctccacatgtctctagacactgcagaaacacaagtcagtccaagcactactaaacctactattaggataagttcagcaaggagagaatacctgctcatatttcacttttagagattgtatggacgccaaatactcgaatttttccaattcattccagaatgaatcaactatatatttaagcaatgatttcatgttctcctgcatgcaacagaaaatgtaaatactaaatagactgactgcacacatttaaaaaaagttaaaaagaaagggcataagataggcaccttccgtataaactcaaaaaggtcaagaatggcagagttgagcaagttatatcgattgccgttgcgaacaaaagcatctacaattggcttaaaaaggttatttttggcgaagtgatttatcagatgctcatcctgcaagtttatatattcttttaatacattagacaacttgcagaaacaacacgagaatcatttatgtttaaacaataaaaatcatggtgaaaatttttccactcacccaacgggtaagagtagaacgaataaatcgaacagctgcaacaactaaatatttttcccttcttcgagtcagaagcaaaactttatctatcatattacttaggagaaaattacacctgcagaaaacagatgtagaagcaaggggcacacgttaaatgccaatagcataaagttacatcaaaatgaatgcacagaaataaactaaatcattactttattctataaggatggtgaagaacacaaaaacatagcaattcacatatgttcgacaaaatttcaggcttcacgacattctgtctttcaactctttcaccagagcctgaagttttaccaattgactgagcaacaccatctgaaggacatgatgctgttatgacatcaattaactgacccaaatgcttctcatagaaaatttcaataatggtgtccctctgcaacacaacaataaagccaaaacactcagcacatcatacaagtacaaacacctagaagaaacagaaaaacaagaattctatcttacatgactgacaagttttccaacaattcagcagaaacataataaactacaaatcaacattaaaaaagtcacctgcatatataaaaaaaatattgcaaacccaaaatgcagaatcatcacataaaaaaagcataagttttctgtcaatgaacaattgacttactttatagcgaaaaaaagtaatgtaataaatttatacatgtatatatagatatacccatgctaatctgtcacattcaatgatataatacaattctcagcaaaaaagattgatataatacaattagtgaacttaaagttccattggggacagcaaataattttacagacatcatcacaagttcttgaatgaagaataaacttcatgacctattcaaagcaaactattctgtacgtatacagagtgaaagagcaagacaggtacctgagttcctgataatgtaaatgaatctagaagactgcgaagaatttcaagaaattggcagtgcatatcatccccaaaatctgttagcattcctttcacctgtaagtaaatgacaagtaacaagttaacattgtttcaagttatatgcttccctgttctaaacgcacaggcaattacacactataattattaagatcagtaaatcaaaacatccaggcaatgtttactagtccattgtaaaagaaatcctaacgaggagcattcaccaaaacctatttcctaaatgtgtatttacatcaaagaaaaatattccattatttccgctacaatcccgcgtgtaagtaatgagctaaggttgataggattaccaacgctgttttgataatccagggagttcaagggactctccaatacatgagcactgtttttttttaaaaaaaaaataaagcctaacttatcagctccaatccaaaccaagcctctatatccccaattgcccccaccaccacagatttctcgcacttgcctacgctgacgttgattagaaaattctccaccagtagtaaatactttacccccactaccctctaacagatgtctcacacttaccaaagctgaccattattagaatattctctaccagttgctaactactcaaggctaaggtgccagtaatcccttgctgcttcttgtggatccttctaacataagtaaacaatattggtgcttaccatacttccattccatttctttaacagcctaatgtaaagggatgagaaaggaaaacatttccctttatttcaattcccttaaaaaatcccattacagattagtaactgtggctttatattcatgcctaaattttaaactaatgtgtctaagatttgtgtgcaaccaataatgacagcatgctacatgaaaaagttgtctgaactctgaagatatgagctcaataataatgatgacatcccacatgaatgaaagacggacctataatttttttattttagatgtccaaatgaacattcaaaacaaaatttggatatataggttaattgtataatacaaataactaaacattataaatcccaaaaatctcataagttcaaatctattcacttttgtcagggttgttcataaaaacataaaagtaaaaagaaagttggcccgaaaaaattccatgacaatttaaatgtgaaacttaccattcatatctcaaaacgtaatttattatttctttcagttttaagacccccatttttcaaacacgtataaataacaaattagaaaaagttgcatgacttctgccaaggattcacaaatcaaacatagaagttttgatgcatccgtgatcttgtaagcaatagcatacttctgaaaccttaataaagtgcttaccagaagtcctaaaagaggaattccttctggccgaataacaaaagaacgcagaaggtttggatcctggtttaagaaaagaatgaggatatctgtcctgcatcaaccataatttctttttgtaagaactactgaatgaaaaaggcaaaagccttgaatgcaaatcatgaccattagttatgtgcaggctgtttattacagaaaggtcaatccttaaatagtcaccattacccagttaatacaagctttttgtcttgactctgcagagcatcggtcatgatgtcaaaaatgccttcattcacaagatccctgcagatatttatttccgaaatcttcattagaaaaaaaggtccaaagataggtaaaagaaaaacctgaatatcttcacaacatcaatattctactttcgctgggacaaaagtaagagcaaaagtcaatctacaaatttaacattagtcactttcaccatcagctcatacctatatagacgaagttgttgtaccatctgcaggctcttgcttagacaacagaactcatgcacaaagtacacctaaatttcaacaccaacaaaaggagaagcagtacagtgattttcatatcctgaactagttaaaagaaagacgtttacaaaaaaaaaacaatgattaccaaattctttttagattcttctgaggtggtgggtgacctgatcctggca

SEQ ID NO: 298560 - DNA, 2911 bp, Cannabis indica
aaaaaaagaaaattgtgcattaatcaaaagagtacataagatttggggtcaagtatctgtctaaattttaacccttcaaggactagtaatagattttgctagtgggtgggctacacctttgcgtttttttttttttttgaaagaaaatagtttgtgcatagataaaaagttagacttcgcggttattacacaaaatgtttaccaagatagaaaatacagataatgtagttaggttagcaagagaaatgaaatgagatcccttcaaatattacaagatattatataacaacataaactatacaataaacattaaataactacggagtttataacaattatttatatgtataatacaaatatataaatttaaaattaaaagagtaatatgctatgcatacttaaattacatttttttttacatacataagtaatatgtctagcacattatttctcagcgtcatattattattcatataattaagtattgggtttcatataacttaaagtaataatttttaaaaaatatcactaactaattgtagagtaccacttttaggtggtgctagacaccattagtgtccaataataatgctcttttgtttaaggaactaaatgttaaaatgctctttgtaactaagctacactcctttcctttggttgaaggttattaattaacaaagagaaaatgaaaattaacaaaccaaaacaataagatagtaatatgaaagaatgattttttattttttattttttatctctaaattattataattaatttggtgtgctcctgtgtaacttattatttaaattttgttttgcgtatcataaattatccataatttttcaaaaactggaaaattttaaatttataactaactatactatacatcacataaaaagtgaaaaatcataatttttctcagtgccaaaaatataaaaaacaatcttaaaatatataaaaaaacactcaagcaacatacataatccaaaaatctaatcatgttactaaaagtgttgtaatgtaaaaaatcttaattcatttatataacttctgttaaattaaagaagaaaaaaaaaacatgagagtggatcgatggtgattgctcgaaaagttttaattttttaagaacacacttttttcttatatatttctttgatgaaaaaagaaaatacaaaaatcctaatattttttaaaaatcactacttatttataaaattaataataatttagtttgtcattatattataaattaacttataatatctacacattatttccttgccaatcaaacactctttaatagttataacatagctacttaatgagcactgctactgggcatcagtggtgcctaacacctctaaatatatcgcattgcgattggctagttatacttcctaaaaattattatattaaagtatgtatatagaacccaatacttatttaaaccgatattaacacataacaatgtgctaatcaccactaattcattttatcttttctcttaattttgtatcacaatagcattatcctttacgcacatatatgcgcccatatatagaattttaatccaacaaacaacactctataataatagcaattttgcaccaaagaatctccctactattattattacacatgaatgatgatacaattttacactccaatattatttatatttatattgtgtgtgttattgtgacttttttctttaatgatatctatatataaatgataagatcttacttaaaaaaaatattggagagattaaaaatcaagcttagttattagttatgaatttaagtataacttaacttataattatatccattctcctttattactataattattaattatttcttctctcttgaaaaacgaagttagagaacattaactagtttgtttgtgttacgacatgaaatagctagctatgcttgaattaattaattaattagaagattaatgaatattgatgggttgcctagcctattttaaagttaatgcacttgacaattttgacaatttattggattattgacctttaacttgctctaagcctctttttcaaggaattttttcaatgttttgttaattgtctctacatatttcgattaattagcttacagatgagcaacaaaagaaaatcttcaatgtatatcgttgagaatggaaggcgcttattccattctagtatattatcacatgactatccaaatactcgagtaggtaactaattaataatactcattgcgacctaactagctaggtttccaaaactcacttccaaggttttggttagtaatatgcgtaggttaggtttcatctcaaaactaaattaacaatgaaataaataattcataaattttatattctattatctttctatacattagcaatatgagactctctaacaatttttatatccaaataaatagatcctgaatttcattaggagaatggttactagggcctcataacatgggaaattggtgtgtagtgctccataatattttatattcctcattggagatgggttgaggtgttagaatgtagcttaatattgtattaagtttcaacacattatcaatgtgagattctctaacacgagaaattttacaagaacccatttatatagaattagtagagaattttctccccaaaattgtttcattgtagaactttgccttgttacttttttgttttttgaaaatatcgctcgaatttaaaaacctttacaaatatgccccttctagcattatgttcattttttaaatcatttgttgttgtagccacgacccacatgtaatgtataaatgcagtaagaggcagggccgaccctgaaacaaagtgggccataaggaaaaaaaaaatttgggcccttatgttaaaaaaaatatggtatttctc

SEQ ID NO: 298561 - DNA, 3949 bp, Cannabis indica
aagaaaaaagttaaaaaaaattagtacaattaaaaatataaattttatataaaataaaaattatcaaaatagggtgcctttagaactttttggggtgtaaataaaatttcccattgtataattaaataatatttagctatttagttttattagataaaacattattaattagttaaatataatattattctaaatatattaaagagaggaatatattattttagaaaaaataacatttattttaatccttatgaaataagagattaatgagaattaatcaattattatttactagatgaataattaataaatcttattcatggtaaaattgaaaaattaattttggaccttaataatatgacacacacatgtaaagtgacatataaagacccatgttaattttgtttgattatattattagtttaaataatttaaattaaattaattaattatcttttaattattaaattaaatatattattagataatttatttaattaaatagataataataaaataaaagatttaactaatttctgttaattaattatgagatatttatatttaggtttcaattatgaatttaaatcaaattaagtattttttttaaggagcagtgattcctaactttagaagtgaagtaatagtagcattatcctagttcgtctaaggttgcttcaaaagtgatgaaatagaagcaaaattactttttcatagtatcaagtggacaactcaacaacacattctgatatcacgaattaaaacaaatgcactaagagttttctcgattttgtcctctccactttcagatttatcttgtttttagatttaatctttggtgtgcattgtcttttatccttttctctagagttactgtcactcttgtcgtaggtatgctaattaaattgctcgcagattagcaaagtacaccctaaagttaaatgaagatgttttttgaatgagagatatttcatcttttgtttttttttattgtaaatgacattctttttataaatatattataaatgacatttgatttataataatagtaaaaaatttctcaaaaaaaaagatgtccccacatacgggtaagagcaagagtaatacacataatataattatcttctatatatttagaaccacctgaggttagctcaagtggccatagtgtgttgaaggtcctgggttcgagtcccaaattatgcatgattgtaatatataagcgcttaaataaaaaaaaaaatcttctatatatttatataaaatcacataaataataaaatatggtggtggagaaattttagaatttattaatttcttatcattgtaattgtagtttaacagatatcatatttgatacctctattacttttttttagagtaatagtttcttatgtatggtgaactgctatactgccactcataatttgctaaatatattttagagttagatgtagattatgtttggtttggaagaattttcttccatgacaaaattgatggagttccttcttaaaagtaattagtgatgagtaaaatagtctatattcttatataagtcaatatttttacattgaatttgtgataatattgtttaatatcgatccccttacgatgatgattatttttttactcactaatttcgaatcacatcttaccacaagttgtgttatttgctcatttatttgttcggatctcgaatatcttttgtgctatgcaaatcttgtgtgactggctttattaattatctgaataggtatggatcgaaagtccgttaaaaaatatgattctaatgttattactaaaattatggaattctatatcaaaattaattggtgataagtgaaataacacatattcttatatatagctcaatatttatacatttagttcatatatgacaatattatccaatacttctcatatttattgttactgtaaatggctgcttataatcaatgacagacccagaatttttacttcgtgggggcttatttatcattaaaaaatatttatacttatattataatcactcttactagatttatttaattttgtgggggattttctgctattttagtctataattatcaaattaaaaaaaaaatacagttaatgttttaaaaggcaatatttttattagtgggggctatagcccccatatcaacactactaggtccgtccctgcttataatgtatgatagagtaaatactattttggatcctgtattttgcgaaagttatcaattggaccatttattttgttaaatgacaaaatagaccttaaattttctaaaatagtaaaaataagactctgagctcaatttttaataattttattttttaatataaacaactttaagacaatttctaagatgaacatatataaaaaatataatcaattttgtcataacattttctgatcagattatttttaagttttattttaacaaaaaatcagcttaggatcttttttgtacaattttaaaaaatacagggtctattattatcatttaacaaaatagaagattctaactagcttttacaaaatacagagtctaaaataatatctaaaattatatttactaagaaatttcttaataaaaattaaaatataaataaaatagcgcaaataataagggaaggaaaatatgtcacaatagagccgcccacccacaaactattaatattcaattcattgattacatatcactaacattgtgtaagtgttagtgttcggtaaaaaataaagtgtagtacataatatgaattatttacataaagatttttaaatggcctggagaatactagaaaaagaatgatacaaaaagaaaaaaaaaaaaaaacttttaaaaaaagagcttctagagaaagatagtatatacatataatagttttggtcaaaatacttctaatataaaactaatttgaaagaagactaagttttacagtactaaaaaaaagtttagatgactgttttaaatatacagctaataaattattatcgtcaatttataaatccgatgcttatgccaccaacacaaaacaggtagaataggcatagattgcagatattcaataataagcatttttgactgtttgtaactgatgacaaaatggaagagtataggtgaccgttctacatagtcgctaaggccttttcttgtcaattcctgatggtcgtttataagtgtttaactgaaaccgatgcttatcacatttaatagtgttgattaatccaatttaacactctgatgtatgatggggaaaatgtaattctttttattattttctccttaatttttagacttttacagaataatttcatatattttcagccacagtaatatctctaaaaaaaaaaagggcttgttttatcatgatttatttactatcatatgtttgattataaatataatctaacattttaaaatatgaaataataaaatgaaaaataaacacatataaagctttagatttcttacattgattgcagcgaaaattagtgactcattccgaaaccatttattctctttctatatcaggtattgtaaagggatgaacctaaatattttccttaaactgataagcaaaaaatctttacaacctgctacaaatatttgagtactactttaaatagtgtgggttagtacttaatcagattcggcaaccatgaaattgagaggagaatgtactagtgtatttaaaaaacttataagagagagaaagggagagccttttcttgttatttttagtctagaatcacttagaatatgtttttttttttgacaaaactctcatctttttccttatataatcacacactagggtaagctttagaagagatggactaaagtaaaagacattggtctcaatattcctatggggtaagttgaaaaatacccattttattaatcaattaattaaatttatctctaattttatattt

SEQ ID NO: 298562 - DNA, 7498 bp, Cannabis indica
cccaacaaaggcctcacagactggacaatcatgtcctgtatatttctaatttgatacactcagttattataatgttaaaatatgctgtgtttaacaccgattcgtctcgtcgatatttccttagtgtgtagtgagggtggatcgtctcgctatacattgctcatggttaattcaaataactttacttaaaagcgaatcttgttctcgagactgtgtatctcagataggatagtgtctagtgaatacagataataacagtatatgaatactctgtctagcctaagactatgcactaagacgatgttatgaatatactttattaattctatatttaatgagttgtaccttttgtattaaatgatataattgttattatatctagtggttcatattctacttgattgacacgtgtcaccctctgaagtgcagccaaattttaggtataacagaagttacctggttacttgtacatgttgcaacaaaagaatccaggtaccattgttgacattgtgacaaaggatgacttgttcaagtaatgtttttggtcattggatgcttgtagaagggggtataggttttgttgtcctgtgataagtgttgaagacccattcttgaagacagaatatggtggcacaatgttaattattgtggcgtacaatgtacacaaccaactgctttttatttcttttagaatttttgatagtgagaatcacgactcttagacgtatttcttatagaagttgagggaagcgattggagaggttgaaaatgtagtgttcgtattagataggcatcaaatcattgaacatgttatcgaggttgttttccccaatacatgcactatcaccatgttattatgaatgtgaatgccaagttcaagactaatgcatggcacaagcaaatatgaggtgtagcttactcatagtcgaagacagaatgagataagacattttgataagcttagaaagatagattttgtcatttctgcatatggttagagtatagggtttgaaaagtggactcgtccttattgtccaggtgatcagtacaacataatgacaaacaacgctactgaaagcctcaacaatgtgacaaaagaattcaataaatattcaataactattttggttgaattcttcaagttcaaattgtagagttggttcactgagcatcttttaaaggtagagtagtgcacaacccctttagaaactacttttaaggataatttggtagcataacataaggatgctagtttcttgaacgtccaatgtaatggtatcaattaattaacattggtaggggtcctaatcgtgaaagatgtggcaatgtcaacttagttgagagaacatgtacatgtggaatttatcaattgctcaaaatcccttgtccccatgcatgcgctgtaacaatgagtcagaatgtgaatgtgtacacacttagctcctcgtattatatgaaagatacatgaaggaagactcacgatgaaataattaatcttgttagcaacaaggataattgggtactcccaaaacacatcaagaacatgagatttgaggtaccaatcgagaagaaactcataggtcgcccaggaagagaaatgtgggaagacaaaagtcgaatcgaccacaacagagtttcatacaaaacccaagtttgaagcttttatattcattagtatcttcattgtttgcattagttgtatattttctgaacttaattttctcttgtatttattagtgtattcatagattttttattattggttttgttgttttttcctcattatactaattttctaggttttttactctcttttcagactttttacgatgattaacgatatttctcaatgtagagtgatgagtttagcgatacatgttttgttagattttataaaactaaatttttatcaatttaacaatgtttctcaatgtatggcgatgaatttagtgatgtttgttctatttgaatttttcacatgattttctttatttttaataaatcttagcaattaaaatatcaacatgtagcagtgacatgcttcttaaaattagttatataattgaaatacttattaacaactgcctgaaattcatatctcgatattttacgatgttacgtgcgttatgtagcgatgtgttagtatacaaaatagatacagctcaatttgaccattttcacaacatttaacgatgcaacaattgatatgttgcaatttgttctttatttgaattttttaaatgactttcatcattttaacaacttttagcgattaatatatcaacatgtagtgatgtaatacttcttaaaattaattatacgattgaaatatttttaacaacgtttattaattcgtatattaatgtttagcgacatgtatgctctaataatttttaaaaataattccatgagctttaacaacattttgaaataatattaatgatgttttactatttaattagcaatgtatattagtgtacttcaaaaaaatatcaaaaaataactacaccaaagtctaattttttttacaaataactaaatcaagcctattactactcaaactaccaatttaagttctggtaaaagaggttcacaacccatcgatgtttaaacacttgcatgttatcatcaataatcttctccaaagatcatttcatcatcaggtgctcgatgttcccttggcattcatttccagtctatcgttttaatttagtttctatctcctaatgcagtaagtttggtaagagctccatcaatgttttcaaagcaatacccaaaatgttatcgatgtcacaagacatatcattatcatacaccacaatcttccacccttcgatgtccacctcgacatccacacaatgctattgaatctcaaggtgtagggtgaagtaaagaaagttgtggtccttccaacatggcaggagccactcatccatacccctgtagtagtctgagaccatatctagccatgtaaagttcttcctatcacccttgtgggccctttaaacaccaacaaagattgtggagctgaagtgtctggaatcacacctggctgagggtacgagttaggaaagagttgtcatttcttcctcatcaagttgaaacaggcttcaatatgcttcataaaattgaaaaaacccaacaattaataattatgatacattgtcagagtaaattcaagtacttgtgctatcctctacccattcctgtagtagcatcaccttcataaaccaggaatcattaggggtgctggtgtggacattactaggacaattgttcgagatggccccaatgtaaagtgaatagaaatataacattgaccgatctcaatagaactatgtccattagaagaagttacatctttttcttatactctctgtattccttcaaataggttaacttcttcctcttcctcttctgtaagtttgactttgatttaacttagataaacaatatgcctctctcagttgtttaattcatttgcattttttcttcaacgtgtgagcttaatggtgaagacgaggtgctccatagtcacccagctagcttatgagcttgagttactaaggggcagagcataccaatgcataatagaggagagaggaggctaccaaagcttaagctcacgccaacaccaggatggaggccatcattaaatagagggtgactgactctttggataaagctatagtacgcaaaaagaagctaccaagactgggagagagtgcaaagataaatataaggatatacaatccaatacccttcttcaaataaaggagctagaagaaaacttgaagcaagcgaagctagatgtccaatagaaagaatagaaactcaccaccctatctcaagagtatgataaacaatttggaatcataaatgataagattattaatgaaaccactctagagagaaaggtaaagcatcatatggagttgtagcagaaggtagaggaagttgagaaacaggctatccgaagggttgaggagactgcagctaagttgagttcttccaagaaagctcatgaagagtcccaaaagaagattaccgagctggaaggagaaaattcaagactgaaggagaaccttcaacaagtaatccaggagaagcaagagtaggaggccaagaccacaaaagctttggaataggcttttgtgaattcagtacatactatttgatagcataacaagtctgtgatggacctcttggatgctgaagatataaattttcttatgcctaagatccttgcagtggaggaaatgaataaggctaaggaatcaactcagaatacggaagtggtcgatcctagaactacccttcctgtgggtgaaaacttggatgactccactcttttggcttttgatgttcctttcgcaaccaattctacgatctcagagatcttgcctgatgttcaacctgaaggtactaaactgctaaaggattcaacccagtcgtagctgcatctatccactcttatcttgctttaacaacttcatatatatttttttgtcttttgggggataaaggtcacccattttgtgtgtgcggagacaatactttatatccttgttgcagggttttgaagtatgtagtacaatttgattaactctttagatatctgcattttaatccacagagtttgctaagttttaatgcttctaacctcgtgaggttctagttccaaaggcctaaacctttggatttttaattaaacgcttagaattaaatatttttctcgttaacaattcatctgtactccttagaatatggctccaatggcctaaaccttggtatcaacttgttttgaaaaaatattcaaaattgttttcacttaaaggatttttgaaacttaaataaccaattaacttgagttaattaattaatttagaattaaaccttccttggtaagtattatttgctttcaggtgtttctgaacttaaatatttaattaacctgaataaattaatttatttaagtagcctgaatatttttgttgtgttaacctaagttaatcatgaagcctaaacttctattttaagttaacctgaattaattgcataacacattaaattgattccaagtataataaggtggtggcttacttctggtttcttgagattctagtttcgagcgatactccctactcttatacttggttaaattctagattaacttcaaatataataaggtagtggcttacatctggttccttgaggttccaattttcaggtgatactccctactattatacttgtcgtttaatttagttgtatcttgtgaaagaggtataactttataatgatataatttatgctactccccaagtgattaaaagatgagacttttgatcacttgttacatgatagaactttgaaagactagatatgaaatgaaaacttccttttttaattcagatacttcctgccctaaggtgtacatagaaattaaacactaaaataaaagcaaaagaaaaaaaaaggaagttgaccacctccagtttactgatagtatcgaagcaagttgtcatcgttccatgctcttggattcttgttccatctagtctttttaaatagtaggttccatcaccaattttctctataacttcatacggaccttccgagtttggtcccaagacccctactacgagctcctgagaggcaggaaatacccttctcaaaataaggtcatcgatttcaattcttctgtttttgactttagaattgaaatttcaagcagttttgttttggtacatctggagttggacctttgactgctcttgaagctcctcaattaaatccaaggactcctgaagtagagcatagtttcgagttgggtcgtaggtgtctctcctgtgtgtaggtacggtggattcaactgggattacttccttgcatccataggtcatggagtatggagtgtggcctataaaagttctttcagtggtactgtaggcccaaagaactcttggaagtttttctggatagtgtgctttgcaagcctgaagcttctttttcaaggtagtcttcagaattttattaacgacttccacttgtctgtttgcttggggtctagccacaactaaaaagcttttgattattccatgcttggtacaaaatttagtgaattgatcactttcaaactgctttccgttatcagacactatcttgtgtggaagtccacatctacacatgatatttttaattacgaagtctagggccttcttggaagttactaggttcatgggttaagcttccacccatttagtaaagtagtcaacagcaaaaaatggcaaatttgactcctccatttccagttggaagtgatcccactaagtatattccccaaacagcgaagggcccagtactattcatgagggttatctctattggtggggctcttgggacttttgagtaatgctagcattgttcacatttacggacgtactcagtgcaatccttcttaatggtaggccaaaaataaccttgacgaatgattttcttggaaagattagatccagatgtgtgatctttgcaaaatcattcatgtatttcatgcatgacaacacttatctcagttctagctatgcaccttaggtatgaaattaataatcctcttctatataacttcctatccataatcatgcatctggggacctaatactggatcttccatgaagcagctctattatctaggagtgcacttgtttccagatacctaaatattagagccatcaagcaggttgagtgatcaatggtggacacccccaatgtttccgtgcttagagcgatcacaagtgcaatgaggactagtctatatttcactatttctatatcagtctctaatttttccaacatgtctacaaaagcattcttatccctggggatctacttcacagaatagtgcttaaaatgttgcaatagctccctgggttttactacgtaactagccattttttctctttttgcctggtactccccaaacatttggttgacagctagttgtgaatcgttatagagttcaatgtttttcggtgcaaacctcttttgccagttgtaaaccagcaatcatagcctcgtgctcagtttcattgttggaagctccaaattcaaaatgaactgcactttggagctggagttgttgatgagagattaaaatgattccggccccaaaaacctttttcatttgatgctccgtctacatatattttctagacttctctctccgggattaacatttcaagatcatcatttatccctgtgcactccacaatgaagttagctaaatcttgacctttaattgaaactatgggatgaaattgtatatcgaattggcccaattccattaccaacttcaggagtcttcctgacgactctagtttctgaaatacttgacggagagggtggcttgttagtacccttatggcgtgagcttgaaagtatggtcttaactttgtgaagcaattagtaagcaaaaagaaagcttctcgatcataggata

SEQ ID NO: 298563 - DNA, 3675 bp, Cannabis indica
agaaagttcatatttagggtgataataaacatacttgtgagtagatctaagatcctggtaaaataatttccaacataactttcatgggaaggatcgtgagttgtgaccagtaagagtgaattgccattacccttgaggatggttccacaactagaggcacttcttcaatcctgccccatttccttgatttctatattcgaccttttgccactcaaggagaggatcaaattgttatctctaacatcttgactggcatcttcagtctcctttcccctatccaatctttagccttggccagcccattcaccacggatgaaattaagacaaccctgttcaacctttttggggataaagcccctggttttgatggtttaaatgcccatttctaccaaaaaaattggcataccataggacaggatctttgcatagccatcctcgatgtcctcaataatcactctgacatctccccagtcaatgaaacaatcttggtgttaattcctaagaagaagaactccaccactctttgcaatttcatacctattagcctatgctccaccgtgtataagattatatccaaggttttagccaacatggtgaaaactgttcttgactccataatctcttgtaattaaagtgcttttctctctgataggcttatctttgataatatcttcatttccaatgagcttattaatgccatacactataggaaaaagaggcaaatagggttgggctgctcttaaacttgacatggagaaggcttttgataaagttaaatggagctttgtcaatgccatccttactcatgttggttttcccccaacctttatctccctggtaatgagatgcctctcctcggttgtgtatcacatctctattaatggcaccctttttgagagcattactcctaccaggggtatcaggcaaggtgatcccctctcacccttcatcttcttgttagtggcagagggtctctctgcttccatttgtgtcaaggagcatggcaatcactttgttgggctcaagatttgtagaaatgctcctatgatctctcacctcctatttgctgatgacaacatcttattcacccctgtcactaaaagttccaacattcccatcaaggaaatcctgagctcttatcaaaaggcaactgggcaaaccgtgaacgtagccaaatctaccgtaatgttctaccctaatactaccaatgtttctaaggattttttcaggaactcccttagtctagattgtgagggattcattagtaagtatcttggtgtacctcactgcactagtagaatgaacaactcccatttccattatattgttcagaaagtttcctctaaaatgaatatctggaatgggaaatttttttcaagggcttttaaggaaactcttatcaaggtcgtggtccagactataccatcgtttgctatgtcttgcttcaaactccccaaaaccacttgtcacaccctgcataaacttattgctaggttctggtggggttcttacagtaacaaaagcaagatacactggaaaaactggttcatcctttgcacttctaaattttatggaggcctaggcttcagatcccttacgaatcacaaccaagccttaattgccaagcaagcttggagaatatgggccaacccttcctccttgcttcacactctccttaaagctagatacttaaaaaaataatgattttcttaatgcccctaaaggtcattgtgcttcaaatacctggagaagtctcttatgggggagggagctcctatagaaaggccttgtttgaaaagtgggaactggcaggtccactccttgaccgaccctaactgggtcccaggtttgcactcggtatctttcttgcataactttaatcatcctgatcacaatgtcttgttttcattgataatgatagttgctggaatttctctaaacttcaccaatttttgcctccatatcaggtccaagagattctcaagatccccattgacccttcctcaaatgataccctaatttggaagcatcatccctctggaaatttcactgtcaattatgcctaccatttagccaactccagccccacattaacattaccatcttcatccaatactgactgctttaaacactggtggataaccgtttggaacaccaaaaccctcccaaaaataaaacacttcacctagaaagctttctaccacattcttccttgtagtctgaaccttttccataagaaatctcttgctagcctctactgcccatttttaaacaacaatgtagagtcgattacccatgcccttctccactgtcccagggctagtctgtgtggaaacattcttctctcaaagccttttatctttcaaattttaattgtgatattaaaaaaatttatccaagaggcttagattaccttaataatgatactttcactctatttattagcttaatttggttgatttggaacaggagaaacaatgctctctttaaccgaactactaacaatcccattgaggtggaagaatttgtttgttcattattgtagaattatcaagaagtccaaactctcacaaccccacctcagccctttggaatacattgcatcggatcaggccccaacttcacaaaatgaaccagcatctcattctctcaaacatggtcaattactgttgatgctgcccttgatttagtgtagcttagaacaggtctgggggcttcaattcgaaacagccagaaccacccaattacaagtttttctctctcaaaatggggtgcctctacacccctttttgctgaagctcaagcccttttggagggccttcattggtgtactgcaatcaagcttcctcttgtatatattgaatcaaattgtttacagttgatctcaaaggttaagagctcttagaaggacaacttagctttgcccagtgttattgagttaatttagaaatccttatctccattccctaattcttctcttcaccacatctcaaggaataataactgtgatgcccatcaaaatgctagggaagctttaaggcaggataaggattgggtttggaggatttagctttcccttcctacttttgtaacggtttcgtggtttctttgatttttctctcttttgttacagttacttcaaaaaaaaaaaagctaactttatcaaaataaaattctagtacatctaattcatttatatatttaatatttagcatattcaattaaactaacaaatatacctttaattcaaattaaaatactcacaaatatataaacataaatctgtaaaaaaaaataactttaaaaattcatgaatatataaataaacaaatatataaaaatataatttataaagtaataaataaataaaatatttacaaattaataaataaacaaaatatataaatatctgtcgacaacgaatttctcgacggtcactcggtggtggtggctcagtggtgatccgtaacccaagacgcagtggtggtggctcagtaagggttttttagagattgttgggtcaaatggtcaaagaagaaaggagtgagagaagtggtggtggtcgtcattgccacatatgagagagagagagagagagagagagagagagagagagagagagagagagagagagtagagacgaacgtaagaagtagtagtagtagtaagtaagta

SEQ ID NO: 298564 - DNA, 832 bp, Cannabis indica
attctccaaacccttgtactgtgcatcgatcctttcatctccaagctctgaaaaattaagaaaaatcatatagaaattaaataatattagttagaataaccaaatttaataattatgagattttatctaaaactaattgaaagtgaatgtaatttattatgttgagatgttattattggtgtcatatatctagatgtaatatgtttttttttacctttagttgcagtcactgtcactgccgctgtcgctgctgtcaccactgcggttgcagtcccgacgcttcatcatcattttgtgactcctatctttcttctttcccttgcaaccattggcccccatcatcataccatgtgaaccgtaagattgatgctcagagtagccctggtggctttgaccatgagcatggcccgtattgccatgagcatggcctgtattgccatgagcagcgtgggtcatcatgtctatgccatgagacagggttgagcccataccatgagacattgttggacccatgccataagactggcctggggccggcttagtcatagagtgaccatactgctcagtcatcatgtgatggccctgttggtggccatacccttggccataggtggagtatgtgttgggtttgttcatggtgtggctaccagggtagtaaccctgaccgtgggaagcattgtggccctggccatgtccagtcatagaatgaccagagtagtaagatccagtactgtcgttgtgcttgttgtggccgtaacaattgtcaaggcacttttgctgacaagtctcattggttggcttgtagcattgcattgaggccatggtgatgatt

SEQ ID NO: 298565 - DNA, 4510 bp, Cannabis indica
tctctctctaccttctctgtttttcgaaaccctctaagtgatagagtagtgcccaaacacatcaagtaatacctcaatcatagtgaggaaggctgtgtagaaatcaaagtcaacaaagaaggacattcaggctcagatcttgattatactctgcggcagaaaggaatcaagggttagagatctgagtgggaggagacatattattccgctgcacccaatgtaaggtttctcatacttttatgtgtttaatttattatcgttttagaagttcatatttaggttgttaaatcaacatacttgtgagtagatctaagatccttgtaaaataattccaacactatcttcaggaagcagccaattataagagcttatctttagctttagccttggacctttttttttatctccacccatttcaaagccatctctcttccttgggagaaggacgtatccttctccatcatcttctccatcctcatccctatcttcactaccatccaaaatttcaatgggatggtgtgaagaaatgatagctaaaggattttctccctcttctccttgagcagccagagggcatacaatggaacttgaagtcagagcctcttggacagcttccaagagttctattggaagcattgtttttttagtaccagcattagaaaccttctagaaagcttccaagagtccctttaaaggtgtcattttcttcgttccaacatcagaagattgcatagtttttcttttgtcacaaccactcttggctaattcctttaccttatttgatctctcgtgaatggtaccaagaaacttgtttactagagccatttgaagtgtaagtagttcatctgaaaaaggaaataacaaaataacaagctcaaacatcaaataaggaagtattataataatatcggtaaatacaacatatgagttagatccagaccatttatcttagcataattggagttctccctagtaaactgggttatatcttctctgtctaagaagctttcatattggaagaacccaaggtataccattttattaagattatctacccatacctcatgtgttggtagaatgaaatagtttggacttataatgatgtcatctaccctatctaaatagtcattgatgggatatctatggtgatataaacgcaaaaaataagagtcgaacctgctttggtcaaaattatctaagtttccaaagatggagccctgatgacatggaatggcatcttactgctctcgaaagtacttgctcccagagtaccttcatctggataacaaccttgaagcggatagcaagctcctcgacttcacttagcttctcaagtattgacgattccaatctgctaaccacttttcatcgaacttaacagcgtttaaggcctcctctataataatgacagcaatggctattccttcacctcaccaggatcatcatggaaaagatccctaataggatccttcactatcatgctatcaatactctaatgaggaattatcaagccagcctcttgaagctttttagtaatcacaagttctccaacttgtaactcttctactgataaggaattgtagaaagcatatctgacttctatctccagagttaggaatgaaaaataaggaattatagaaagcatatcttgcttctatctccagagttaggtgatcaagaaagagaaactgtaaggaatgaaaaataagatcaaatcgaaagtaagaaaataaggaaaagagaaggccaaaccagcaataacacttacttgcaatactaaagtcgagactgagagttgggacacttttcagtaggaagccagaagtataaaactaatagtcccagatgtcatatgtatatttcacggaactaactagatacaccaagcccttggaatgcctttccaacctatagaaaccaaaattttcttgatgatttctcatattttgagctttgaccatatagaaatataagatctctttcgggattagaatagatttcttcttatggaagcacaaaacataccatccagtgagcaaacggtatactttgagaataaattggtaaggagccactccaactactgcgcaaaactctacaaagtagcatctcaaaggagggtcaactcccatttccacgtaaccctagctctaagcattgaagcatccttcagagcattgacttggtttctctcttaaaaagacaatctattccagaatagtcctggaatacattcaagtcctctttgcgtttcatatttttgaagattgtcataagttcagaacttatttttgtactggtccatctcccatagagattgattcaacataatttttgaggcaagaacttatttcacctcttcaacttcttcaacaattttcattgctctcctctaagctcttctaaacataatggaagctaaaaaaagaacattctaagtagttagttacctagaccaacaaagatattaagggcaaggagaaatccttcctcataattccttggaagaggtccccacttgatttactatccagaaacaaaatcttcaggcagcatttgttctaagtagaaaaatcaggatcacaagagtgagaaacaagaaggtccataggttatccaaaacaataaggatctcaaatataggaatagagattcttgctagcatttcagttgcaaattagaatttctcataacagtgtaataaaagaattcaacttttaccattatttagggcaacctaaggggataatcaaaacattctacactaatcaacaacagtatcctagtcacaagctcaaatcctaattcttaaacagcagataatttgcctcctactcttacaccttgaacatgcaacatgattcgaaaagtaacaaggatgaaatcttaactgttaaagaactagacaatgaatttgaatttgaatagaaatgtggtctaggagagcacatgttaacatctattgagggtcttagggaaactctctccagagtacgaccattaagacactcaagtcttactgcaatggcattggcatggtcgatcaaagaattgatctcgaaattaaaatctagagttgtaatttcttttggtgttggaatagcaatcactgggggtagaatgtttcgaaattctcgagccctaatttttaaaagaaggtggatacaaaggtccatatcacgctccaggctgattcagcttattatcagttttgggttttagctttgactcctgaaaatcataagtgtgaagacaggaaaattcaaagtaaaataaaaaatgatgaaaagtggcattcataagtatttatagtcacaaagcacaatcccaatgaattcaaaaatctacggatgaaataaaccttctaaaaacacaaagcagatctaacggttgaaagagccttccatccagcatttaatgcatcgcttacaatcaatgcaaaagtgcacaatattatgctcctcaaagcttatgcatacttaaataactgtcaaaatgcttgtgttgccacacatgcctcatcaatggaatggatgcctcgcaaattgatgaaataataccatgtcaaaaccttaaaacaaaataaataaaagttgtcttcaatagtcaatttcgtttagaaaactgtaaaggtttagcctccacctatccgcttatacagattgaagcaagcttctataatccacaatattctagaagcttgaagggtaaatgttatctgtgtttttaacaagggacatgtggattccaggttagcatccaaagctgcccccaatgggcctacagaggagaactcgggccaggtccaagttcagtaagaactttcaaaaacatatctacttttctcgcttaaacgagcttccgccaaggatagcccatacctgaaagtagtctaagcatcgtgtttacaaaaggccagacaaagtgttcctgaaagcctagtacaatttctttttttatcaaatcgcatagaataaggaagttaccttctacaaatcttggccagaagattgtatcaagctaaaaggagaaactacctaaaatgaaggttaagtaattgattcataattataagacacggtaatgacagtctgatcgtgctcaacctgcctagtcagcacacttatcgcatcatgggctaggcctcacgaataaagcactaatttatgtatttcttatgtaaactccctattagagagaaagagaaactaagtataattgatgtaaacactagaaatacccaatatatccttcaaattaggggttgaactctcttgcagtatttgctcaagcaaaaatagagaacttatacttattgtattctcaaagacttttctagctaaaatatataatgacattgactcatggattaaggcttgttaatgccccaaccacagaaaaaactctaagtactgttttatttctctcttcaaatttgaaaaaccgtgtttttgcaaatgtcaattatatatacgaaaatataaaactgtatgtgtctgcagaagcagaa

SEQ ID NO: 298566 - DNA, 3920 bp, Cannabis indica
gagagagagggaagagagagagaaagaccaatttcaggttttacgaattttattttaatcttttaaaaaaaaaaagggtaaaatgggaagttcatgtaatcaatggactaaatttgtacaaattaagggagggtataaattttgatatggcttgtattattaaggccaaaaagtgaaatttcccttactaaatataacatactttctattgttgatatattggacttggtttctaacaattactttagtagtgatttcaagttttttctctgtttgcttgggaaattatgacaaaatgtttccgacttgcaggtgattctcaactggataacgatctacatacaataataccagcttcacactcagattcccacatctgatacaataaatatattatatttatacgaaagaaactcaaagtaaagaaacccaaataatacaccgcttgaattgatacttgattggcctatatataggcattacaaacaaaagttaaagcattgaaatgactacatgacatcacgttctttacccattaacccactacccattaacatcattaacacttaaagaataggacaaaatattgactcaacaaaaagattaaacaaactacatgactcatcaatttaaaacatcaacacatgctccacactttaacaccctcctttaaactgatatattgcataaatcagtttaaaaattaatttgtctttcccaagttctgaacttcatttagagagcaaattccaagcatacttctaagctttagaaacgccataagctttagaggcttggtcataatatctgcaatttaatcttcactcctgcaaaacaccaagtcaataactccttctttgcataaatcacataggaaatgatacctcacttcaatgtgtttgctttttccatgtaagacaagatttttttgagagttttattgctgagaaattatcacagtgaattacagtaggaccatggtgttgatagtctaacatttcaagcaatcttctcaaccaaattgcttgacatgaagttgatgctgctgcaacaaactcagcttttgtggttgacagagttacaatttattgcttcttagatgaccatgtaatagctcctgaattcaacataaatactgctccggatgtgctctttctataatcaggatctccagcataatcactatctgaaaacccaattaaacttgatttttcaccacttttgtatagaattccaaaatctgcagtaccttttaaataccgtaaaattctttttgcagctaagaggtgaacttcgattggattctccatatatctgtttactaaattgatagcatgcataatatctggtcttgtagctgtcaaatacatcaaacttccaattatttgcttgtacattgtggtgtttactttctttcctacaccattctttgaaagtttcagactaacttcacttggggtggtgactggattacacttcttcattttgaacctgtctaagatttttgaagcatatttcttttgagaaatgaatatgccaatagataattgcacaacttcaatgccaagaaaatagtgcatcaccaaatctgtcatatccaattctttcatcatagacaacttaaattcatcaagcagagttttatcattgttagtacaaatgagatcatcaacatataaacacacaatcaaaattttcttgttcagaccatatttaatgtaaagagtgtgttcatatggatatttgataaaactatttttaaggaaataagcagctacacgactgtaccaagctcttggtgcttgtttcagtccatatagtgctttatttaacttatatacctgatcttcactaccttgcttcacatatccaagtggttggtcgacataaacttcttcttccaattgtccttgcaagaatgctgacttcacatccaattgatatataggccatgagttttgggcatcaatggataacaccaaccgaatagtatcaatctttgcaactggagcaaacacctctttgtaatccacaccaaattcttgtttgtatcccaacgcaagaagccgcgccttatacttatcaactccaccgtctttgttcaactttgtcttataaacccatttaacaccaatgaatttatgctcttttggaagtttgaccaactcccacgtattatttttctctattgactcaatttcttcattcattgcatgtttccactttgagtctttgacagcttcttcgaatgaaattggatcacaacctgacaaaagagcataatgggcaattgaatcaattgaatcaatattttcagatgggatacctgtgacctcaaagtcttccatctatgcgggtctcctccgaacacgacgagaacttgaaacaacctcttcatatgtgttttctgctgccattggtgtattttcagaagctgtagtagctccatttggtggacattcggatgtattatctgtcagattttgtctttgcagagattgttgcttttcttcttcatcatagatatcaaaaataagttgagtaggctgctgctcattccaattccaggtgctttcttcatcaaaaatgacatctctacttatcaagatcatctttgtgagtggattgaccaatttataagccttggaagtttcacttattccaagaaagacacattttttacccttatcatcaagcttcttccttttctcatctggaacatgtgcgtaagatatgcatccaaaaattctgaaatgatctaccgttggtttacgcccactccaagcttcttctggtgttaagttttgaacaaagatggtgggacttctattcaacacatgaacactccaatttaccgcttctggccaaaaactctttaaaactcttccatttgttagcatgcttctcaccatgttaagaattgttcgattcttcctttcagatacaccgttttgctgaggtgtataggcagttgttaattctcttcgtattccttgatcatcaatattctccaccacgatcggtacgaagagttttgatggtattttctgcttccttttcaacatgagccttgaagcttttaaatgtaataaaagcttctaatttttcctgtaaaaaatagacccaagtttttctagtataatcatcattgaaggtaatgaagtatcgttgacctccattagaagttgaatttattggtccacaaatgtctgagtgaaccaactccaaaacttttttcgctctccatgacttcccttgtagaaatggctgccgatgttgcttgccaataatgcactcctcacaatcattgttagtaggaataatttgaggaagatcaatcaccatgcttttttgatatagagtttttaaatcattaaaatttaaatgaccataccgaaaatgccaaagccatgttggatcgctaactttggccatgtgacaagcgtggactgtattgattttcaaaggaaagagtctattatgggccattttcgattgagcaacatgacccctttttggatcaaatatctcacaagcaccattttttttatggtaacttcatatccctttcttaaagctgtccaaggcttagcaaattacttttaagatcaggaacataaaacacattagacataacttgaacacaaccatcattagtcttgatctggatatcaccttttcccataacatttattttagaattatcaccaaaactaacagtggtgtgataatcctcatttaaatgagaaaaaaataacttacttctacacatatggttgctgcagactgtgtctaaataccatatattttcttttagcttaggcttgttgtcatgagttgtaacgtcctaatgctaaggcacgctacagtgtttttttcaattatagtgcaatctttgctaatcaaagaattttctcgaa

SEQ ID NO: 298567 - DNA, 4760 bp, Cannabis indica
aataattttcataattaaacatgattaactgctaatttccaaattaaactaagcggtctacaggctgtcgagcctcaggttctcgcccaaggggtgcagggagaccgttgggtctctcctccatctactactagtgtcaagactctcaacaagattagagagagcggactggtaaggggtgtccattgtgattagtcgtcaaagggaccaacgggcggaccggttagccttcaactgtatggtatggtcggagcgccacattcagcagggggtagtactgcctttacacctctacttcagagacatcgcagcatacttcgaaatgtgcccaacacaaatcacttttgtgtagaagaactaaaaaaaatatagctaaatggataagatattagccaatcgcctatatgaagattaaaaattgatattgagacaaattaaagtgaaaaaataaaagttttacttatatactacattaagtacctataaatattttttcatcaatgtggaacttttgtataatgaagaaattaaaagtgatatatattatgtttttcgacaaaagatgaaccactcttaaatttaactttgcatagaaactagtgaacttttacaggcttatgaattatatgtatattataaatttactcttaaatatattaataattttaaaagaagatctttcaaaaaacataaaatctaaataagttaatacttttttttatttttaaaatataatacttatttatattttataggcaataaacataattctcgtttaaatttaatttattacttagtcaatttttaccatcctatgcataaattaaaaaatctatattattctaaaaaaaaattaatattattatatcatgctgattttttggcataatatctcatatagctccacttatattaattagtatataattttttagtaataaaatttgatatgtaagattattaattaatataaaatatatatatattagtaaatttataatgttgtatatttttggctactatgtattgttataataatatttttttaaatattaaaattataaattcattcgaatttacttggttttggaaaaaaattattgaaatataagctagcatctatataacctcaatatagtgtatgaataattcatggaaagagacaaaaaaataacacattttgtaatttttttgtattactatattatatttgagaagggtatatatgtaatttaacaagaaaaagcctaaaatattgtggcttttataatatttgagattgagatataagctagcatctatataacttcaatctagtatatgactaattcattgaaagagaaaaaaattcaacatattttgtaatttgtttgtattatcatatttatatgtatcttcgagaaggatatatatgtaatttaacaagaaaaagcccatattgtggcttttatataggttatagattatagatatagattttgttccctaatcgataaaaataagagcaatttggtaaatgaaaatttaaaattgggtgaggcatacaagaactgaatagttcaaaaagaaaaggttctttctggaactatagagcagcattttattagagcatattggtaaaattgcttcccatgctagctctcatattcacacgtaagccaacaaataagcaaaacttactgttaactagaaaatttctagctaacctctggatattcatacttgttatgaactgcatttcatatcagttcttcatggttcatttgctctcgagactagaactcagatacatttggatctttatactaaataatataatttcaaaagagaagaaatggagcccagatgatgaatatgcaggttactaacatgagaactgtccaaacttagtttttagttgttttggatggcaccaaaaggaaagatgactctgctatgctgctggtgcttgactgaggcacatgaattattaccaatatccctcaaaggagatctctctaaaccaaaagatccattattgttccatgtctgtgatttccttcttcgcccatcacttaaagttggagcctccttttgttgatgatggctgttgttctccttcaacctacaaatcaacaccctcttctccatttcatgttgtccatccaccggaatcgctggtgatgaccctttgtctctcctttcatggactttttcgagctccttctttgacctatctagttcctttcggagataatacatttgtgcttccaactgatttgccttgttttcggatgagatagccttctgtctccaatcttgaacctttgtttttatatattatatatatataaatatataaataaaagaatgatgtcaaagaaactaaccataacacgtaatgataacattaacatctgatgatttgagaacttacagatgaatttagtgaatgcatttgctgatcataatccagagctcgatcttcccaaaagtctcgagaagcctgcaactcttccatttcttcccttacttgtcctaacatctcttgcatttgagaccattgctctgtttcggctcgaacctgctccataattcttcttactatggccttacaacgtccagaacatacattattctcttcatagctcactgtctcctgtgaaaaaataattccaccacttattttaaaaaaaatccatgttcaaatcaaaaccaatgtttaaataggctttcttgaggcgaggctttcaaaagcaaacacttacaccttaggggtgcctcaacatcatcaagaagctaacgcctcacttagcattcttattttgaacatgtttgaagtgttgtattcaacaaaactaacccaataacaattacactatgtagtaattagatacaataaaagtgacttgtttaagtattggtcaaacaatagtgcttaaaacagcaaactactctaaaaaccttgcatttgatagagtcttgccttaatcagaaaaaaaaaaaaacatatgcatgaagtttgagttagtgtcttgccttgtgtgattgttgtactaacaacaaagaagatgaatctgtaaactcaattctctgagaagtggatgctgaacttgccactgagctattagctgtggatagcatagaaccacactcttccttcattctctctaataaagtcccatttgataatccctccattctttttctcagaatctccacctacaattataaaatttgcccatttaagagattagataatatatgggatttacaagctaaaatacagaaagtggtgttagtagtacttacattggagttgtcacatgaaattgaaactaagctatcattgactgtagaatttgatgattttagtgacatgcttacttctgccatctcttggatcttttttacacaaatctcatctgatgttcccctaaacatcttcaactgtctttgtagaggagccgattgtttatcgatattgttgtgttttcgagttttaaaactctttacttctaagtttcttcttagcttctccagtttgtcagcgaaattttgaatctcttcttccaagttggtggcttcacttatctttgttttctcctgaaaacaataaacataatcgatcatcacaagaaaatccaagtacattaaatgagacaaaataaccgaataacattaactgataattttcaaatttacaacgggactattctatcgaataaaatattcatattaagtttgaaaaatgtaaaaacgtttctttcactaatagctacaaagttccttcgttttccaggcaagcaaacagaacagagtacagtgttagacagttacaaacttgtactactagttaagttcagtgttggaatttcccagatgagaaaaaaaaaagaaaaactcaaaattttcccaagaaacaaacgagttagaggtcataagagagagaaaatgataattgagagaaaataaccaagtaaaagtaactgttgtagaagtacaaaatttaaaatattcaacgggattattctatccaataaaatatacatataaatttcgaaaatttgaaaaacatatgttttactagtagctacaaagttccttcattttctaggcaaccaaacagaacagagcacattgttcgatagttacgaacctgtagtactgcaagttaagtacagtgttgaattttcccagatgaaaaaaaaaaaactttccgatgaaccaaacgaaaaaatagagagaaagataagaaactaacagaaacaagagcttgaatagctgatcttagagccctttcaaccttaacacgagtcctctccaatttcttaaccgctatttctttctccattctcaacaaattacactctgccctcaacatctccgcctgaaaccgccatttctcctcctccaaacccaacccaacactatcaccattaatctctctctcctcaaccctctctctcctcctctcactaccttctactactaattcttcccttcctccatgacccaacaacacaatcggaataccattttttgtaaaggctcgttcttgatcgaacagagtctccagcttgccttttcggtccttcttggcttccgacgaactgggtttcccggcaaccgtcttgggagttttccggcgaggcctgcgtggcaagtggaggattctcggagtcggcggcggcggtgggtattgccactttggcctcctggaagctgctattggctcctagtgtgatcgacattaaatgaaaaagcaacgattttgaatt

SEQ ID NO: 298568 - DNA, 1747 bp, Cannabis indica
attaaatgataagagagaaaatacaaaataatattttaagataatatgtatactttttaacaactataactattacccaaaaactaacccggccccaaagattgggaaaagtaagcgaatcaacgatcgttgtagatttttttcgttatctatactaaaaaccaaaatagaggaatcacttaacttgtcctcgttcattttttcccatttatttatattaattaattatatagatatatatatataaattcaagtacgtatgtgttcatatttaaaaataattaagtaaataaaaacaaaaaaaaattaactaacctggagaagaaccagaggtgaaaaactaagatcaggtcccagaacatgattataacaaagacgatcatgaaacgaacaacccatttccaccatatccaagcactcttccaccgtaagctcctcacagtaagcttcgataatccgtacaccggcatcgttgcacttgatgtacggattatcggcttctgatctcctgattcttcccgctacagggaagaatcgatcgagaagttcaaacatgggctttttaagctcttcaatggttattatattttgagtagtgctattgttgtagaagaagtaaaggcctttgatgtaatgaaacttgagagccaaatccatgtttgttaactctcgatctttgttttctcctcgaactgtgccggggacgacgcttgagagtcttgctccggtgatagggatttcggcggtggttcttggcggcaacattttgttaatttggagatgatattaagattattggttggaaaatggttttgttttctcttaggccataactcttggatatatttatagagaaatagtaaagggtagtaatggtgtcatttagtattattaggaccaagtgtattatatggtttatggttatggtttaattttgtcttatatattttaatttaataattattttaaaaattattaattttgctttttttttttatttaagcaaactataagaccccaaaattacaaaattattttattctatcttattctttttttttcttcatattttttaaataatattaaatataaattaatgtggaaaaaaaattaatttaattataaacgaatacttaaatttgtgggatatgtattatattattatatctcttataaagaaaaaaaaaaatcaacctttatgcgtgtacacatatataatatattactattgttatatatgtttttttattaagttttcaaaatatttttagttagtaatattttatataaaaaagtatctcttataaaatttcaagaactatacatattactttttcattaaaatttacagtaaaaaaataaaagaaaagaaaagaaaagaacatagtcaatcaattcaaaatgtagtaagtgtattgatttttattttgatagacatattactttctcaaacatttttctattatttctcatgttattttttcatgcattcttctacaatttctcactaaaaatatgtaattgtaaatattttatttgtggtccttaatattataaattatggtgaacattatggaaatgaattaagttatatccattagtagtttttatttattattaatttgttttttttgtttaaatatttataacgcccgtattttatatttaataaacttaaaagttaattttaataatttatagcttaataactatatgggtcgggatcccgagtatcaaaatacaagtt

SEQ ID NO: 298569 - DNA, 958 bp, Cannabis indica
attttggtctttttgaccatttattctattttcaacaaaatgtgatatttgataattatgagatgcattttttgatttgtttcctaccgcccagtactgaaccccccatctcctctttcacctatcttcttgaaagtttgaattttgttgattgttcttgaagttggaggtgttttggagtagaatctcttgtgattaagagctttaatttgtggtaagctcctaaagttttcttgatgaacctttttcagatttgttgtagcttgaaaagcatgctttactttcaatttttgatcatgtatgcatgtatgtgggaatttgtttggttttgatgttatatgtatagttgtgttgataattcatggatattgtttttaggaatgttttgatgtgttattagagatgtggccttgggtttaatttaatttttacattggttgttgttatgaactagctgaaaatatggtttttgtgacaaagtttttgattaaggaaattattatgattttagctcaagtttgagcttattttgatggttgagaattgttaccttagatgcttattttgctattgtctctgagtttgtgcatgcttttgggtgagttttgttgggtttgaacatgaattcgtgtggcagatttttgggctttctgggtttggaacacagtagtcgcggccccattcactgggcgtcgcagtccgcctccttcaaagttctgggtcttcaacccaggtgtcgcgaccccgtgtagggagtaccgcgtcctgccatttgtttccgggcagttttgaatataatattcgaatgttcgtaactttctgatccgactctgatttgggtgttccgagtaccgttggaaagcttgtaccgaggtctttatgtgtatcttgatttgaatgccaattttattatgtatgtgaacgtggatttagggattaaccctatttttgaatccca

SEQ ID NO: 298570 - DNA, 2338 bp, Cannabis indica
tattatcatattattgttgcatttattttaaataaatatgataagttaaatgatcatgtaacttagatcctagggatatctataattaaacagaaacaaagggaccctgggattatgtgtagaggaggactacgcgctaaaactgattgaaaagttttcaatgaaagaagctaagaagactagtcagcctataacaagccagtatcatatttctaagaaagattgtcctactactgctaaagaaaaggaggagatgagcaagattccctattctaattttgttggattaataatgtacctaatggtaagtacaaggcctgacttagcctatgatattaattagtgtactaagtaagtacatgaataatccaagaaagcttcactgtctagccatgaaatggatattcaggtacctacttggatctacaaaaacaaagatgaattataagaagtcacaggagccaactaagatagaaggatactgtgattctgactatgctcgagacatcgacactaggaggtctacatctgtctatttcttcttaataggtggatactgtgtaagctggaaggtccaggtgcaacctattgcaaccatatctagtaaagaagctggatatgtctcagctacaaaagctatcaaagaagcaatttaaactaaaggatttataaaagagctatatctattaaaggagaatcctatattctattctataattagagttgtatccacctatgtagaaatctagtttttcatgacataataaagcacgtggagattaaataccacttcagcaaagaaaaagtgacacaaagaggagtgtctatggaacaatttcccacagaggacaacccttcagacatagggactaaagtggtacccctagcaaagttcaagcactgcttgacctgctagggattgaaaatggtggattaccttgaatggtcatcgagttaggacccattgagattaaatcaactatcatcgatcaataagacaatttaggtagaatttgttaaaatgaattctcttatttggctcaagtgttacacaaaatcaattataagcaattataaacttacccgaaggtttcaaattacatctcaacagaataaaatcctaaactactcaagcaaaaatttttcaactacttactccaactcagcaatattttgggccttcaccaacaaaccttacatcatctatacaaaccagatctaaggtcagaactcctcgcgacagttagagagattcaatccagagtgtgagagagatgagtaagagagtttagctccattcgtgtttattttgagagaaaaacagaagaaaagttagggaaatctttgtaaaagaaatagagagaaattcaatgcttgaacgtttgattgtcattcaaaataaatttacttgaaatcaagagggagatgtaaacatacttgatttttgatagtggaatatcaagcatttattggtgagctcgacaaggatgtagtccatattttcaggggtgaaccttgagaaaaatccttctgttcttcttctatgtttgaatttttgaaccataatatctcttctctttatttcttgtgtttttcatgtgtgatttttgtgtgaatatctaaccctaacaagtgcgaagtttctcagggtttctcaaagtgattcaaaccctagaaattgtgatctgattgtttttgttaaagtggttattggatcaaggggttattgggctggtatctcgattttaagactcatggacgcatgagttgcaaaattgtaaaaatactaacttattcatttttagttagtctaataagattttattggtccaaggttgaaagagtagctaactttcaacaataagcttaaacgttttcactgctttctccgacgctgctccagaaccccaactccagaattgaactcaatcactgccaccaaattgccaacctcgatagcctgtcatctgtttgccaagtagcttgttagtaattacatatctaatggagtactaaaaaggggtgcattgctatattttagcacacttaacaaaattactactccattggtactgtaaaagtatgcaaaattttggatatgctaaaagttgtgccaaatttgattcaagatataacattatctcaaattaaagcccacaatatatattacttttttatttactataatgtcactcgattattataattcatttgacttttactcaatttttacatttttgattttaccatattatcattttttaaatataaaaatatatttttttttatattctcaacaaatatcaattatcaatataattaattattttatttattt

SEQ ID NO: 298571 - DNA, 1189 bp, Cannabis indica
tagtctcggtttggggtggattgctcgggatcataatcgtttgttcattgatgcgttggcggttaaaacttatggtcaacccgacccgtttttggctgaagctatggcgttgaaggaggcgctcagttgggtgaagggaaggtgggtagaggggggtgtgcctgttggtgtggttatggagttagacttgctgatgttggtgcaagccgtgcaacagaagaagcggttgttgtctccggtggggcttttaattacggattgtgttgctcttatgcagtcctctcttttgtttcctatttcaattaattttgttaaacagttcgggaatcaggcggctaactttttagctcgttcttctggttctattcctggctgtgtttctcgggagattttgtccctgctggtttgaaagctatcttggtagctgatttgattttataaaagtaaattttttggttcaaaaaaaaattaatatatatatatatgataatattaccatgcatatatattatatattataaatgtgtgagttaaatattaaaaataagatttaagtgagatattttgaaaaatagggtaaacaagaagtgctctaagacattttaagataaactgttcaaaatttgtataaatttgtatgttgtggggattcaaattttgttttaatcctattaatcttaatacagatttaaatttataacattttctgatgtattttttttaaaactaatattttgaagttatatgtacgtaccaactgaatgagttgcaacagccattctaatggtagaaatccctttttcttaaaaaataaaataaaaaggtatgaaggttttagtgctttgctccctatggaagctataaaaggagaggtactctattcttttcaacacacaaaaaaaaaaaaaaatcattatcttcttcttctaagtttggtgcagtaactagtaactaactagtaactactctctttggcagtcaagttggtatttgcttggtcatagaatttgggaattgttcagtttattagaagcaacaaggtgatccatactaattgctcaaaaatagcacaattattttagtttaggagtcatatctctcattagcaatactcaaacactttgatggtatttagttggaaagaataattacataaaaataaaaatgagaatgagaatagaaaaatgaa

SEQ ID NO: 298572 - DNA, 4239 bp, Cannabis indica
gtgatattccaagatctagaggcttactttaatccataaaatgaatttaaacaacttttaaaccttttgatcttccccatcttacacatacatttaggttgttccatattattatcagtagtactcacatgtatatatttagtcaattttaattacatttgattctctaagtctagggaagatgtgtatgttcccgtatgacattaatgaaaagtactactaatttatcgcatatattattgctcgtggaattttacaaaattttattatattcgcattttctttacttggttagttaatatgctcaatgaaaactgagatgttctaaaatcgtattattaaagtcattacttttttgtgcactagttgtagtcacaaaacacatgataaagatgagatatttcatacttggaaaatattttgaataaaagttccccgttggaacataatgtttatacaaaaggagcgaagaataaaatccccacgatcaaaagaaaaggcaagaggccatctatctacttaaataaaaagtgagtacatctcacgagtacccatgtaccgctaaaagtaaaagatagaataaattttcttaagaagctagggcattttcttcaccattgcctgcgaccttctccccctcaacaatctcagtagcaggatttgcattctcaggaaaagggatccgcacgacaccttgagtttcactcagagacatagtgcaaaaagtattagccatctcaacagcccccagaccacacatagtgaagtcaaaagagggaacgctagtcaaggttgtatagatgtagtcgttgactgcctggtcataccatttcttcttctctaattccattttgatttgagaagctgtgaccttacccttcttcgcttccaattaagcttggagagcagcaaatttttctgttagctctttgatctccttttttgctttctttttctctttacctgcgttttcaatagctttatgcttgttggtcatcgagatcttggcctacttcattccctcttacagaacgagattctacttcttgaaaagcttactgtctttcagcatctgctgagtcagcgttaaggatcgagcataatttgccatcccctcgatcatattctcaaaactccaagtgtctgtgattggagcactctcaagatcgaggaagaaatcatcattcaggtaaaagctcttgtagggctaccaaatcacgagtcttggtggtcagatccactacgagtttcttccctttgtcttggacaaccttttactgcttcttcgataagtcaatcactgaggtgtcaagaacattgctcttcctcttataggctggactcgtagtagagggagttgcagcatcctagttggatgttggcttgtgaacaaggggagcttgaaaaagtaattactacaaaatacaccatgttagtaactgtataatcaaaagacttgcaactaagaatgctaggggcatcattagctgcttgttgtttttgttcttgtctagcaagggacttcttaattttctctttttgttattttgaaggctccttgtaagctggttctcgctggactctagcattgtgataaaataacatgtgctcttgcaacttagcaatcgcacttaagatcctacagtcacgatctttaacggacaagctgctaggtacctctgcaatttctaacctccttctggtatgttttgtttgagctggccttcctacgagtataagaaagagaaaaatctcagccagcagtaaataaaaagaagtataaaaatacacgacctacttggatgacaattaaagttcttaattcctagcagtgttaacacgtagaaccacttcaatttccaatcgcccatattgaaaattgcgccctcgattccatttatctctgagttggcccatttgctaaagcagtaaaagccattttcattgccaacaattttaatattgtagaattagttgaaatcttcgatagtgggttctccttgtgcatactccttgtacattgtagagaacctgaggatgatcctataactatttgaggtttattgaaatggtggaatgtcatactgggttaaaatacctttgacaaaatggtcgaaaggaatttcgactccacaacaaagtatgggaatcaagatagttgtgacattagatttgatgatcttgggattagtaaagagaaggtatggtcgatgcctagccactggctttgtgcaaccagtttgaattagatttagtttcttgaaagaaactaagtctgactaccttatcctcaattcaaggtccacacaggaaaaaggattgtctagaggtgcatcttcatcaaaaaaacccaacctcttcttcttcgtcactcgtatcttcctcttcgtgagtgggcaactcaaagtcttgttcaattttatcaaccttgttgtccaagaagacccttgcatggatacaacttccttgggcagatatagtggactcactttttctcacttccactatcataggttctgttaactccctaaccatgcgagctatatcctccatgaataaggattcttgttatactgcaatattaggagctgcattgtctgatagcgacatgggtataaaattgtcactctttggggttcatttgcaaatgttcccccttgagattcttactcctagttgtctgaaagatcgttcatttgaaagataaaagatctgttcagcgtgttgtgcatgcaatttcaaaaaagaggagtgttctcacacgtataaatatttataatttcattcaaggaaaaataaggtattctaggaaaatcatgagtcttcatacagttctttgttttctaagtgaaaacatatatatgtgcgagtattcaaagtgttctaacgataaacatgcaattattcctagttcatacaaagaaggtgcgagtattcaagaaagaagtaaaaatttctaaaaaagttatctttttcagcccattttgcctagaattctataagctagcctaacatttttgcacattttcaatccttaaaacctagaatgtatacgatcattcaagaaaatgcatacataaataactgagaataataagaggaaccaaccttgaattcgaatgcactatcttcttaaataagttggggcatcatttttatcaatgtaactgaaaaaaaaaaattaagcaagcttcgaaagattagtaagactttgagttaaaaaaattcgggaatcaaagatttttgagagaaaaatcttgaaagttttttagaatgagaggaaaaatgaaatatgtttcgtaccaagaaaatttttatagttgtcatagtcacctgttgtgattgtgacacgtgactttcaaaaaataaaggttgtttgatccaatgtttatcctaattcgagcatacacaaaccacgaagggttcaatgacgtggcatcttaggaaggcaaatgtcaccgcgatgaaacaagataacatgtctatcccttcaaatagctttgtcgtctaatagacaactatcatcgtaaaactagaggcatgtgctatagtacaattttttcgcctagaaatatgagtacagttttatagatggttgacacgtgaacccgatccccaatgaaaaagaatggcgtgtcaataaatagctccagtagagctgatctcccatgacttaaacttgtgagaaggtacgaccgagatagggtctaatcttatattatgcctagcatagtcgaaaaataagcaggaccaagagaagttagtatttatcgcgtatatatcaattatggacgatcaagtatatctctcctatgacaagacagtatctttacatatgtttagtttgaaagactgatgtgttcgacgactcgttaaggactcgcatgttctaagttgtcaacataggaatgcccgagtacgcgatgaattgtaatcgcaaccattcattatttaaccgagtaagcctagaggcccattttgtgagtaaagcaccacagagcctacaagctcgcgtgtttagaatacgaatagccaacttgcgacttggcaagtcgcatgcattcaggcaattaatcaaaaacgaaagaaatttctctctcattttctcatttattcttttaacattttcttaattaaatgtatataattaatgtagtaatggtcttgtctgaccggttatgtaatatcaatgggcacttactttctatataaaggagtgatctaagtcaaataaattaa

SEQ ID NO: 298573 - DNA, 2274 bp, Cannabis indica
agtgtttttggcttggcagaacaaacttgaaggaagtattccatcaacattggctgattgtacaaaccttgaagctgttgacttgtcacacaatgatctcactggtagcttaccacctggtctttttgagcttcagaatttgaccaagcttcttatcatttctaatcacatttctggttcaatcccacctgagattggtaagtgtagttctcttattagactcagaatttctgataacagaatcaatggtgaaatcccaagtgaaattgggttcttgagtaaccttagttttcttgacttgtccgaaaatcgcctttcgggatcagtacctgatgagattggtaactgcagtaatcttcagttgcttaacctcagcaacaataccataaaaggtaatttgccaagctctttatcttatcttaccaagcttcaagtattggatatttcagttaatgagttagttggagaagttcctgatagttatggtgaacttgtcacactcaataggcttattcttagtcaaaactcattgtctggttcaatcccaatctctcttggtcactgttcaagccttcaattgcttgatttcagtagtaacaacctctctggcaaaatcccagttgagcttttccaaatacaatctcttgaaattgctctaaacttgagtttcaatgctctatctgggatgatcccaccacaaatatcctctctcaataagctatcagtactagacatttcacacaacaagcttgaaggagaggtaatggtgctttcggggctcgaaaatcttgtttccttaaacatatcatacaacaacttcacaggatatctccctgatagcaagctgtttagacaattatcaacaacagacttagatggaaacgaaggactctgctcgaaaggtcaagactcgtgcttcatcagcattggcgcgccaattggtgctcgtggcagcagcagcagcagtttcagaagccaacacagactgaaactagccatagcattgctcataacacttacagtagcactagcagcatttggtgcttttgctatttttcgagcaagaaaaatgatgatgatgagtgaggaaaacgattctgagatgggttgcgaatcgtggccctggcaattcagtccatttcagaagctcaacttcacagttgaacaagtactaaagtgtttagtggaagagaatgtgattggaaaagggtgttccgggattgtttacaaagccgaaacagagaatggagatgtcatagcagtaaagaagctatggccaactacaatggctgcagaatatgacagagttggaggagttagagattcattttcagctgaggtgaagacactcggttcaattcgccataagaacattgtgagattcttaggctgctgttggaacagaaaaacaagattgttaatgtatgattacatgcctaatgggagcttaggaagtgttctacatgaaagaactggagggtgcagcttggaatgggagcttagatatcgaatcatactgggtgcagctcaaggcttagcttatctacaccatgattgtgttcctcctatagttcatagagacattaaggccaacaacattctcattggtcctgaatttgaaccttacatagctgattttgggctagctaagcttgttaatgatggagattatgcaaggtcttccaacactgttgctggttcttatggctacattgcaccaggttagtaacttactacatacaattttttctatcatataagaaaatatatgaatagtgtaagaaaatttacctctacttttattattctactataataatctcattttttgtagtaataattatctaagacttgaagaaaaacatgaaaacattccattgatagattacatgataccaaacaacactttatcataaaatcagttgttacaaattttatgaaatttcaaaatatgtaacatgttatgtttaatttaagggtaaatagtggcataaatacccaaagttttgagtttgtaagtggcataaattcaataatttcttttagtggcataagtatccaatgtttgtaaaactgtaattttgctctattttcgtcctgctctgttttaaatttattaaaagaagatttagaagtagatactaaatatttctgtctagaccaaataatttagagtttggattttatatgtgtcatgtttaagacgataacagaatctgtactaatgaaactaatgaaactgaaaaaaaattacagttttataaatattgggta

SEQ ID NO: 298574 - DNA, 2431 bp, Cannabis indica
ctcaaatctcgtatcaaaatcattagtaattaattaatggccaaacaattaaaagaaataagtacgaataaaatagagcacataaaaattggagaagaatcaaatcatattaaaattataaataaatgtcaaataatatccatcaatactctaataactgtttagctactctcattcatcgaaacaattcgacacacattgactaagaacataaaaagaaaataaagaagaagaaattattgaaaaactcggttggaaaaccttcttggtcactttatttctctccaattcgtactgtctaattgcttgatgaaaaacatgaaagtccactttttttatagccaaaaaagatcgaaaagaatatcccaatttgaaattcagggggcgcaccgcgacactagggccttaatgtcgtggctcgtgtgtgcgagtagatattcctagatattttttttttaaacacgggcctcgacactaactttcactgtcaaggcattaacccccttattttggctagtgagctctttacgagttctccctgaaaactaaggtccagtgttgaggcgcgcccatgccttgatcaaaatcgaccatgtttgtcagtttttggccttttaatgccctgacatgggttttagtgtcgaggcactcctccacattttgtaatttcttcgcttcaagagctccaattgcactaaaacttctaaattttttcttgaattaattttctggtgctcttgcctcaagagttaatttatttgaccattttctcatattttttcaatatttctccatttttcttctattctagacctgcaaaataacaactacccaaaccgtacaattgcacaaaataagagtgaaacttatttaaaaaatacactaaaatcaacctaaaaatagtactaataaaaacctaagaaaacaaatccctaatctccaataaaaaagattagtcaaaacagtaacaataaaatgtatttatacccagctaaataaaaaaacttaaagtaaacagctggaaaattaaatacccaaaatatgttgctaacgtggactatcactaataggataaactctagacataacaccacgaactccaaatgcaactggacctaatttgtcacaacagaaaatactggttcttacaatctaacattacaataacatttttatacacaaaataatttaaaagttaagttagaacaatatatacctaaactgctaggatttgaagtatattagaaaaaacagatgtaatattttctattaccgtttattaaccaataaacatttctgttattttgtttggtaattaagttggttttcaagattagttattagttttttctatttttgttatcaacttgtaaggaaactaactctataaataatattgagctatctcattgagaagctaagctctccttgcaattccctctgtttcatgttcttactatttttatttcttaccatttttgcctcagacaagcttatacgtggtaccagattcctctaatggagtcctagattcacacctccacttttgatctcgtaggccttaatagcaacactcatgcttcaacaaatcctctggtttctacccctgttacatcgatatggaatcccttttctagttctcttacctcctctcttacattaaaactcgatcatgtgaactttcttgtttggaaaccgcaggttgttcccatcgtaatcggccatgaactagaagaaaatttgtttaatggtgttcctcctctacaagctcttctcattggtgagatcaatcccaactatgctcaatggaagaaatgtgataagcctcttatatcttagctttgctcgtaaatttctgaaggtattcttgctttcgttgataatcacactacttcttttgttgtttggagggccctcacatagaattttttgagccaatccagagcccatctgtaatgtcctagctcctagggacgccatgtgtgtgcttttaaaacataattttgtaatagtagatttacaatttaataaaatccgtgataatagtaaaaatttcactaaaataaattatggctttacatcgctaaaaatttgtttcggggatcttttgttacaaaagttttacaaaagggctatatacaaaagtaaatcaaaatacacatcaggtgcagcataaaacatctcctgacaactcaaccgtacaagctgaataagtcgatatgtacattttctagagaagatatctcgtggctatcctagttttctcttgcccttacctgcaccacaaagtacccatgagttacaaagactcaacaagaaaagtaaacataaatacatataaaatagataactaaatcataatagtataattaaatagtaatacacaagtacttgtccaataagacaagccatatttgttactttataaagt

SEQ ID NO: 298575 - DNA, 4783 bp, Cannabis indica
ttttttttagggttttcgcgttggtggtttggtagttacgacatgtcgtttttcgtttcttccttaggtctttttttttgagatctaaaaaatagtttttttaaaaaaaatctatttaattaaaatatatttaattttaattaatataaaaaaaaatatttaaaaaaaaaaaatcgtgcacaattgcacatcatatctccatctctttcagcttgataataatctgggaatgtcactttttaggtcaaatagtaaaatttcattatcgatatttgaactctagaagacaattagagttaagaacttatgaaaagcgtctcaaccactacactacatattcggtgcaaggtcggtccaaacattttgagggtgttgtgcaaaagcttaaaatttagcctttaaaaaaaatcgtttacatacattaagaccacaattctattaccagcttaattttttttaatttttccttataattattttttatttatttatgctttttttttttgagaaataatttatgtatgtataacaggaaaaaaaatgtgatatcaatcaatgtttttatttaaaaaaaaaaaacaggaaaaaaatgaaattgggccttagaaaaataagaatgttgtgtaatggtcctcaatggttaatttaattaatatcttttttaaaaaaaatgattgatatttacgtaaaaaaaaatttatttgtactccaaatttttttatatagtttatcttattttatactattttttaaaattaactttttttaaaaaaaatacatatataaaataattatttttacgtaagaaaaaattaaaataaaatacatataatcttttttttctttttgaaaaaacatataatcttattaaaatatatatacatcattttgaaaaaatatttaaaaatatcaataaagtttgaaaattttgcataatgaacgaatgatttttataaaaaaaagatattataaattaattttagtttatttttttattattttgagttgcttataaaaggcatggtatttaagaaaaaagaaagaagtgaaagaaaggcacataaaaaccctaaaccccaaaactaacgatatcttcttcttcctcctttaccactttatcaggtaatgccctaattctcttatctcactctctctttactgttttgcttctaattcgtaaagcttacgctattttcagctcaaatttcagtattagggcttgatctattgtaaatctagggtttatttgcttttttttcatgttcaaaaaaccctaggtaggaagatttggttttgatctggaaagttagtagtttgttgtttttctcttttgggtgttttgatttggatttgggtttgggtcgaatgtatgtaaagttcatgccttgttaataatgagttcgttggatatttacttaatagaagtttgattagaagaattcgtgtaaatattattaggtattttgatagttaaatagttctagaaaaagttcacttctttttttgatgagaaaaagaaaaagcttgtgtttatgtttggatttatcactatgctcagtatttaagagttcatgtttgtatagattatttcttttgtatataatgtatatatatactgggatgaattgagtttttggtgagttttagtattgaatttaacatggattatgtgattttgcagtcatggcaggtttagcaccagaaggctctcaatttgatgctcgtcagtatgattccaagatgagtgaattgtgagtctatttctttccttgttgctctatttttgattctattcttggcaatgttaaaaccgaaatttgtgttctattcgatacaacgttataaccgaaattcggtagaactgatgttgatactcatgttttgttttctgatgagagcagactggaaagtgatggaaaagatttctttacatcatatgatgaggttcatgaaagttttgatgatatgggtttgcaagaaaatcttctaagaggcatttatgcatatggtatgcattactttattttgttatgtttatatctattttggaattttacaaatagttactttgattttttgaggggggagtttaatgataatgtgtctgattgtaatcattgaatgattttgtatctatgagtttgtgtaaacctctattaccatataggtgttaagctttacttaaagcaaaattccatgccatttaatgtcaaattacttaatattttatagtttttaagtgtaataattgttacttgcaggttttgagaagccatctgcaattcagcagagagggattgtccccttttgtaaaggacttgatgtgattcaacaagcacagtctggaactggaaagactgctactttctgctctggaattctgcagcagcttgactatggcttacttgattgccaggctttggttcttgcacccactcgagaacttgcccaacagatcgagaaggttatgagggctcttggtgattatctcggtgtgaaggttcatgcatgtgttggtggtaccagtgtccgtgaagatcaacgtattctttccagtggagtgcatgttgttgttggtacccctggtcgtgtgtttgacatgcttcggagacaatccctgcgtcctgataacatcaaaatgtttgttttggatgaagctgatgaaatgctttctaggggtttcaaggatcaggtttttaatgatctgaacattgttttgtgattaccacttaagtagtgtttagtttagtttacatgctattgctcgtgttgacaactttgctttgtgtttgcagatttatgacatttttcaattgctaccgccaaagattcaggtcggtgtgttctctgctacaatgccacctgaggctcttgagatcaccaggaagttcatgaacaaacctgtgagaatcttggtgaaacgtgatgagctcaccctcgagggtatcaaacaatttcacgtcaacgtggagaaagaggagtggaagctcgagacactttgtgatctttacgaaacattggcaatcacccagagtgttatctttgttaacacaaggcgaaaggtcgattggctcacagacaagatgcgcagcagagatcacacagtttccgctacccacggagacatggaccagaacactagggacatcatcatgagggaattccgatcaggttcctctagagtcctcatcaccaccgatctcttagctcgtggtattgatgtgcaacaggtttctcttgttataaactttgatcttccaacacagcccgaaaactacctccatcgtatcggtcgtagtggacgatttgggagaaagggtgttgccattaactttgtgaccaaagacgatgaaagaatgctgtttgatattcagaagttttacaatgtggttgtcgaagagctgcctgcaaatgttgctgatctcctttaaatggaagccttaattattattagtattattattatttttatcttcctcttcttgtaggtgaagaagggtgttttttagaatggatcaaacttggccccccaaattattatgagatatgttccaatttactgtttttgggtgtagaagtaaaaccattattagaaattttctttcatgtttatttttttggggggtattttttattttttttttagtttcaaagacaaatttgcagaagtgattgttgacaaaagccgacatgagattgctattgtgacactgaagaaaaaatatgtaaaattcattgtcttaattagttaacattcctccaagattttagtatgattattatggtgtgtttggaaaatcctttttcaatgattaaatactaagtttggtgtaatttgtttaattaggtaattgacttcatggttagttaattatacgagagggtttaacgagcaatcgatattttaaacttgatattgatttaaactacatgcaaaagtattaagtttagggttcatcattttgttgatgagctattgttgatatcttttgcataattcctttaaaaagaaagaagaaattgagattgtgatgttaattaatttgggtaatagctttgataagtacataaactaatctaattttaaagggtgagtaataaaataacaaaggcttattataaaaacgatatacaaaccaaaactatattactatacagaagatagtcgaacgatacaaataataataaaagtataaattgttcaaattgtattgcactatatcgtatttttataatatggtttttgcaattttaagatctcaaggtgtagtttcagtttgagaaattacaaaaacagcatatacagttttgtttgaaaaaaagtgacatctcacaccacccgcactgtaaatactcttggaattattggatttaaggatttatgtccaattttattaatagacgtctaacgtggatgaaagttcagtagacgttattcggtacatgttaaagtttgaggtagggatggcaacaggtggggtatgggtaaggtacgcctattccacaaccctaccctataaatttttttgagcttttggttgctaaaccctctcaattatcattttacttttatttaaccttctaagtttaaattctggcattaaagtcctttaaactactgaactagtaataaattcggttaactgccaccgtagactgtttatgtgtatactattgtatactggacacatttatattagtgcaccaatattattatttaaaattatttcaaaatttactataaattatataaataaaactaaaatatttaaaatttgaaata

SEQ ID NO: 298576 - DNA, 1747 bp, Cannabis indica
caaaaacaaaaaacaaaaaaaaataaataaataaactaaagtagattatgaatgacaaatctattcaaaatactacgacagcaatgttatgtcatacatatatattttaataatttaatatttatatctagttaaatataaaaagcataatgcaaacaaaagttgatgtcacttacaatgcactattgtatatgtattgattactcaattacaatgcactcgtacaattttgatggtgtgacattgaacaacacaaatctattgtttacctctcaaatttaaactaataaaacttctcataacaactcaacaaaaagaagtaaatataaatgacaaattttatttgatacataaattttgaataacaaattaaaagcaagtagacaatttcacataaagcataatattcccaatcttatcccaccaccaaatcattacttatcattaagtactctgtttatataatacaacatactaacaaaccttaattaattcttattatttgtactctgttttgaatgggacatagtagttgatcctggtggatgagaccttatcataaactttgttcggtgaatataatccgatatatgatccttaaaactttctttcttcttaatcccatgatgctgttgttgttgatgatggttttcccctgctgatgccaccttattctcaacctcagcagccttgaaactgtttttagttcgattgagaaacttatcaaactcgtgattcagatgatcatgaaaattagtagtaattttctcttctgggattttcttaacatcatcatcaccatccttattaccattattattactatgcttacgtttattatggactaaaacggtgttagtggtggtactggccttggtggtgggggtgatcctccgcttacgatgtcgatgaatttcacggcactgtggttgcggtggctgcttctgctgctgccacgtggggtcatcaccggcgaggcttgtcgcgatgagatacggcgaatcatagtcaacagctttccacatactcctaattcttgagatgatgagtctgtgtcgtcatgaatggtgataacggtggaagtagtccttttctccattgatactaactaaccttttcttttctttcaaatatgtctaagttttgggtgacaaaattaagcttagagtgaactacaagtagtacaaaaacatgaacatggcttgttggggtatattatatgattatatatatatacataatatgtatgcatatatttatagagagagggatttataatcgtatctaattagtatgtgtttgataaaagttttcagtgtgtaaatgggaaatgacagacccaaaaaagaaaaagattctttctcgtggaaaaactttgattgggagaaaataaccattcatttatcttacttttctttaatatatatatatatataatataaattttcgtgtgaatttgtgtttgggatcatattcttgctttactttttttttcttttgtatctgttatcctcaactactatataatatgactcatttatgtagtgatgattaacgtgttagttagaactttaagatttattcaaagtattctttatttatagctgttttacataatatgaatatggtttagagttgcaattatatgccaattaaaattggttaacgataaattggcttttgggtattagattcgtaagtttgaaaaataaataatgagaaggaaacaactactatgttattctta

SEQ ID NO: 298577 - DNA, 916 bp, Cannabis indica
aacaaatctgaaatcaaatgaaaaaaatctcaattaagtttcttatattaatctcaacagtcccataataacacaaaatataatcacaataatacattcatatatatatataaaagattaatcaacaaactaatcccaataataagctcataaacacagctgaaaccaaatgaaaaaataccaataaagtttcttatattaatctcaacagtacaaagatcatagaaaaaaaatcaaagttagcaaaaaatttcactcataaaagaaaaaaaaattcagtacattcataaaataatctgaaaaaatattagcaaaaatttgttatattaatctcaacagtcaatacaaatataatataatcaaaataacacattcatatatatatatatgtataaatattataaatattcaaagaattgaaaagaaaatcaacaaaaacactcgcaataataaatttaacaatatcataactaacattatctgaaattaaagagaaaaaaatagaaatatatattaaaaatgaaagaaaagagagaagagaaagtgagagagtacctgatgagaatatgggttcgtctgcggtggtttggatcttgacctctggtggtggagagagagtgccgttgtttgatttgtttagggtttcattccagaaggtgagaaggagagtaacgtgttagggttagttgggttgggctgggttacatgggccacataaggcccagcccgattccaacccatataagttggtccacagcttttttaagggatttttttttaaaaaaaaaacacaaaaaatttaggccaattagcaatttttgcccccgaattttgacatgtattaaatcatgccccctgaacttttttagtccgttaaaaattaccccctcgaactattaagaattgttaaatttaa

SEQ ID NO: 298578 - DNA, 1812 bp, Cannabis indica
cattcctatgttcaaaagataaaaattaaaataaaatccttatcaataatgatatgcatcattttttatttgtatggtttataatagtgtaatctgaaaatgttgtgagtctttcttgaatttgacatagatctactaactatttggccattatctagtctcacagattattggatgaatcaaacttccaatgactgagttgtaagacaacttaaccatcaagttttttctactttgtatgtggaaactgatgtatttagatagatgaaataaggattgagatattaggtattagtggtgtttagtatttaaaagtgatatttataaatagttaacgatattttataatagttattaaaataaataatatgtatggcacttctaatatatgcatttttatactttatagtcaaagatcttgtgcaacagcccttagaaatagcataaactgagtgcatccagtaaatagtgcataaagttgtctatttctttttacatctttgtaagctgattgctcggaaaatcactattttctccaaacattgccaccatggaattttatttacacttgagcaattgttattttgataccccttaatctgtgtgaattggttatttctttttaatcatagcaaactcagcacactccttaaaaacttttgtgatttacattcaaaaaactatttgtgaataccacaaaagttttaggaacaagataagaagctttattatatttgttgcacatcccacactggatatacaagatttttgtaggtattttagatgtattataagtagcttttacttattctataattagaacaaaatgtcttttagataacatatatacataaaatctaataaaatatattgctctcaagtcttttaaaaaattattaaaatcatgtatacagcttgagtttagatgattctactaaagtggccaaataatatgagtcataaagcgaacttagagtactcataagtcttatatcaaaactcaagaacctttaagatagcagttttaggatactcatattaagcacttaagaaatgtgcgtcaactgactcatattgccactattctatcaagccacctctgaaatatttgtataaaataacattgctggatctttattatttcaatgcggatttcatattaaccaaaccaagtaaatacaaaatcaccaagaacataattctaatagaattaataataacaaatagaaaagtaagtattgaaataatggtttttctttccttcctctctttaatgtttgaatcctttatctagcaggacaataacaagagattgaactgtaatacttttatcaacacaatcttccacaataacatttaaattaggggtgtttataaaatagccgatcaaatccaatctaatctataaagtgcggatatctacacttgtgcggattggattgaattagaaaattcaaaatccacacttgtgcggattaaatattgattgacatgtaaaagtaaccgatttaatacaatccacacatatttataaaaaaaaattaaaaaaattatatatacaaataatattctaatataaagaaaatatacatataatataattatattttaaaacttaatagatcaaatgtatattctattcttatatatatatatattttacatacaatttaaaacaaaattaaatatgtccttataaatacaatttttttcttcctttgaatttattattttatttattttaatttgttgttgaagacataaaataacaataatttattttattttattgctagctatgtgaaaaaaaaa

SEQ ID NO: 298579 - DNA, 1748 bp, Cannabis indica
aatacaacatatttttctaaaaatgacctaaaatatttttttttttctatgcccactaaatttcccttatcgaaattctgactttatttgttttctatgtatatacacagtctgtgccaatttacgtttcagaaatggcaccatccaaataccgtggagctctaaacatgctattccaactcacaattactattggaatcctcattgccaatttactcaattactctttgcaaagatcgaaggtggttggggatggagactcagtttaggtggagccgccgtaccagctctactaataatcgccggaagcctaactctacccgacaccccaaattcgctaattgagcgaggcaaaaacgaagaagccaaagatcaactcaaaaaaatcagaggtgtacccaatgtggatgaagagtacaatgacttagtcaacgcaagcgaagtttccaaacaagtcaaacatccatggcgaactctgttgacaaaaaaatacagaccacaattagtcttcgctatcggaatcccagccttccaacaactcaccggaatgaatgtgatcacattctacgcgcctgtccttttcaagactattgggtttggaagcagtgcttcgctcatgtcagcggtgattacaggtgtagtcaacgttattgctactttcgtctcaatcttaaccgttgataaatttggaagaagaactcttttcttggaaggtggaattcaaatgttcatttgccaagcaatcattacaattgccatagcattgaaatttggggttagtgggaatcctggggttcttccaacttggtatgcatatggattggtgttcttcatatgtgtctacgtggcgggtttcgcttggtcgtggggtccgttagggtggttagtacctagtgaaatattcccactcgaggttcgatcggctgctcagagtgttaacgtgtcagttaatatgatcttcactttcgccattgctcaagtctttacagctatgctttgccaccttaagttcggactgtttatatttttcgccatttttgtcatcatcatgactgtgtttatatacaagttgcttcctgaaactaagggagttcctattgaagaaatggctgtggtttggcgtgaacatccttactggaaactttatgttgaggaggaagaagttcaagttgttccccaaagtttggagatggtttagtttaattaattaacctttttagtgcttaattaatttgttagattttgttgatatgaacaatttttatgtttaccttagattttttagaaaattatatattttattatagggtatttttttagagattattatatattaattaattatacagttttctttttttggaataatattaattttacaaattaatcgttaatttaataaataaactgttttcttttatatatttatccttacatttcttggattcaagacctcaataactttaaaatattaaaatccaaagaaaatgttaattaaacaaataaaaagggtgatgtcaattttatgtatgctaaaattttaatatattttgtggtgtggtaactatatagttttcaaattaatattcactataatatctaagcatgagaattttagtaagattaatttgacacggtaattaaatgaatttattcacttcaaatctcaaagcctcaaactatattgcataacagtaaatcagggccggccagagggtagggcagccggggcctcggccccaggcccc

SEQ ID NO: 298580 - DNA, 1828 bp, Cannabis indica
accaatcttgtcttgattcctaaaaagaagaatttttctaatatgggtgacgtgcgccctatttctgtaatgttgcttataaggtgatctctaaagttcttgcaaatcgtatgtgaagtcttattgattttgttatctctgaaactcaaagcactttcatccttgggcgccttatttctgacaacgttatggttgcgttcgaagtcatgcactatctcaagagaaaatcaaaaggtataaaagggtttatggctatcaaactggatatgagcaaggcttatgaccgagtggagtgggattatctacgatctatcatgtctcgtatgggctttgctgaaagatggatcaatctggtcatgtactgcgtttgatagtaagttacactattatgcatggaggtcatcgtatgggtcctatccacctttcgagagggattcgacaaggggatcccttatctacatacttgttcattatttgtgctgaaggtctctctggccttatcaagaaacttgagtctcaacgggtgatacaaggttgtaaagtggctcgtggtgcaccccttattactcacatgttgtttgctaatgacaggtatttgttttgccaagccacaacaggggctgctataggagtcaccaatcttctacgggtgtttgaaaatgcatcaggccagaaagttaattcaaataaaatcaacaatttttttaaacctcaacacagatatggttgcttgtgctcaaattaatatgtggcattctcagcatgccagaagccacgaaaggaagcttatacctgagactaccgaacattattgggcggaataagaatacagtccttggttttttgaagaacaaggttattaataggatcaacagcttggatggaaaatttctctcgcgtgctggtaaggaaatactcctcaaaatggtggttcaatcgctccccacttctgctatgagtattttttttccttcctaaaggaacttatcttgaaattgaaaaactcatggtacgtttctagtggaaatctgcttctagtaaaggtcaaggcattatctggatgtcatgggataggatggaaaatcacaagcttgatggaggtatgggttttcaaaatcttcatgagtttaatattgctatgcttgctaaataaggatggagattgatgtgcagtgcatacactcttgttggtaaagttttttaaagctaagtatttcccgaattcagactttctttctactgagttaggagataaccctagctttgtccggcgaagtatttggagtactcagagcctagttcggttgggggctagaagaacggttggcacaggagacagtgtgagtatcttacagcatccttagttgcctagatcgcaaaacccttatgtgacaactattcatcctggcttagaaaataaaaaagttagctcactctttcaagttgatagtcgtaccagggatttagatcttgtccttgatctgttcaattaacatgaagctgccttgattttgggaattcccctcagtcgaaacgctactagcgacacatggtcctgggttggtgaaagttcaggtgtgttttctgtcaaaagtgcttataatcttattcaaggtcagaagaaaacacatgtgaataagcatacaccaaatttctggcaccgtatatggcatatgcaaatccccccaaaggtcaggaattttttatggatagctgcctctaactgtcttcgtacttgcctaaaccttatcacaaggcatgtagagattgcaggaattattttaccaggatctagatttactaccatgtatgtttcattaacatccta

SEQ ID NO: 298581 - DNA, 4846 bp, Cannabis indica
taaattcagaaagaaagaaaaaatgcaaaactatgagatcagaaggttatccgtataaaatagtacttgaggtcttcttcatgaacaaactaattattgttcgctgtgatgggaaacaaaaaggtagatttaatgaagaggatggggtatcattagatttacaacctagaatgccagtatgaggaccaggtaagcacactaaaaacaaaaaattgaagacaagagctagttcctttcattcatttgcaatgacaagagcatagatacaaaagtgatgtaaactagagcagaggaaaaaaaaacatatatatatataggaaaaacctttgggatttgtggtatttctccagcaaagcaatcagacgtgcatcacgtgatcgctcctccagaacctattgatatgtaaaggtggcacattaattctagtagacacttggaaaatgcttcatcaattacaacataagtgttgagaatttatacctcaactatctgcataacatcatggttcgcagataaatcctctgaacctataacaacctgagacaatgtttattagtacttgatagggtaattatttaattgtcattaaagatataaaggtcaacattccacaccttaaccggatttggatccatgaattcctgagctaattgatgaacttcgaacggccatgtagcactgaacatcaccatttggcgaactacaccatgacagtgaaaaaaaaaattaagagagagatctatataaacaaatgaaaataaggtttaataaagtgacatatgcagaattgtaaaagctaaaagtatttggaattagagaagaatttctatgtaaaacgtaaaagctaaaaaatattgaaattagaaaatatattattcaatgtaatatataatctcctacatccctcaacaaaatactccaatggacgaaaaatgccatatatgtcagacaaatgattgatttaatctgtagacaatacccagaaaacttttccttgaaaagaagtggcaatgaaaaattaaaaccaccatgagattaacatacaaccagtaatattttcatagtcatcagaaacttcaattcatttacaagtttttcaacaaagacagaaattacaagtgattcgtgaaaacttaagtgggagataaacatgttcaatagtcatctgaccaactagataacttgaaaataaagacattatatgccacacacctgaacatgtctggctcaatatgtagcgaacttctggttcaaatcccatatcgagcattctatctgcttcatcaaggacctacagaaagtaaccgatcattttaactttccttaaaactaaatactgctacagctatattcattaatccccatcaaaatattatatacaaataaatctttcgctaaaaaagcagacaccatataacttaaaacatactcacaaaatgaaaagtataacatagtggatctcccagtaatagtattaatggcaccatactactaggaaaacaaactgccattgataaaataaaagaccatcaaaacaattaggtggcttttggtttggtgtaatggaactgtaataataatagaaatggtaatggtaatggaatggaataagaatggtaggggaaattgattatgatgtttggtttatgttggaagaaacattggaataaaaattattttgttgggttttgtgtgaaaatgtaataaaataaatggtgcattgacaaaaatatcactattttaatttggtaaagtaaatgtataagggtattagaattatttcatattaaattgatttttataagctttatagatgtaaagagtattacaatatccaatgtattaaggattacaatgggagaagattatatttacaactaaaatgataaagtaaacatagtaatggatactttcattccattacaaaacccattgcagcacaccaaacatgccatagattgtttataatatcaatgaaagcataaaatacatgaacacccagagaaacatttcagaatgcataaactcaagggcaacttatatgaatgtcttaatataagtttccacttaccccaaaagttacgtccttaagacagcagaaccccatctcaatcagatccttcaaacgaccaggagttccaatgacaatatcctgaaagagaataattttaataaattaagttccagatataagcaaaaaaatatgctctttctcttaaaaatattacagatgaacagccaaaagatgccatctctaatgcacaaagctggtgatggatagagaagatctccttccagacaataaagaaatttcaagaataaataaggatatccctgaaagttatttaaattttgaaaaacaatatattcgagctgaaaattacttaaattgttctaaattctagcttccattattagaatcaggaagaaaaagaagataggtgtagccttcaatctacttttgtgcacaaaaaccagattaaagctaaaactatttaacaattgcagccagcctaggtcagcatacaagtttataaggatacatcttaaatgatagtgtgataagtcatctaaaacatgactattatcttcttaagatgaaaagataaaagagcagcatttcttacaacaccagacttcagagcagttatttgacgttctttggatgtccctccatacaagacaactgaagtaacaccacaaggcttccccgcatcacataaaacatctgcaatctgccacccacacaaaaaaccaaaagatcatcaaatttcagaaataaatctcaacgtatcatgagaagaaagtacagttcatgtagaattagcaaaagaataataagggaaagatactaaagctgatgctgatgctcgtatcaactcgaaatcgcaaacaaaaatctaagccaagtatttacaaaaagacaaattcaaaatagttcaacttgacatcattaagagtatctatactatctaaggattgaaaatattctaacccaagataactatgctaaatactccgtgctgaaagaacatgaaactgggtagcatccgtgatattccatcattagaatctgtaactaaacacaaagctcaagcagctttatctcaccaccaaaagcttttcttatgcaaaaactgtttggtttcactcgaagatgcaaataacaataataataagtgaatacgttaattcaacttctcttcaaagatgcataaactcatcacattctaatgtacaaaccatcttatatatcgaagaaattttctagcattagaactaagtactcacaacgaaacacaataatatttatttaaacaaaaaaacatgtatcaaagcattatgtcccataaatgacttgtatcaaagaacacatacttgctgagctaactccctcgtaggtgacattacaaggcaaagcggagtcctccctcttaagaacttgccatcccgcttcttcataatatgcattattgccggtaccccaaacgccaaagtcttacctaaaaccgaaaatgacaaaagattcaccacacataacataagaaactccaaaccaagaaacccaatgaagaaaactcacccgacccagttgcagcaatcccgataaaatctcgaccgtccaatagaaaaggccatgcccgagactgaatcggagaagggctgtcgaaattctggcagcactgaagaacatcactgggcagattcgcctccttaaaggatttcaaaggagcgtatttggcttcttcagcgtccttcccagtaaccaaaacaatctcatctttgaccggaacatttacttcaccaccgccattaacgatatttctctctggcttctcctcctctacttccgtttgtttctcattctcattttcatccacattcttatgcttattcttctttttcttcttcttcttgtttaactccttggaatcagaaccttcctgggatttaatctcttcaagacttctctttggggcatggttattctcttcttcgatattaaggttttttaacttctttctgttcttcttctcagccttgagctcagggtcgatgggggtttcacaggcttctacttctctttgtttacgacccatccccatggctagaattgagtcgaggttaggctgggttgggcgaggcgagttgagcttgagaaatggctgataggagggtttttgttaattctatattttagggttttggaactaattttcattttgttttccttttggtccctatgttttactctatttagcattttactcttccttttggtccctatgttttaatagctttttttttttttttgacaatgaactttcattgaaaatactcaaaagtttatacatagagaaaagatgaaaaatcatctatccaaactagtttatcatccaccctgagtgcacgaactgctaattcatgtgtacaataaacatgaatcagagatgcctcaggaaaactggatagcaaactagcaaaaaaatctaggaaagatcctactttaaaacaaagaagaaggatctcctagaatatacagtaattgaaaataatcaactagactcaaaagatttattaagtagcccaatgcaagagaccaatccagtgcaaccactaaagctacataagtttagcttctgctaatctgctgtgaacctccctacaaaaccaaagaaaaataaataataattagaacatattataccaatgaaaataataataataataataatgtaatagataaaataaaaaagatagaaacttatctccaactcgaatacttgaagagagatcttgttcaaactcgttaaatttttgccaactccaaaacataaaatcttac

SEQ ID NO: 298582 - DNA, 2679 bp, Cannabis indica
tttgagaaattcactcaaaattcacaaaaattaacttaaagacatttgacaaacaaaattagattacacctttctaatgacactcatatgaaacaggcaataatgtaaaaaaaactcctctttatatggctgagaagtactctttgctgcccttggggtctggcttcatggacttctccccaggcttccatccagcagggcaaacctcatctgggttctcctgcacatactgcaaggcctgcagacaccgaattcaagcaacatgagtaagcaatagaatatatatatataacaactgctctaagtatattatatatagtatgtatagaaaaaggagaaactagatcctgaatgcattacctgcaacgttctctttgtctcatcgacactgcggccaatggcgagattgttaattgtagagtgttgaattacgccttccttgtcaataatgaagagtcctctcaatgcaacaccctgacacagaaaaagaagattgctaagtaatgtatataatcacattctacagctaaaacatgtgaaatcctccatatgcgtatgctcaaacaagtttggaaactagtcgattaaacaatgtggtatatttcttttcctaaaaccatcaagccataataaatacagtctaatggtcaacacgagcagtaagaaaagataagcactgacgttcatgtgtgttgatgggggaatgtcttcttttgcacaaggaaaagacagtgtgccttcaaattttaaagagcttagaaaataattttcacattgtaagcaaattaggtccccgactagcacagggcagataaacatcaagaaaagtccagggagaagaggtttaagaatgagtactacatgaatgacagtaaaatgttttactactgtaaacatgttcatccttcctttatgagatttcaacagaactaagaaattatatatacctgatcaggaatcaacacaccatacgattttgaaatagatttggtaacatcagagacaagtggatagttcaaatcaccaagaccgcctgactttctgtctgtttgtacccaagcaagatgtgaaaactgcataacatgataaaatactaaatttggtttcacaaatatgaagagatctaaagctatcgtatttgaaaataaaagaaaccattttttacttaccacactgtccacagaaacacccaaaatttctgtgtttatagcctcaaactctgcatggcggtcactaaaagcagtaatctctgcaaaaatggattaagtcacaaagaagagtatattattgagcatcaatatgcctgaaatgccaaattaaaattgtttattgtccaaataaaaaaattgtttattgtcaacaaacctgtaggacaaacgaatgtgaagtccagaggatagaagaagagaataacatatttcttcccaatataatcagagagtttaacctgataaaaaaagtttaattagcacaatgcacagcttaagtaaacagaatggcaaccagtgtattgggaatgttatggcaatagttagttaaaaatgcatcttccatttcatttggaatacaaaatttacaattttaattttgaaaaaatttgtatgtccatttcaaaaaagaaaaaaataattgtttgagaagaataattaggtaatgacttataggattgaaactcgttattacataagaatacaataataactaggaatgaagctttaattatgtggtagcagtattcaatgatgataacccactcacgtggtgaacagatgatgataattgataaatgaagtctcaacattactctataaaaacacttcgttcccaaattaacattttcaacaaacccatatacaattaaaaatctcaacaatccccacaaaattaacaatgtaccttgacgaattcctggtcgaaaacagcctccgcttcaaaatctggagccacatttcccactagtggtagttcactctaaaacaaacccagataaaagaaaaattcacaatttaagaacataaaatgcaaacaattcgactaaaataaagaaatctaatcacccaaaaaggaaaagcacacaaattggataaagaaaacatagaagaatgcagacttacagaagccctaacaacgaagctctttctggcatgagaggaggaggagcgagagagagaagatgactttgggaccgccgattgaaagggtttgcggagaccaacgaaggatttgggaatggaaagagatggggaagcaagggaggaagaggagtaagatttagggtttaaggagaagagagcagtggaagctgcagaacaagccatgttgattgaagaggaaaggatagagtgagtgagtgaggaatgagtaatgaggataaagtagtgtgtgtgagctttatgaatgaaagattggtgccccaagggttttatgtctctagcctaactggctccatacattttgggcccctttggctaatgggattggaatacctaaatatttttgaaaaaattacattatatatttactttttattttttattttattactctttaatttatatttaattttataaatcatgtctattaaattttgataaattatgtgaggttttatttgatactttaattataaaaaaaagtatttatcaattaaattattttgaagttatatttagttaatgt

SEQ ID NO: 298583 - DNA, 2135 bp, Cannabis indica
tgatcactttttaaggtcaacaaattatttactagagtaaataaaaaattatctttaatataatatagtggaatcaaatatttttttgaattaagtcacttaatatgtttttatctaaaaactagttctgatgatgtggacatcagttttgatatgtggcaagaagaaaaacaatccatgagccatgcatcccaagacaggacagttgacttgagagctaagccctaacccatcgcccatgtttacataaggggacattcaagtaggtatttagttcctccgaagtcatttccaatggaccatccttcagtagtctaatctaacaagaaaagaagactccaagtcacaaacctcaaagttgtggatgtcaactcaacatcctgaaagtcgacctggtgcctaatgcctaggttgacaattttgtgtcctagaatgcaccattttagtccccaaatctattatctccataaaaattgctcagcctttgcactaaaacacacgagagacatgccataagtaagctacaagccctaaaacaaatattggaacacttccaatctggagtgctcgggcacccaacgcccaagttgacattttcagtcaagttaggcgtatgacaattagaatttacctttttgggaatttctttggactttgattcctaaaattcaacaatgaacgacgctaggacttgagttttttacaaatcgtgctcaggaaagacaaatcatgagaccaacgcctaggtcgacatagtgtgtctcatggacgctaggtcaccagctcaaatttcatgagtaataccagtgaaaatttgataaaactgaattaatgtgagtaacttccactagaaagaaggacaagcataaaaaagatgagatccaaacactttcaacctggatctagcgcccaagttgacatattgttaaccttgggcgctttcgacaagtttttcatagatattttctaggtattttctttgaattcatcaataacaaagatacacgtgcttttgaacatcaaacgagatgatctggtggccaaaagcactagtcaacacataagttgacatgggcactggcgacgaacacccaatttgacatttaacatggtacacatggtttcgttactcaaatgccaattttttccaataattgttttggttccaaatgggggaggaacccttttttgtaaactaaaatatgatcaatgtacgaaaatggcaccgagagggccagagagcagctcctagcacccaggttgactctcaacttggtgggcatggatctgcttgtccaattttagttttgtctcgggcatcaaggtaattttccattgcaaataatatgtatagcatgtggcaagttaaattcatactttgatatttcaccttacgacagggttgaatatcaacaaacaagttacaaatcgacactcgatttgcgaacgagaacaatttttgagaaccggtgaacgacttcactcgtatcaagaaattagttaagtgatgaaataatatcatttagagtttgcaaaatatgattatgacatgatttcccaagtagccagcacccaggttgacatctgaaaatttcttaatcgtaggaatgtcaacctggtcgtaggttgcggaactgtctatagtaaatcaaccatatctcactcaatacaaattcgattgacataattacaagtttttggaaagatattttcaagttcattatacacatgtcgtatactcatatctcaattctgaagtttctaagtcaaaaaatcactcccaagacaaagtgcgcttttagtcacaaataagccgaaaacgatctgacagacgtgatctgacctccaaaaatttacattcatcatctgaagtcacatttgagcatctcaatcattggatcacaatcaatggtaaaaataccccagatgaaatgtaacaccctaactagcataggcgtgttaacgtgatttttaacatactgtgcagctcgttgctaatcaacgaggttattggaaaacgtgaataattaaaattttgcttatttagttaaaatataacaaataacttttataaactttcaggatcccgtttacaaaatattgttacaaaagtttactacataattacaaaatac

SEQ ID NO: 298584 - DNA, 1523 bp, Cannabis indica
gggcatgcgatatgtggtgcagatagctagtgaagcgatgtgcaaaatgttaatgagcatagacaatgggcctaaactagagcttttgaggaaggaagtcattcatgtttgcgaagctatgcttgcattcccactcagatttccaggcacccgattttatatgggtcttcaggtactacttctgttctaatacccaatttttctttatttattttgtaatgtaagctaatttggtgggttatggttaaactcaaggcaagaaaaaggataatgagcatgattgagaaggaaattagtgaaaggagaagtggtttgggagtgtgccgtgaagattttcttgaacatttgttgggagatgatgaccataaagggtgtcatgatgatgctacaaatacaaatagctcaacattatcagatgcagagattcaagacaacatcctaaccatgatcattgcaggttttttttttattattattattattgaagcatacccagcgacttgttatgatcattgtagttactacacatacaatatttagagatattgtacatgtacaaaattattatatgatgtaggtcaagatacaacggctagtgctatcacatggatggtcaaatacttggatgagaaccaagaggtccttcacaaactaagggtatatttacattattactattttaaaaggaacacttattaattattttgttggataaaaataaagttacaattttaattttcttgataataaaattaatgtgactacaattttattacactctgaaaacagaatgaacaatttcaagtggctagcaaaacaccaaccgggtcgtttctcacattggaagatctaaacgacatgccgtatgcatctaaggtcacttttcttccccctttcttagtttcttgacatattttactttttatttttatctaaagcaattaaaaaagttttgaattgagtgattatggaacaggttgtgagaagagagatgcaataggagaaattgtgctatattttaatgttaaacttcacatagattatgaactatctaaatatacattaaacatcattgttcataatcattaaaaccaaaatcaatactttatttagagcatcacaaatgtaaaacacatacctcccatattgctattctccattttgttgctaagacaccaaaaccttcaatgagaatgaacaccaaattggtagaagagaacctatgagagcaacccttttcttttcaccacacaccctctctattttcatactaaacacatattaccctttttatatacaatacttaaccctaaggggttatattaggcttattggggtaatgagtatcattagtggtggactataatttaatgggccaattatagttttagggtgctcccatgtgcctctaatacatttattaattattaaccatcccattatggtagtgaataaatattgggcacatagttaatgattgtgattatggtattatattagtccacaaataaataattctaaca

SEQ ID NO: 298585 - DNA, 2299 bp, Cannabis indica
ttttttttttttgttaacctttgattatcagttctttgatgctgctgttggtgatattgcaattgtcacaaacaggacaaggatagtagatttcactcagccatatgttgcatctggccttgttgtggtagctccatttaaaaagctgaatactggtgcgtgggcattcctgcgaccatttaatggacttatgtgggctgtcactgccaccttcttcattgttgtgggaatagttgtgtggattttggaacatagaataaacgatgagttccggggccctcctaaaaggcagcttataaccattctctggtgtgttcttaagttgaataatacgtatttagacacacctaatttgtatgaaacattttatataactcatttactcttgtacatgctgatgtgattgatagagcttatgttttgtatggtcatgcaaaatcttaccatttgagtctagagcttgctatagaatcaaatggtaagatttcttagcaattagttcgttgctgataactttcttaatgattagttcatttctgataaatctcttgtttgtgaatctcaacaggtttagcctctcaactatgttttttgctcacagtaagtgttcatgtctgtctacagtaaagtttcataaaatgaggtaattgctcaagcaaaagttgatctgattgagttcgttttgcgctatccttcttgcaggagagaacaccgtgagcactcttggccgttttgtgctgatcatatggctctttgtggttttgatcataaactcgagttacactgcgagtttgacatcaatccttacagtgcagcaactatcttctcccattaaagggattgaaagcttgaaatccactgatgagcccattgggtatcaagtgggatcttttgctgaacattaccttagtgaggagctaaacatacctaagtctaggcttgttccccttggttcaccggaagcctatgctaaagcacttcaggacggtcctaagaaaggcggcgtggcagctgtggttgatgaacgcgcttacattgaactcttcctctcaacacaatgcaaatttagagttgttggccaggagttcactaaaagcggctggggtttcgtgaggatctgatttacagtcatcattctgttaaaacttttatttttttttaatctaaatatttagggaccagaaaactatattaattgctaatgttggtacccaaagggacttgaaactcagaccttgtgggaggactatttgagctaagattttagccttttatctgaattcatgacatctcttttttcctctcattgtgacaggcatttccaagagactctccactagcgattgacatgtcaaccgcgattctccagctatctgaaaacggggatcttcagagaatccatgacaagtggttgatgagaagcgcgtgccaaatggaaagtgctgaacttgaatctgatcagcttcacctcaagagtttctggggcctctttcttatatgtggtgttgcttgcttccttgctcttctcatatacttcttccaaattatgaacaaactatggcgcggttctgcaccagattctgttacaggtggttcaagtgatatgaaatcagggcggcttaggcgatttatatcattgattgatgagaaatcagacaactccaataagaggaggaaagtggagagatcactatctgaaaatgataagcagaagcaatgggggaatgatccacaaacagaaataactaacagaaatagcattcacaacatcaattaacttatgttacttgtaaggtaattggtggtcaaaactctatttgttaatattttgtatttattcagaaaatgtatacacgtgtatgtatgcagcaggaaagtggaagcaacatgagaagtagaaccccatttgtattcgatccatttcttgtctaatacataatcaaattaaaatattataatagtagcaaagatttgagtgttagaaacaacaacatttgtgtattagatattatatatatatatgcttatgttagctcatcttctttttctttttccacaagttgagagtttcccaaataggtaaggaaatttttaggaagggcatgtgtgggtgcattggatatgtaaggatatgcattggaaacttgatactttatgattatttatttgtttatttatttttgaaagagttatgattcttacttggtagttagtacttagtatacgctcattagaacataattaaccatcatcaaaatgtcatttttaacaaaaagactataacaatctctctctctct

SEQ ID NO: 298586 - DNA, 9010 bp, Cannabis indica
ttatgtatagaatttcaaatttcccgatacaaattgcatcagcatgaaaatcactacaactaaaaaaaacaaaacattagttccattctaattcacttcaactaagccatatatggggaaggaaaaaaaaaatattgacatattgtacattacttacaaaaattcaccatttctcgtgaatcatttcaagtataaccaacccaaaaaatgtcaatcaaagaatagggatttttttctttttttgaacttttaaaaaagccagagaacagaatcaacatttcacaaaactttggtagtaaccgactattagtatttaacctaactacacgccttaaactttagtctttgattctggctttctgatgactctgaaaaatgataaaaaggctcgaacttgtaatccatttcaggatataccaaaacttgcatatcatgcagctatttctgtatatatgtttttcctttctcattttcttccactttatctgaacctcctttcccaccctgctctcttgcacccccaccaacactctccctccgtcggccacatttactcttaaaggtgaagtaaaattcttagtacagttttttcacatgagatatagaaataaataaataaaaatcagtattcgtcaacatgccttcgtcttgtcctcaccatccattatcaaatgttgtcatgaaattcacatcaatggcaggtaagccccaccatgccctcttttcagaacaagaggtccagcattttcagggaccttatccaataacttgttgcatgtattaattacatcaccaaacccagttgccatttgagctaggctatgccgcaacttcaaatccctagtcctccttaataagcatctgaacgatctccccaagtatttcgcccagtctcctggcactcccccagtaagccaaactgaaaactgggattggtctcctcgagcagctaactcggctctataaaacttcgccagatcagttagcattgcagactggagcggtagaacagccacaaactcggccacaaattcaagtagttctggcttaaacatctgattccaaagtaccaaagcccactcacttggctggttaagcccataggcttcagcaactattagtgcctcttgaaaacgggactgctcaactaagactctcctggcatttgtctctgacaggtaaagccattgaatgtcaggcatccggatttggagcgacagaagggaagcctgagcacaagctctacgtgctttgttgccagcatcaagggaggagtgaacttcagcagcttcaatgaaatagcgcatagcatctaataggtcttcattctggtcattgtctttacgaccaaaccactgcccagaggactgatctgctcgagattctaaaagagcagctgtttcatgtttcatgtcaaagtggttgtagacctgcaaagaaagaacatgcactaaataaaaataaaaaatagtaataaatcaatcaacttttatgaaacatgcatgtaacaaaaatatttgttctcctcttggtaaaacaagtgatactagggaaagaattaaagagctgattttttttttcccgtgaactaactaaatctatttataacctggatatgataattaagactagaatatataatacaactaatccaattcatagtcaagcaatggttatttgttggacattctcttgaaaaatacagtacatgaatttgtttatcatgacagaaaagaaccatgaatgaaaaacaaaccatcgcaaatgcatcaacatcattaggattaaaatgcttcagtgatgtaagaacagccatgcgaaaccccctgacggcgctagtgtttgtgtctgtggcagcagaatacttttgaagaagaagatccagttgaccattttctataagaatgcctagtataaaattcagggcatggaagtttcccacccctgtaatgaggcgagccagacatgaaaaatcaccctccaagacataagcatccaccctggttgctgcaagggctacaagaacatcaactccatcaaggcaagctgatgatttgtagaagtggtgggacaaaataagaagctcaacctgcaaatatcatattatagcagtcaaataacatttctctcacaagtcaccattattgaccataacttattttcaaattttcatttttctcttcccctagtagataattcttttccttaatttcattagtgccttttgcaatccaattgcgagacatgaactgaaaaataagaacaaatcacgcgtagaagaaaatgacccttcacaagcctagacaagacaaatataagcatacagtataccataatggtaaaaagatgaagacccaaagagatacaaacacaaaacagtagacataaagcaaagaagtttgtaatatagaaacgaaggaaaatgtatttagaaagaaaatcataggttctttgagggatctagcaacctcccaagggttaaaagcactacctcaaaactttctcctccctcttatcagccacttgtctacatataaccatttagaccacccaatccctatgctaacaatctctcccatccccatagaataccaaatgtccagtcaatttcaaataacccacctaacaaactccaattgatagtcttagcctacatgatgattgggaccaaacataatatattcaactcaaacattgtctttactcctattattttgagcctcatctattgaaaatataggttgcttatagttgtaacatgggtgctatagaaaaatatttttctttcaggcctctagcaaaagtaaatattatgttgtaatcttctcacagtttaggactaagacagcttttacaaaagtcttcatcatcatttagtaatgcttccacataaatggtaaacaggattacttatatgaacttatacctcacatgcatgcggtatctcttgtccagtaattaccatacgcatcaatgcatgaccaatttcaggttcagatgggcaaagctctgcccacttcaagaaatctgaaaatctccataataagggagcaggtccttcctccttttgagaatccatatatcccccacgatgtgccgccagtaagccctacaaaataaaaaaagcaacccaaggaaagcagatttaaatatatttccaagtttctgtgttgataggctagagaaattttaaatttaacagtcccctaaaaacagatgaaaagaatatcacattcattgctgactacaattatattggtaatctaaaatacgggtctaatctggttgcataattaataaacgaaacccaaactgtgataacaacacttgcaaagtctgcatgaaaaagaaaagaaaagactaatatatatacgtatattatatatgaaagaaacctttagaaaggactctgcaagaatttgagcaatattagctgctggcatggaatgagttttcacaagaagatttgcttcctcaaatgattcttgggctttaagtgaaagcagctgtagtaattcaattggctgtttttcaaatgcttcagcgaaaaaaaggcccaagacatttgcagctttcacaactgctattattcttttacacaggccacgacctctaccttcaatgaagatggctgctaagctctctaagacctaggcatgcacataacaaagatacaatatgaggatatcaagttgatccatcaaataagaaaataagtacagaaaatggtaaaagagtaagaaggaatatttaaacaaaggcacaacataatacttactcctacttcacatcacaatataagaaaactagatagagtgaaatggacaataacctgcaccggttcaatctgatgttgatcagtcagtatgttatatgaatgcataactaaacgtatttcctcatccaacattgatatggatacaagttcacttggagttgaaagagcagcaagcttcaatgcagcatctacaagtatgaattcagaaggtacttgtgctggagatagcttatgttggagttgcttagaagctgatatttgtccaaactctaacagtgaaagaacagccctctccaattctgcagttccaactttttcctcccatctagaaaaagacatacctgttctgacattctcatcctgcaatggaatttcatttttacagtagattgaacagggaacttcgtcagattcgacacttctgtctactgtatcaactaatggccgtctagatgtcacaaatccctttgctcttctctttgtcttagtagttccacctactgtagaaaacaaattagcatctgacgggtttttgtaattcccctggtaattgtcccttatgtcatgtttgtctgtacttctacttttgcttgtattaatatgattatccatttttattattatatttgctgttcggtcaatgatactggagcaaattttattaattgggtcacgaatggaattggtcaaattgagttctccttcgctcttcacttgtgcttcggattctacggccaagagccaaactttagtctcaatttcccgcagaagattcaatgggtaaactctggcaaatgcatcacacgggtcagaaaatattttcttttaaaccagatgtcaagggcaatttaattaagtagtaaacttacgggcttgacagggttatcatcccacttaaccattgtaatgaaagcaataacagttcgtgaagctctcttgctgggagatccttttccacagcttctgcatgtttaagaaaaaataatcctgcctggaaaatttgatggcaaattatcttagaattagaatgaacatgatgttaaactaacttctaaaaggttaatctcagaaagtagttaagattggtttttatattttatctttttccttttgtgtatagatcacgagaaaagtatgaacgacatagattggacaaagggaatagtttaattaaaagatagtccagaggtgaaaatactagataatttagagaacgcaattgttgcgcttacactcaagaacatctactttgactgtcgttgtcctaagaatcttattatcttagttacaagggactacactaatgattgttacattctaactgggctctagccaagtgccaatatcaagttagtttacctgtaaagcagggaaagaatatcttatgaacagtgtctgacaatggccccataaagcaacccgctcttctggaacatcccaaagaaattccttccattcggctaccatagattcagcctatgagataggtagtttattaaaaccttagataatatctcttattagcagataagaaagttaagagaatgtgaaatacaacaaggaatttagtagtacctgagtttcagtgacatgatgaacagcagatttccatggtccaccactggcctccaactgcttggcccagttacgcgcttggtcccaaagaccattcttttctaatgctgtgagaagtgatgcatcatctaaagtttcatttccaagttgtaaaagctcatctttgcgtagtgaaggctcagctaaattaattttccaataaagttgccggtaatgcgtagctgatgatcctccatcaccgaagtcagtcacagcaagaagttttagcaaacatcttttttcatatggggatggacaagttaaaagcatagcatctgcagctttaacagccatggagcttatccatgatattccaatctggtcttctcttcccatattactctgcaactgtgctggttcctctttaatccgggcagaaaaggaacccaaatgtgctgatgcttcagataggcgcatttgtgaaaatgcctgaagaaaaaaaaaatacacaagatatttgaatttctaggtagaatggaattcaatctattacttctaaaatcaacacaaactaaactgcacaatttcagagaataacaagtaataaaatccacaagcatttattagggaaacagaacacattataaaatatggatgcaaggcatcaacagtgtaaaatgtagtataatagtttgaccctctttgaagaatattactaaccatgtaggtactgacacgacacttttacaaatatgtaaaatcttcacaaaaaaatacaataaataactaaaaataagaaaagacaggccaaaaaagtcctaaaaggtcaaaagccccatagcacaaaaatttgagttctcaacttcttattgataacatcaacggcataaaatattgtataaaataatccaaatgtacgaggacgcatgctgttgagattggtttaatatgcatgtcaaaagatcaagcataaagtgatgttggacttttataaagtctcacattatgggaatgtgaaatgttatagggaataagaaattgtgattctgggcccaaagtgttcttataagtatataagggtacccggaaattttgggagccatcggagatggctaagtgtgatttctcaacttaaacagcaggtttaaaagaaattgagtaattttactaatactcaatgccatataataacattaaagcagaattgtatgttagctcacaaacctgaagagcacgtatgaaaggtaagaaagaacaggaaggtaggaacatttcaaatgcccttaacaaaggcaagaataagtgttgttcacaaagaactgcaaccatcttggagagagaaacatgtccttcatcagtgtcatgaagttctatttttctttcttcttcaaccatgaaatctccggcagcaaatgcttttacacccgtgggactagttgaaatatcagtagaagatgactgatctcttggcatggagcccataatgcacctacgttttggattccgacggttgtaatgaattgtaagcactctgcctcctgctggaagagaattagtagcttcaactgcagctgcaacgctatccgcaatttgggaagcaatatcgtttaccttaatggaagacgtttccctgtaacaatacaaatggagtgagttccaaactttcaacttcacaaaaaataaatatacaaattatacagttgtagatgagaaaatgtaaacatttataaagcaaaaatatcatctgcaaatgcaatcaagaaatctattggtattgcttaaaaccttgcagcagttatttccagccacactgtcaagcaggacaagggagaaacatctgaaaagcatgatgcaatcattgccaaaattgaccaggacaaatcctttgctttcttcaggagggcttccccaggatttttctgcttctcacattctgctaaaattctaaacaactcaacagggaaacaaatttgttcatctgaaaagaaagtttcagtccttttctctgtattgtctgcataagatgtgctagcttttcttcttgactgcatccccttcaaaactgttaatatgtgagttctaagccgtggatcactaaactcctttgatgcctgaaaaatagaagcataagaagatatttaataaatatttaacagcacagttcttacattgttctgaattataatcgtctaacgtgcaataaaatctgaacatggcttaccacattaattactgcatcaaaaggatatccaccagtctgagcttcagataaaaatccaacctaaaagaagagaatgacatgataagatctcaaggtgataattcaatataacattagaaaatgcatgcaccaaaattggagatgtacccaatcattgtctcttgctagtacagcaagatactttgtgctcaagggaagttgatgcatctgacagaatactgtaactaaattccagtgctgactggcagctttttgttgagatctcaactcaattccatcaccattgccactcaaaagccaagatccacatgtctttccatccaccatcaaagggagactgaccttttctaaatgatgcagaacatgaatgagagctcgcgaggattgtttaccactaactaaactcgcaggtttttttggctttgttacacttccctgatgcagataatcatctgccagagcacgagcaagagactcaaccatatcaccttctcgggaaacagtattaggtgaaagtttcctttgattatcattacttccattagacttgtagtaagatgatatccgtcttaaggctgcgatatccatacggagcatacttgcagataagccacagagctctagaagaaaagaacatgaagccaccaagatggaatcctcaaaatgcataatagcaagtggcacaacctgtgaattcaagggccaaaagagattctcaaaatagatttggtactacaaggatcatatacataacacatgtacttttcttttcattttacacctctcatatgagggtttcataattaataaatcaaacaaaaaacattgaaatgaaaagcatatcaatccttacagatgaaagaagagagatttcagtttctgttagcggtgcaagaagtctttgcaaatctgattggatatttgtttgtccttgtgtcaaattaccagattgtccttctgattttaaattttgaattctaacagaaagaagacggttaaaagaagataaagctcggcctcgatgcaagtggtgctcaagcccaagtccagtttcctgaagtccatggaagcaactaagatcagaagcagtgtttaggtcaaacagaagaatcaagatcatatgcaagtaaattgtgaacattctaaatgcatgtttctatctgtattttttattttaaaagatatagcatcaacctatttccacccaaaacagattatcctagcatataaattacttaattcttctttccgggtgaaagccaatggcaaactagtaacaggatagacctggggatgcagtttatatcataaatctcaacagaaaaatggactaacaaagtcagggccactgacaaaagaaaagtacacacaaatgcaacagtatgaaaaaaagtttagctaactgaacaaaaaagaaagcgatacactattgatccaattcagttcttgaaagaatt

SEQ ID NO: 298587 - DNA, 3972 bp, Cannabis indica
atacgcctaagttagttagggtgttacaaagaataacatctctatcacgttcattaaaaaaatctgagagtacttcttcatcccaaactcattgattgactacaaataaactgtttacatatttatcatgtagcccaaccaacttagaggtaatataaggatttctatttacaggcagccaaggatccacacaaatccttacattgtctcctgaacccactcgctttctcaagccctttataatcacaaatattgcctctagaatacttctccaaatatagcttcgatttttccccaactcagtatcaagaaactcattgtttggaaagtatttagctttaaagacttttgtaacaattgagtcaggtatcatcagaaatctccacgcttgttttcccaacatgactacattaaaatcccacatacttttataacccatcccaccctatttttacatttagtcatgtttttccaactcatccaactaatacctttttccttactagatgatgacttccaccaaaacttagtcatcattccttctatctccttaaacacacccccaggtattagaaaaatattcatagcataattaggaatagattgaacaacatttctaaacaaaacttccctccttgcccgagagagcaacctcccatcccagctacttatcctttttttgcatctcttctttcaaaaaatccaacacaacattcttatttcttcccaaaatatttgacaacgccaaataaagctattatcatctgctttcgtaacattcagtagcgcacaaatctattgttttacttgagaattagtattcaagctaaagaagacagaagacaactttgccaaatttatatgttatccagaagccttttcataactgtagagcaaagtaagcacccttcttgcagaatttccagttactttgcaatacatatttgtcttccgcaaataacatatgtaaaataattggcgccccgagctactttacagccatgaagaagttattcctttcataagagtgaatcaataatgagaaactttcagcacacagtaaaaacaaataaggggacaaaaggatgtctcgtcttataccccttattggcacaattggacccatgacatgaccttgatgactaatttggtaattaactgatgagacacaagacatcaccaaattaatccatctctgatgaaaatccaaatgtcgcatcatagcattaagaaatatccactctactcgatcataagctttgttcatattaagcttcaaagtcatgtaactaactaaaaatcaacttggaaaatgcttcacctaatacctacatcatcgactttacaatgaaagtaaaagttgaaatcacaagacaaagggaaaccaccccttttggaaactactctaactttaagatcgaattacgaatacaacaataatatctgtattcagctcattaaactctctgccccaagagtggaatccatacaatgtgacagcgacagtgacggtgtaacgagaaaccattcgataaatccgaacattaaaaaaatataaatagggtttataaaatatgctcagctaaatgtacacttgtcatatcaaattaggtagcaaaacgtaattagttggtatcgaaatgagacagtaatggggacaagtgatttttgttcctgatgtggtgtagattcccaagcataaataatggaggacagctctatatgatcataatcatgatttatttataagtttattggatcacatgacaaaatcgttttcacaaataaggcaagatctttactatatttgtatataaatatttgtcagacataatgtttttaatattgaatttgttttgtgaatgttttaatatttagttggtagctcactttattgattgatcatgtaccaatcaaacacagtagcctcatactttatattaatacaaacacatactattacgggtgaaaataaattaacattagttcttacatattttatttaaataaaattatttatgaccaaataataataatattaatatatgatatgttctaagattgtttttattttaataaatttaatcatactaagcaaacatttattaaattatcaaaaccatattacttgattaaagtttgataatctcacaaattactcacacaagaacaatgtaggagaaaacaggcatacagtataatatctcccgcattgatagtacattaatgtatcttatagcaataaaaattaatttagggttttgaaagtggtccttgcaaaacctcttcaatcaatttatcaaaattcaccatagaagaaccacaaggtttcaccacttcctcagccattctcttccactccatagccttttctctcatttccttacctttttcgccacccatcaactctctcacaagcttttccacttcatttctcttcacatttgtatcaatttctattccaacacccaaatcagaacacaaaaaccaacaattagtttgttgatcagcgaagaaaggccaaccaataattggcactccagcgctcaaactctccagtgtcgagttccaaccacaatgcgataaaaaccctcctattgcagggtggttcaaaacctcttcttgtggacaccaactacaaatcacacatctttctcttgtctcttccacaaactcagttggaataattcccgagtttccatcgatgatgtcgggtcttataatccaaacaaagggtttcccactgttagccaaaccccaagcgaactcaacaagttcgtcaggtgtcatagccgtgatgctgccgaaattaacataaatcaccgaattggcctccctagaattcaaccattgcaagcattcaagctcttctttccatagattagatccaatggatgacaaacttttgggttgagtctttttgagaagtaggtggatggggcctacagtgtaaatttgatttgggatcatggggaagagagcttccaagactttgtactctaatgggtggaaagtgttgaatagagaaggaactttaatataagatgcctcaatttgtctcattatatagttaaacattatgtcatttcgatccatgatgcgcatgagagaaggaagatcctttagtcgaatgttgttcattcctggaatccagtctaatgttgtgtctaaatacccatttgtcaagtaactctcatctgtattaaaattatttttgttaatgtcaaatattatgtgagtaacatacttttattgtttgatatagaaattaaatagtaaaaagataaagtgtagaaatatttgtatatatagttgtctaacccatgattgagttttgagatgtcaatttatgtagcttctagcatttaaataaagatatatgtataccacagaaaaattgacaatagttatatctttttgtcttttctactattaattgtaacacattttattctatttacgtgggtgggagtgtcactataataaattcaaaacgtaaaaccatatggacaaaaagttggtagagctacataatatcaagatattcaaggtaatctaatgtggtatattctactctagctaataagtcagtcagatttgtccgtatagagcaattataagcaaaaatacaaacaaacaatatttacacaaaaaacaattttttaaaaaggaaataacaaattttttaatatatcatattgatattttagttcataatttagtggccggccatacttattctttatttataattcaatagaaggctaacattaataggttaataatatttggaaaatacaataatgtcaataatgcagttcaacaactctgacaattaattctaattaatatttaatattgcatgtatagtagtaagtagttttaatgctataaccaatcatttaaatcatcaaagcatttacgaaacaaataatgtccttttaaaactaaaaaaagctgtagatgatgtta

SEQ ID NO: 298588 - DNA, 8509 bp, Cannabis indica
taagtttcttctcttgcagcagactgttagtcaggccacttaacaaagtttacaagcttcatcctatacgttatgaaaacaaattatttaggcaatagtttatgcctccagataaatcagttctctgaattcaacattctacatacatgtatgaacttgatgtttctgaaacagtaacgtttctgacttcattttagtattacaggcaaggaattgcagaacacgaagtattagcacttagaaggcattcaaagaacgaaaaagggttaggttttagcagaactaccttctacctgtcggaagcagcagcttgctgtaaaccaagggccataaacccattatgtaccacagtgacactaacacttgattcattctgaacccatcgtcccctttcaagttcaagagctttttcaagaaatacatgtctcttgtctgatataagaacacgaaaagaatcaatgaagaaaatgttaggaagctgaaacaataaactgagaggaatgacaattgtggcttttatagtcattgacatttggcaaaattcatagtcatcctattggggttaacagatatatattgaaaccccaaaacacttaatgtttactgcatatatttaagcaataccggagtctggttgggggacagattgaaaacatagtacagtaatgcaccccataacacaaagagcaaaattgaggtcgtccagtctcttccctcagctacatttccacttccttcaggtttattttccaagccatctccctcattcaaacccgggtcttctttgttttcaccatttaaggtactccgacaaatttgagaatgacccttttgctgaaatgggaaaataaacgttttacagtccacgcttctgaaactcgaagatccaaagcttgttttgggaattgatactcttggcttgaggttttgagtttgaaggaagttcctggtttgtgggcggcttttgaatgttaaagatgagaacttggagaagttgcaggagatgaggctggcattagccaacatggcgaagaaaactgaggatttttgtaagaatcttattaatgtaaatttgaatttattatctatctgtactcatatagttcattgaccccattatacgatgtcgtttttatagacatcactgaccaacggtgtcgtttaacacgttggtaaaacaggcgcgtacatttcataaccgcataaacgaccaataatccaatatcttataacctttcggagcttttcaaaagataaggtctttctttttctctcacttttttttttctttttgggtagccatggctgaagcttcacgagtgttacaaactgctctcgtttccaactttaattcattccaaagaacgcatttttcacagttaaacccagttagtttccgtagaaacccagttcattgctctgtctcaacgagtgaaaacaccaaaacaacagtgacccagaccatcccatggggctgtgaaatggattcttcggagaacgcctctgctctgcagaaatggctgtctcagtctggtcttccgccgcagaagatggcaatagaaaaagtgaacgtgggagagagagggttggttgctttgaagaatattaggaaaggggaaaagctgctctttgtgcctcccacgctggtcatctcagcggaatcagtaagatcttctcgaaaatattgcaactggggtttggttttctgctgttataatttgattgatgaacttgaattctgtcattaatcacaatatttagtgattcggctgtcaatattgatttgttcacctatttaaattcttattacatgtgtttttgaaattcaaggaatggagcattgcagaggctggtaaagtactaaagcagaattcagtacctgactggccattcctggcaacttatttgatcagtgaagcaagtatcatggaatcttcaagatggagcaattatatttctgctttacctcggcaaccatattcacttctctactggtaagcttagcttatacttatattattgtctttgcaagtcatgcaaatcgtcaatgctataattttgcctttcctgcgaagggtctactctcagtttttcctctacagcttctttatatcatttcaggacacgtgaagaactagatcgttatttggaagcatcacagattagagagcgagcaatcgaaaggattacaaatgttgttggaacgtagggcctcaaattagctgtttggattttcttttatgggccatttttggcaacaaaaagtaatcctttttaccaagttttttttattatttatttaacttgcttcttttttcttcgcagatacaatgatttaaggcttaggatattttcaaagtaccctgatttatttcctgaagaggtattaaactcatattagtccttgtgtaaaaccaacttaaaactttccaagtcctttatgttcatttttctgtagttacttgcaacaattccatttttgaatgagcaatcatattattggctttgaattttagaatctctgttaaccattctcattatgtagatctaacatagtcaacatattagtttgttagttacttaggggagaaagttgaattctgtgttgtgacttggatatacaaaacaaaagattttgtagatttttctttcctagacttgtgtagagattgggaaaacctattgtactagttggctggtagctcgtagttttatgagtccatgtttttaatctgtgttagtagtttttgttgttggagaaggtctttcccaagtgtttatgttaccaaggttttcgtccgccataagcaagggatctcaataaacataggagtaggatagtcctagacatttgacctttgtctctaatttttttgttttaaaaaaaataaaaacttaggtaattctgttataatttgctttaccctgtaatcttgaatctgtatattaagttttttgaaaatccccttgtatctttaaagcaattacctctactttctctcatgtagctctcttatactttgttctactttgttactgttactatctttctatttcagttacaaatttctggttctaagttatggagaaataatgcaggcagacacctacaaatactaagtcaataggccttagtcattaatcattacagggataataattggcgttaagctgtgtctgcctcacaattcgccttataacataaaatcaaataagagaggaacaataatgataattggaatgaaatagaatataataaagtggtataaaatttaatattagaaaaaatatatacatttctttttcactttctattgggttggtcttatggaaggaatagccattccgccaaactgatggaaaatccattccattggaatggaattctattaaataaaatttcacccacacaagaatggaacaaaattgaattcctttccattccattacccacagccaaacattccggtagtttttttttctttctgagaactacctctttggttgtctttaattttgtcacccaaggtatgaggtttatcaattcatgtatactttttcaaaatatgcatgtgaaataccgtctacataactaaatatgacatcctgtatttgtttgctcaattcgtgatttgtaggtctttaatttggacaccttcaaatggtcatttggaattcttttctcccgattggtaagtcgattttgtcacatcatggtaaatgctgtaccccatttgtaatggaaaaatatactatggttgggatagttaagattagaaactaatcacccgaactcgtgctttaatgttttgattcttgatcagtacacaaccattaaagtttaaaagagtttgggaaaaaaaaaagagtttgcgaaaaagaagctataagagtacaatattttcatataagtggaaaggaatgaattcaatttcatttaattacaaacaaaaggattgtatctgtatccaagacctgtatcaactaatctattatccttaggcatcgttggataagaacatcaaatgcatatgtaattggatgtttcatgtagacttttaaatattatggtttgcacaggtccggttaccttcaatgggtgataagtttgcattggttccatgggcagatatgatgaaccacagttgccaggtaagttgattactcatcctaaaacaaatgtttgaagtgaaatcacctacaaaagtttagctgtttaatcacatggatttgctggtaggtggagacatttctagactatgataaatcatctcagggagttgttttcacaacagaccggccttatcagccaggtgagcaggtaaacgctaaacattttcacctctgaaaatttagaatgaactcaccgagtgaaacatattatctgtggtgctaataatctatagtgtgttatactgttgaagtgaattgttgaattttaaattacttgttcaggttttcatctcatatggcaagaaatctaatggagagctgctgctatcctatgggtttgttccaaaggagggaaccaatcctggtgattcagttgagttgtcagtgtcactctcaaaatcagatgaatgttataaacagaaattggaagctctcaggaaacatggattgcaagcgtaagtacctgattttcatttgccactctccaatcctatctttcctattttttcagctttttcaagttcttggtgcgagtagagtagagtggagtagatacatatttcttccctttttgtggtctaaatcgaatgcaaatcaggagaagcttttgatttattgtttttggcagatctcaatgttatcctatacgagtcactggctggcctttggaattgatggcatatgcttatttagctgtcagtcctccatctatgagcggccaatttgaagaggttgaacatctttttctcttgcttattggttacattttctcaatatattgaataaccatcccaaatatatggctgtctcagatggctgcggcagcatcaaacaaaattaataccaacaaggaattaagataccctgatatagaggaagaagcccttcaatttatattggatagttgtgaatctagcatatcaaagtacaacaaattcttacaggtaataagagttatttgcatgaggattttgttatatgtttactttgcatagaaagtgatttcatttacaagtagttttgagtaacaaaaacagtggcaatttttcattgtaacagcaaagtggatcattggatttagacgtgacatcacctaagcaactcaaccgaaggttgtttctaaaacagctagctgtagatctatgtacaagcgagcgaaggatattgttccgtgcccaatatgtaagatttcacctactcttttagctgattattatcttttaaagagtttttttttgtgtcgataacttcaatattctgcttaagatcaatcagaggaataatttttctgttgcaagtacttttattcggtaaattaaacactcattatcttccttgaacattacttcactgctaaaggtaggcaatccattagaatttttttttttaaaacttctttgttttgagtataaaacgaactttgagagctctttgatttaatcccttgcagcattggatctccattgtaacttttagtcactccctaatccatttttcgtgtgtattatttggttgttttcagatactacggaggaggttaagggatattagaagtggtgaattgaaaggtctaaaactctttaccgggttgcgaaatttcttcaaatgagaaggtattgtccatactgaatcaagtggcttttggtgaagagatgaatgctataaaatgtaattaattttactggctgtttttcagtcatgttagaggtattgtgtacaagcaggaatttcttatattacttttataggaaaacttaaacagaaaaactttcctttaaagtttaaaactctctctattcaatcgcagagatttgttcacgttgatttcccttattagtgttttgagtaagattttaagcaacctttaactagggcctgagaggttacaaatttagtgtggaagatttcatatttattgtagagatttaggaagacttgagtgattaatacaagctagtggtatcgaagataaggttcagcatagcccgtctttctttcaatggttggacaaagcttatacaagctctattgagtcatctaccctcaatctacaaccactaccaaaatatttcaaaaaaccttattctctctgctagttgagagtcattctctacaaattacccgacagaaactggatggaacaaattatttagaatgatcataatctgtggtatggtgacctataaccaaagaagtgtgattgtgttattgctgctcttggtgaagatgatccacaatatcgaataaataattgtgttacttgtgctaagaagaataagctcaaacttgaaagggctcgaatctgaaattaagggtacgattcattttctctcatcacttgaaaacatgatagtgtattgaagcattatttgtgggtgctagtaaataatcgagcatggtgtgatcattgtgaacacctgtggcataccaaagaaacatattggtaaaacatccaaattggagatcctgaaatcaaagagagcactgtggcttccaatctaagttgtttcattgttcaaaataatattagacaattgaatagggtgaaaatttaactgaactattattgaacagaatgaatcatttgcaagtgtattgcctttatataggcaaaattactgatgagtaataacagagttagctagagatcactaacttaaccaaatatttaactaactagctatctctagtagaccccttcatgatggagtgtaaaaagtttgaacacccatcttgggtacaatttcattgaaagaactaagaaattgaagcttggtggggatgttagctagattattctttgatggcatatgaaacatcctcaactgtccatagattgttttctctcaaactatgtaccaatcaatgtccacatattttgtcctttcatgaaaaactatatttttttaaaatgtgaattgcagtactattggcacagtagaggatggaaggaagagaaatgtcgatgtggaagtcttttgggattgatgttaactaagttagcttacaagtgacattggccattgctcggtaccctgcttcaacaagagaacatgagactgtttgttgctttttaaacttccatgatattagagattatcctaaaaaaaatataatatccagagattgatcttctggtgtcaatacaagcaccctagtctgcatatgcaaagattttgagttgtagcgataagccttgtctaggggagcctttaaggtattgtagtattttatatgtagcagctaggtgatgttgcctaggtgattggacatattggttgagtttgttgacaacaaagctgatatcaagtcttgtgatggtaagatatctgatttttcttacaaggcttatgtattgagtaggatcttgtaaagattgtcctgacccttcgtgaagcttgctgttgagctctattggtgtggaggcaggtttattgtctaattagcttgagtcttcctggagttgtagaatgaaaggttgatgtgtgacagaaatgcctttatttcatcaagctgttttaagtcttaagaaaaatcgtaagttaccaagatccttcaatttaaattgagtatcgagagtagacttaaatgtagccagtttagaaaggttgttagttgcaacaattgtgttatcaacataaatgagtagggctagaaaacacctaataaacagtgaatgataaaatttagattgagtgaaaccttgttgtagaagagaggtactgagttttttataccattgtctagaagtctatgttaagccataaagacttttatttaatttgcaaactccattagttggaatcactcatttgagagtgtatccttgaggtagtttcaacatccttttgtaggtcgccatggagaaagacgttgtttgtgttcatgtgtaggtgccaatttttaatggcaacaagggcaataataattttaaaatattaaaggtaaataataatttccaagtgttaaatttttccacaagagcatagtatcaaagtagtttgtacttggctactataatatcctaaaaattataaattagaaatataaaataaaggcataaattttattaaatatgggaatttatttttgattatattataatatagtttaatatttaaatagaactagtaatgtgagaattattatgcccatatttcgagcattaaatatggacacgcacgtggatataaatttcaaaaattgaggaaaactataaatgtgaggaatgaaataagtgtttgacattgggatatgatacaattaaatgatgtattggcatcgggttgtattataaaatggttgtccaataaaagtgataaaattataaatacaa

SEQ ID NO: 298589 - DNA, 5733 bp, Cannabis indica
aaaaaaatataataaacatatcattataatattaaatgttgtaaatatatattttaaaataaaaaaatgttatccatataattataacctttatcatttatttatgagaagggtagataaggaaaaataattttaagttggtatggaatggcttttcaagtcattttatttaggaaaagtaattccttagtttacatgaattataattcctatggaatgagttttccaatgacaataaacaaaccaaacacttgaatgatctttctttaggaataacaattccattcctacactcattcatgtaaaccaaacactaccttagtttcaaaattgaactggagaaaatatgaatgaaccgtccatccaccacacacacaaatgcactaagtgcatatactttgacacccattttatactgtaaaattgtagaaatatccaagtaatcatttttaaataatactggacataaagtacattttacaaataatcaacagaaaataacaaaactaagccaataaatactgcaatttccctataaaccaaaaaaataatacatcctaatataagattaatgcagaattgtggttaggacatattttttttttaataaaaagcataaatagaagaacagagacaggacataggtcttactaaacttaagagtacggcactgatctgagaaaaaagtttgcggttttgatcaacaaagtccgcaagacctgaaatatattcaggaaggttagtaacaaaaactacgtacagtaacccaactaagtaggtatcctttgtgcagtgtgattttattcttgatccaccagcagggttcaaatgcatcattatatccttcataatagctagaaagaaaaataacaaaaaagcaatgacaagctcacctctgaaggattctcgtaccacctattgaaaagaaggaatttgttagcaaaatacacataaaacagtaaaacaggacaggattcacctctggacaacaagcagagaatagagaagttagattcaaggaaattagaaatattgctagcgataatacttcactttttcccccaacagctcactgtagggaacattaaatattatcgctagcaatataaagtacataaacagagaatatcagaactaatgcatgagtaatgcagaaatagatctcgacaaatcgtctgtagaaagcataacaagttttagatctctataagagccaacaaactgcagtaaaactagaaaaatcaggttgtacagaaaataatttgtcattatttgaaaatagtattatcctattctaaagaatcatcgtattattaaactaaaaagccttactcaaccaacaataaattaaaaaaaaaatactaatctttttaagattatgtggtcatgggggaaaacaatggaggcaccagcaaatttattgtttgcagatactgaaacatagataattacagaaggtattacagcatataaacctacatattgaatgattccaaaagtgaaggacaaaaattattgtaactagcactgaaataaatacgtaaatataacttctttacagatctgcaaagaaataaatcaattacctttcccaaaatcaaggggaccaataatgtcagcacaagacttttcaatagttgcttagtaggaacagatacaccaactccagaagctataaattttgagatagaaaatgggatctaaaaaggttacatattagcatacgcttgtatagatcaactctagaagtaaagttttcaaacaaagacatgagatctaaatctcttaagtaacttattgttttgctttgccacgtgtgaaatgaatgaagcataaacaaaatagtacctctttacctcaagtgattaaaataacttacaatcaaaattcctaatagattagagatcacggtcattgcaagagcaagggcagagttccctcctgcgagctgcaagtagggaatggaacatttacaaatacttcaaacaaacactgcacaagttaggaaaaacaaagaaacacttggtataagttacaatattagagaataagcatacttgagtaagtgctacaccacttgataaagtagttggcatgcaacaaaacaaagcgagtcctgtaaaaacaaaaatagtgacaataaagtaacagctgatggttcaaaagactggtaaaaactaaagttgtttgaaccttggtcttctcaaccaatctctaaataaaagtaatcttgataagtgaacctgtaacaaactcttgaggttgaagctgaagatgtagtattatctttgaaaagtatggggtaaataataaaatagagatctgcaatgtaagtaagaattgaaagattaataatggacaaaacaaagcctacagtcttcagccaaacataaattgcacagattatgaccccaacttgaggaacagctagtagagtgattttccctgtctatctttcaatcattttacttgatgaatgtttttagacaaggattcaagactatgatgacaacatgatctcctttcactaaattagtatgcagttgcacataaagatcagaaaaaacgaatataggaacagaagacaaatggcagacataaattactattacttatacaaaatctaatacaacattccacttattaagaaaatgaaaattaagcgatcaaacacagcagcacaataatattctagataaaaatactaaaaaacaccaccaaatttataaggaaaagaaaaaatcctttcactgtacatgatattacttttctattgaaaacatgaaattttcattttacttttattgttctgttatttataataacaatgaataatgaatatgtcctgttaatggtaaaaaaatctgcataaccaagaaaaccataaaaaatgatattttcagcacaaatctataaaatgatttcaattataaaccctagactaaagaagttcaaacttcctacatacacatccatccatgaacagaaacataccaatcaaataagtcctgtatagaaagaaaaagggggggaaacaaagaatacaaaagaaaatcataaaaaaaaatatcatactagcccaagaagtcccacaggccatgcttctttagctgcaccaatgtctgcactacgcaacgtcaaccctatgcaaatgtccaataaaattcaaattccatattttccatatttgtatgtgtgttgctatatatgctcaactatataaaacacaaacaaaagcccgcatacttgtaaattataatgaagtttaaaactcaagaaaaatgaaattcaaacctgagacaataaatatcccaaatgtgctaaactttgagagagaatatttatcagcaagacaacctatactgggacatccgaggcctaatgctactccacccaaaagagctgcattcaatatccatcaaaaagaccaaagctttaatcaggattgtactgacaaatgataatgaaaaagaaaaacacttaagcaactcaagaagaagatgtgggcttaaatattatgaaccatcacctaatggaagaaaatttgttgacgcaaaactcaataatggtcttgcccagagtaacccatctgatgatttcgatacttgatcagctttagctcttttcccgttaccttctttctgattcaggattcaaatttacgtccaacaagataagaaacccaaatattcgatcaaacagttttctttagaccatattcatgtcatgggcaactttttttttcttttccccaactcaagtttttcagattatttttctgtatattatattgtaccaaagaaagaggtaaaaaaattggagaattagaggcgacaggacctgattgggaacatcgcaggctctgatgggtctcgaaatcaagcttctacggcgagaaagtgaaatagagtaagtgggaggagaacttgggtttcggtaacgaaagaatagcgatttggtggttaatggcgtgaagatgagggtttggatggttcccgccattgatgaactcctcccaatatagaaaaacggtaactgtggcacccaatgtcaggtggaagtgactcgttcattagtatgagcgaatgtcgttaaaacgacatgtcgtttttcaaatattgagggtgtaaaatatgaacttttatttatttgtgatatttgaagaaaacataaaaattaggggagtgaaattataataatagaaacattaggggctaaatgagtaatatttgaaaattaaataattaagaataatatatagtgagagtgagcaagcttaaaccaaatccaaaaatggcgagcctaactcgtcagttcgttctccaccaccaccatcatcaccatcgtcaacctcacgccatcctcaaaaggtcctttctatcatccaagcttcctggctcaggcttatccactcgttatgccccacgccctcgcaatttctccaccactccactcctttgctccctctctcaaccactccctcagcctcaggtcttattctctttctgtatttgtactatttgtaattgcgtatatatgatgcttatatgagcttggtttgtttcgaaattctggctttcaaattattagagttcggatgttggagcgaatccatccattgttggggatttactggactatctcaatgagtcttggactcaatttcacgccacgggtaattcttcattgctcttctgctttcttagctccactgggtagttagttatgcattagttacaaatgttggacaatgatttgcagatttcctggcatggcaccattttatttttagtgaattgaattttaagctataaagtttaaattgttttatgtttgtctcaattttcgttttgttttttctgtacagctgaagcaaaaaaacaactaattgctgctggttttcatttattgaatgaaaatgatgaatggaacctcaaaccgggaggccgctatttctttacacgaaacatgtcttgtttggttgcatttgctgttggagaaaagtgagtaatggaatgtagttctacgaaccttaagtctaattatttgaagtgaaaaaaggacaagtttcattggtagtttagtttgtgattcaattcagtttgacaagtttctttggttacaagcatttacagttacagtcatggtagttctccttgtcttctttcaaattgttgattggtttaaaatttcaatgtccctcatataggtattaactgttattcacatgttactttatatgagattctttgtaggtgttaagtcccttacactattgttagtcttctatatgtctggcaattatcaattaatggcttctcctagtttttcagatacaaggttggcagtggctttcacgtgattgctgcacacacagatagtccatgcctaaaattgaagcctaaatcagcatcatccaaggctggttatttgatggtcaatgtgcagacctacggaggtggtttatggcatacttggtttgacagagacttaactgtggcaggaagagtcatagtgagaaatggcaatgattcttatctacagaaacttgtgaaagtgaagaaacctttgctgcgtatacccacgcttgccattcatcttgaccggtttgcctcacctgaatttacttctttcttagccactcatgtttgtaaattcttatattctaatgttgtagaaaatagtgattcgaattgtgtatagatttcatagaataatacatatttatataca

SEQ ID NO: 298590 - DNA, 5486 bp, Cannabis indica
acgtgaaagataaaattaagaccaaaacaagataacttaaattattcgtaagcataattatcccattttattatgtgctctttttaatagttttcaaatgtagattctaatcgtatctaaaattcagcctatacgttttgggttattgtgtttggtggaccttggatgagatttgatgaatataacctcaaaagtggattaacaggataaaatgttggtgatcacatgaagaattgcctctcagaaatgcaaaaagtttgtattttctagaaatccaacattcaggttaaaacttaaaactatgtgaaatagataaacaccgatcatagaaaattaaagacaaattctatctgatcaagactcaatggctaccaagatttaaattaaggcacgacataactttagtttattttaagtgacactttgtatttatattttgaatgtgataactagtaatgtagtattaaaaattatttataattaatgatataaattgcatatataatttttgtttttattttctgagcccaggccgccgtctctctttgtctttatatagatccgcccatgttaagcccttttgcaaagacacctatggccatctttgaggataactccgtcctaaatctgtgaggattatgcactattagtttaagagaaaataaaatttatctgaaggatggctatatgattagctacatatatcatatgaatgtgacagcataccacaactttggttataaaatagtagacaatactagctagtgcgtgtgtgtaacatttatcaaaaacatgatataaatccgagcactgatttagaattctcaccaaaccaacaatgaaagttatcataacgactttctcaagacatgagaaaatgggaatagtactaatttttatgtgaaaatatttggctcattgatcaaggaccggccttcttagatcttttgaccccacaaaatctattaaattattatcaaattattaatcacctccaaacctctcaatcgaatactaaatgaaaaagcatttgattagcaacatatgaagtaagttagagccgtttgtaaatttggaactcataattgatttttgagaacggtaaaactaataataagctaaaattaggaattaggaaaataacatgtatatacaataaaagtacatcaaaaactcataaaaaataatcttaatagtaaattttcatgagtctacttgctatatattcgtgtaagtttcaacaacatataaaaatgacaaataccgttgtgttgaaacttggaacacaatatattattatttatatatatttatatatatataatatttctgttgttttttttttttcctttttccttgagagcatgcagcatctccacaatacacatgccttgagttggaactgatagtgattcattatatggcaaaaattgaatcaagaggcacaaacagtccaccatggacacgccatgcatgcatgctttaggcttcagcaataaccatccttcaacatggaccaaccgtccatatcggcccaactatgccagcaggcttgcgtggcccatcaaaaattctgaatcacgtgtctagtgctgggattttgatgggttggcttacgtaaacttcaactttttgacaaaaaataatagaaactaaatggagtataaattgttatctaatatctagtctccaaacacgctataagttttcaatttacaaacagagcattaacccacttgcttgctttagattgaataaaggaacaagttcgtccaaatagatcaatattaagacaaaaaaaaaaactgtaataggggctcgatgcatggaaacacaaattgaatactgtttaagctataagttttatctataccatgcataacttttctatttcacattattaaaactctattttaatatattttttattcatttttaaatgttttaaggttttagccatagaattatatatggatgtttcaatagattaacaatggacctaaaaagagaatattttcttcttttattttgggatgaatcatttgagaagattgaatgaaacagaaatctaactttatacaagccacataaattccacattcacaagataaagtggaccccttatttatcaattctctttctccttggtggtttatttagagataatcataatacaaacagagaacaagccaatctctatagggccatagcggtttactttacatggatgcaatgatcaccagcaaagcaatggacttcaacgagcaaaaactctcactttttagtttcccagctgacttttgcttctcaactctcctttttcccttagccatgttagaaggcaaagccatcgttggtacaagccatgcagcaagaagctcttcattttatctatttctgccatggcatcctcgccttcttactaatcaggtaggcaatagttcaaacactgaagagaacttgatccctgagatggaggaggctgtgcagaaatatactctgtttgtatctcattatatacctattattactttcaggtttgtcattttaaaacaaacaatatccaagtagaactggaatgcatgtgatattatatggtactagatgttcagtcatccactgatactaaaaatctactagctcaatgagaaaaatgggctgagttggaatcccattctaactaggattcttttttttttttttttggcctttagtgaacgaaaaccattcacttccagaagcacagcaaaggcaagatcattttctaattccaattccatttatcatggaaatatcccgaggaacttgtgtgcatgggcgtgtgtgtgtgtgtgagagagagagattactattacgttttctgaaacttcagagagtaagaacaaaaggcggagcatcctttctaggcccagcaacagagcggtaaacataaactttattagcaaccatgtccccactcccttcatcgttgatcacttcaacattcagcctaggcatctctctggccaagagttgacagccactctttgtgaccttgcaagcggacatccaaagtgacctcatggactcatacttctctatacccgaaagaagagcttcattcccaaatggggaatctctaatctcaagtttcctcaactttgaacaaccactcagcacacaccgcattccccaatcactgctaccagcaaatgccactgaaagggtttccagatttttggcatacttcccaatatactcaaacgttaagtcagtcaataaacctgaaacggcaagtctctggagcttattgcaagtcttcaccactgcaccaaaagcttcatccataggctcgtttgtcaagtaatctggctttccaggctccattatgcatagacgaaagtgagtgaacccaggacagttctttacaatggatgccactgcagcatttgtcatctgcctgcaaaagtagagtacataatggagtttggggcagccaaatgatactgccagaaatccagattcagtcaccccatggataacctccgggtcaaaggggttatcaggaaaaacacgaagttcttcaagcaagggacagtgagttccgatagcctcaagtcccttgtcttccaccgtgtcaagaacctgtaacaagagtttgtcatcaaaaactagcaatagagagcctcatctttctccttccataacataatagtaattaacaatttaagataaatgaagtgaaaaagattgaaaaaagagatgttacccaaaggcgacgaagatttgggcagtgagacagaagacttgcaaactcggtgcttcgaacaacagcataactaaaatttagaaaagttacgttcgtacaagcaggatacagagccgggagatataaggctttagtttcccataggccagagagtgtatgtagattcttgcaattgttaaaggcactttcaagctctgaatgctgattggcagtgaggtcttgaatgaacataccagtaccaagctccattaatcttggagcatggctaataagcttttgtaattgttccaagtttatatttttattaaccttcaaagtcttgagcgatttgcacctaatgacaagtctctcaagagcatcaaaacagacatcagaatttaggttggcgaagtttagtgtttccaatgatgtgaaggactcagggaagcaactcaaccaactgccacttctgtcgtccacatcattgtcctgtatgtccagctcaaccaagtttctgcaacaaactcatgatcatagagtttgaataagttaaaaaaaatgatgaaattttaataacgcccactatatagtacaatgacagattttatatatgttgctgtttgtaaatcataatgaccaaaacaaactattaatcattaaacatattcttgttccatctatttgcacgataaagattaaaaatcatgtaaaaaaataaaagggaagggaacagaataagatcgtgcgtatgcagatacaagaatcatatcgtgataatcttccattcgccactgcttaattgcagaatccttaactgtagaacacaacattgtactattctctctccctctctccctctctctctccctctcttgatcaattaaacgagaacccatttcccaaaaccatagaactaaaagtaaaaccactcactgttctcggtacgcagatcagatcttacacgttttttttatatataccaatcaaagagaatgactttaagaaggaaaaagaaaattacttgcaatgagtggcaatggcggcaaggccatcagtactgaagccatcacagctcaaaagtgaaagagctttgaaattagggaatgaatgagccaggaactccaagctctcgtccctaacactcattctcttaagcctcagctcctcaagattcgggtacttgacggcgaaaaccgacaaccatgattgaacatctgctccccaattgcgaggaaccaaattgaagtccgagaatcgaggcttccctttcagggttacgctccgaatgtttggaaatcgtcgcgccaagatttctggcgacactgagtagcagtttccgatgaagacgcaggtccgagaccatctctcggcattgtaccagtccttgcagaccagagaaagtgagctcctgtccttgcgggactttatcagacccaaaactccctccaaaacctcaccagggaagtgttttgactccgccgattccttctttctctttgaatccattgagctaatttccattaacaactaactttctaaaagggatgaattaattaatagtgtgatataaaaggtgagatctttcttcaatgcaaacattctgaattttattccctggaataaagtaaaagattttactttattataaagcttaggacaacggctattgggtataaaatggatacaattgttatcttcattttttttttctcttttaaaggattatttatttatatattttcaaaagaagatcaacttg

SEQ ID NO: 298591 - DNA, 1252 bp, Cannabis indica
atttgttggcccttaaatccacaaaagcaaaattatttgattttagtttaatgtcaggtaatgtgtcattgatagtgttgaaagataaatccaaataagatagtttggaataagtttgattgaaaaaccaaataggaatgatatcagatattccagaatcagataaatctagaaatgatatatttgtttgtgtttgaagccatgaaggaaattgtggaccaatcatacaagatctcaaaccaagatgttggagttggaaaggaggaacccaattggtttcaaatttcaaagttagaaaatttgaagataaatcaaggtgttccaatttggacaatttctcaaggtgtgtttcaatgacaattccagtgaaagaattcactgaaatatctaataactcaagactagagagattgctaattatactttctgcccatttgacattgaatttattgtgagatacatctaattttctcaagtgtggaatctttgaaaaataatctttaggcaataatggtccacttagattgttataagacaaatctagaatttctaaagacttgttattgcaatcaatgaggtttttcaagatatcaatgatggtggaattgaattcattcccatacaaaactagttcttgaagcttacaaagactccctatcgatttcggtatttcgcctctaaattgattccattgaaagttaaaatgccttaaagatttcaaattttcaaaggaatctggaatggtaaaaacaggactagctttgttattataatttagtgagagatcaataagattattgctcaaattaagcaaatgagaaaatgttgtggacccaaatgtactgtcagacacatgaagagttgtgatagaattggtggaagaatttgttgtagtatgatctaactctggaaattgacaataatttaggtgtaaaattgataaggaatgagctgttttaaatgaagaaaaccaatctttggcttcagtgagatttgtaccacccaatttcaagattctcaaattagtgagatgagaaatccaattgaaactcttaatagtcaaattagttccaaagccataatcatcaccaagatcaagaactcgcaacttggttagatttccaagttgtgagggaatatttccaacaagatgattatttgacaaattgagatatttgagatttgtaaaacttcctataaactttgggatttcatagaaagcattgttactaagatccaaatactccaaata

SEQ ID NO: 298592 - DNA, 569 bp, Cannabis indica
aaattatattaaaaaaaatatgtataatttttatttggacccctaaaataagtgggtcctaggtgcaggcctagcccgcctatgcctagggccagccctgcttgtagcttcataactaggttctttcttttcacaaacttcaaagattttgtctcttaccttttcttgtgaaaagcccttagatgagaggttagttgtagcaatagcagagttatggtaacaagcaagaatctcaataaaaacagtagcacaagtagaataattctcagaaactttattgaattcaaaagaaggagacaaggtctcatgcaaagagaaaaagctctctccaaacagagagtttactctaattctcgcataacccaacaatagcttctcaaggcattgtatagcctaaacaatacccaaactaccccttaaccaactcctctagcttagccaccaataaccaatacaacccatgttttgttggccctcttctagtttaagtaaatcttatattaggcctagcgattcgatcattaaacctcctgtaacatcctaactgtcataggcgtattacgtgattt

SEQ ID NO: 298593 - DNA, 6387 bp, Cannabis indica
aaaaaaaacaataacaataacaaacccttttcaaaaaaaaaacaataacaaactttggagcaaacaaaaagggagtggaaaagagtagaagtcaatatttacacatgttgagctttttcttgctcaaaaaggctcatttatagttaccttatggctttttcttatataaatacggcatctagcagcagagtctggttcaacctcatttgtctctaaatttggtgattcttgaagctctattctcgttcctgacaccagccttgaacccctgaagcaccccttctggttctcaaggaagcttctcgcagcaaaagttcctgcaggactacgaataactacaacagcatttggatttggggttctgcaccaaaaccaaaaaccttgaatcaaccaagatgtaccatgaaatatagtaatgagatcttgttcctctgctaggtaggaccaaaagcaccaagcagttgatgagggaagagttctaacctgtgctctgcacagtatattgactttctcgtaatttgctccccattcctctcaaagcaatccaactgaaagttcaatatagaatgttactttatgtctctatcacttaagcttgcaaacatgactaaaaatatgcacagatgaatctacatatttaaaacatggttgtaggagtctatttcttcactcaaaatatggaaatgtgaaacaaaggttcaaactaagattcattcacaagtaaagcaaccaggctaaacttacttccatgctgtagcctgctcttgatgcacacatagcgtggaaatgtgtagaacatttgcaacactgcgtacaggaaccgtgactttgcttacaaattacacatgtctggattccacccaaaaacaagataagaggaaaacacaattacaaacaagttagcttgcaactcaaagaaaaaatattaggaaacaggaaaattactattacacaatagaattttcttgacagttggaatgtaaagtaagcaaactacagactatactaaagactggcactctcatagcagctgaagtaaagtaccaaaagatggcaacatagctgtaccttcaaaaatgaagtagctggaattctaaggataccaatagcaggttccatcttctcatggttcaagaaagcaacttcaggccgaaaccaagcacatgtaacatgagtccacagtgcctcaacatcagtaggcttcaaagcaccccctaaagaaaaatttataatatcattaaatctcccattgcattacagctttaaaatacatgcacattcagatctcagaagtgaacatgaaatgagcaatgtccaagagaataaaaggacatgaagcatgaattattaaacatagcaaacagtatcaacttcacaaactaatagttagcagcaacatagtgcaagggtagaacttcagcacggagcagctaacgatcatctaagaagtcaggttagatacctttgacaggacaaaggcaacattctcttttgacatcaggtgtttcacatgctctacaaacccatgaagtaaagtcctggacatgttttgcaccatagcattcttggtggacagccatttgacacctgcatagagcacatcagaaatgagatcaatccaatgtgtcctgagaaagataatagattgacgacctaaaatctgaaaaaatttggcatccaaatcagttaataaaagaagcacctgttacagataatgattttattgtagtcccagtcttcaacccatctacagatagcacatctttccgttgtccattttgcaataactggctcatatgtttctattgcaatgaagatgcaaacaatatcaggctccttaaaagacctcggtgaaaagaattcacgtacaaaaaaatactatataaataaataaaaagaaaggcagaaaggctccttgacacgaagtgaatataacataattaccttgcagaaaagtgagtaattgatgcttgtctaatttaaggggatcaacaccgtgtgtactgtactctgttatctgaaacacgaagccccaatattaataagtgctgaattatatagacaatatcagaatacaagaaacaaatatcaaggcaagtacacacccatttttccagtggcaacattgtgctcttcactttcacgctatacttccactttttagctctacatcctgtatgtttttcccattcacttagagtctgcttcttcgacccacatgaaccacacttgcacattaccctagaacccaaaataaacatcagagctcacattccccattcaaagtagcacaatttattttatttttttgaaaagtaacagggaagggcgtggaaagagttaaacaaatgcatgaccgctaaaattatcttaacacaagtccaaacttacaaatgaaattctggaatgtacattccttccattccattacacaccacaagtatcttctcaggtgtcactgtctgtttgttgtctttcacagaactgttttaagaagagtaaaagaaagttaccacgtcattatgttttaaacttcctgaagacatcaaaagtgacagtacgcaaaaagaaaaacggcaattttctccaaatcaaattgataaacaccaccgataatttaacatacttcacttggggctgacatctttctacatctgttaattcacaattggatcttcctttgcattcagggcaataataatcactatgctccaggtcctgaagcaggaaagacaaagtgatgctccaaatatcgcaaacttaaataaaaattgatctatgagaaaaacacacttgctataatagtcagcataccttaagaagtttgccagaaatcttgtcgcactcagcatgcacccaaacgttacacccatcacagcatacctaatacataaagaaaggacaaccaatcacccaaaagcattttcaaatagttaacaatgaatatccagaagaaggaaaaatcagattataatgttgactcacccagttccctccatctgaatggtgccatattttcttgcatatgccacagtattgctttgacttctttaactataaatatacagatatgagctgctgagtctactgctattgttgactaaaataacaatcaaacaaacaaaactgaaaagtggttagaccttagcacaatgtttacacaagtattgggttttccaactagcacccttcttgttcttcattgctttgcagattagacttagtccacacccatcacaaggtctagcatctttatgatatgcttcctacacaataaactgattgaatgaacaccaatgacagataaaaacattccatgtcgacagttttaagtgaaacataagtttgcataaaaaactaaatgaaataaaataatttgaaagtaagaggatggatgactacacagtaaagaataaacagaagaaaaaatggcttagaacaaatttctgggttcacattgtatctggtttttttttttttttgacaagtgactatttttttaagcctctttttaaattattctaacattaaaaagttatataagaagtctttaaaagtctttttggtagaggctaaaaaaatttcgataaactattttctagatcagaataatttttatacttcttaattattcataaaatatattttttcaattaatatccaaacactaataaatttttattaaaaaataattatttacataataattctacaaaaaggaaaaataaactataattttttagttatctaatgctactagctataagcaaaaaaaaggcttcctttagagtcgagttattaatttagaaatttctctgttttcaaaaatataataataagtatcgtgtgatcggccaggaatatataattaacatttttttttttgcaagaacatatttacagttttacacgaacaaaattattttttcctttcaaggtttatatgaccgacttcaagggcgacctcaaattagagattatatcgaaagcaaaaaaaaacatgaagtaacattcatttttctagtggggtagacaactgagagttacacgtaggcattcgcaaaagaaaggatctttagatgaaaagtttcataggactcttgcctgattctgtgaataattttcaacattctgattcgaagtagtagctccttggatttcatagggatatccttctgaacaagttattttgtcagaaccatagggtgtgttttgaaagccactttccgctaataatgcctcctcgatagccatctgaaactcacttggcttgctcttatacaactgggtctgactccgaaatctgacaaaacaaaatttatcaataaacatttttaactacaaacagttaaagtgtcacaagtcaagagttagcacctgtccataaattcactaaatgggaaaatcatcccttgtttgacccatccataatcctgcccaccaacattggattagaatctagaataaacatttatgggtcacatgagacagagaaagaggcatttaccctttgctttccgttcttagaaaacccataaaacataacgcacatagcattaggaacgcagcacctaagaacggcttcgggagcttgtattaggggatcgatcaccacggctggccatgctgggtaactcctaccacacttggcccaaactatatcacccaaagcaaaatcctctggcctgtacacatctttcctccttccaatggatgcttttgttagcctctcaacacctgaatagccaaaactagaagcatattcttcagcctcaatcgacgggaaatttttcgcatcgatttgcatgccaatatatttggcataattaaaattgccaaattctatagcagctacttcgccatcttctttcttcacagcacgtttcggcttcgaatttttgtacctgttattttcgttcttgggctttcttaaaaatctcatcccatcaagtttctctttgtatttatctacagcagcttcagcattatcatcttcgtcaaagctagtatcaatttcatcgaatttgggcttgctcttccagatattcaggaccgaattattaaacctcgaagaaagcatccgaatacgacctcgcgaagacctgctgaactcattgggattgggattcagcgatcggacactcttcaaattcgactcaacatcgccaccccaatacggttcgtcgttcaacaaagaacctgaaccactactgaaatcctcaacgtcaccattgcataacgaatgatacacattagtccgccgcttcttcgcgctacccgaattcgcaaaatcttcactgtcaggctcttcgagcttgcaccgcttaagattaggcatctccactttcaaagttcgtttgataatcatcttcgaaacattcaactcaaacaaatccaccttctaaccccgaaaccaaaccctaattcgactacaattcaaagtaaatagaaaacacacccaacaatccgaactctgtacgctccgtacattcgaaacacaaatttaggacacataaaataaaagtgttctctaacgtaccaaacgattaaaaatttccgatacaaaaccctaagttataatgcgaaaacctaccccaatcaatgaaactgagagaagccaataagaatcattaaacgtctctaccaaattctcttccgccaagagcaaaccagacgaaacataaaatcaagaaaaataaataaattcagatctcaaaaccggaatggttaacagattcaagcttaatcttcttgggaaaaatcaataggaaaacttagccaggaaaggtaatcgaattcttggcgaagagaaaacccgagagagagctgtgtgtcctcctcacacacaggggggtccgtttcagtttcgctcgatacacaaaacgattagtttattatatatgcacttatatttatattaataattaaaatataaataaagaaaaaagattaattcaatttaaaatatttatttggcgtgtgcaaggtaggggcgtggttttggaatatttatcccaaataaaatggagggagttattggttagggcgcgcgcgaaaccaaaattcatgaggagaggagaggactttatcttaacgggctactactgatttgatttggtactcctctacactagagacccaattgtccacctggatcacttttctctcctctctcctctcccctaccaatacaatcaaattcaaataaatactctccataaatttttataggaaatttataaaaatattataatgggatattggcacctaaattatttttaaattttttagctgctgcagtataaaaattgatttttttggaagcgcaactacttaaaactctcattccgttttgttctgtacctctccgtccaaaaatcacagtta

SEQ ID NO: 298594 - DNA, 5649 bp, Cannabis indica
gctcattaaagggggtcgagaatcttgggttgcataagagcaagaagagttaatactcaccaagaacattctctgtatttataagggtgaaacactcaccaaatacattctctgtattaaatacatccataaataagatagactcatggactaaggctcattaacgccccaaccacgtaaaaatccttctctaattttcttacagctctagaatcttattatattttattggttgccgaaaacctcagtcaacaccttccaaagagcttgattatgtatgaactgaaatctatcttttatctcttcagagtaacggcaagggatccaaggtctatctcaaatatcactcgaaccatcagcaatcaagataccagcacctttcacgcaaattcttctagcttcaagcaaacttttccagcatctagagtcggtgccatgcttttctatctgccaaacatctaccttagaacaatatttatccaaaagtagtttcacccacaccttgtcttgtccctgaagaaccatccaactcaacttagaaagaagagccatattcatatctttaaacctccgaaaaccaaggcctccacatctcttgggttggcatatctcgtcctttttaatgcacaatagtgtcttttatcagcattttgcacccaccaaaatctagcaagtagtcaatcaagttgtccacaaagagtactagggacttgagtagttgacatgaagtaattaggaattctttggaggacagacccaattaagggttttctcccagcttgtgaaagaagttttgctttccacccctctaatcttgtcataattttttccttcgaaaaaagatagtcatctctttttttagctgtgaaaaagaatggattgcccatgtacttttcagtagctttaatggggttcatgccaacaattgacttgatattgtcccgagtcctttggcttgtatttggagagaacaccaccccgcttttcggttcgctcacacattggcctgaccatttctcatatttttgaatgcactgcataaggttttctgcattctttactgtagcatgacaaaagattatcgaatcatctgcgtaaaataggtgggatataggacaagaattacgagatactgaatccctgtgatctctttattctcttctgccctgagaacaagttttgacaaaacttcattgcataagataaataagaacggggatagtaggtcaccttgccttaaaccacgtttgggatcgaagggagccaatagagcgccattgagaagaatagagtaactgaccatggttacaaattgcatgattaaattacatactttgccactgaaaccattagctttcagcacacgaagaagaaaggaccattcgagacaatcgtaagctttgttcatatcaattttaatggccataataccagttttccctttcttatttttcatagagtgaagaacttcttgagctatcaaagagcattcggtgatctagcgacccaagatgaaggtcgattaaaacggggacaccaacctatccataacttctttaagccaatccgttagaattctaaagataatttcatagctgaaattgcacaggctgatgggtctaaagaggtctacgcgatcatcatttaagactttagggataaggcagataaaagtatggttgagtttcttatttaaaaccccagtcgagaaaaaaccttaatcaagtgacatacatcccctcccacaatatgccagtattttctaaaaaatatacctgagaagccgttaggtcgtggagatttcagaggatggagttttaaaacaatctccttgatctcactgttctcagggattttgcagattaaatcattctccatatccatcactttatcgatgaagagagtatccaactccggctcactacctcgtccaaagtgaaaagagaaataaaattctcctggagatgatctccgatgctatctctatgtctcagccaaatttcttccgaagttactacactcccaatgaaattccgtcttctacgaatgatagtagaggcatggaaaaatttggagtttccatccttgaaccgaatccaattttcacgagatttctgcctccaaatcctatccattctgccttcaagttccataatctcaatctgaatttgagcttctaattccaccgtagatgtagttattggttcgttttgaagacgccccaattgacttcgaagagacatgagttatctgtcacaaaacccaaaaacatcctgatgccattttttgagctcatactttgtcgtaattaacttcttttgatattgaacatctgttatagttgcaggcacttttccccaagcttgatcaacaacttttccacagccatggctcgaggtccaaacttctaagaatctgaaaggatatcgaagctttggctcattacctcaaggattaagaagaatcggggcatggtcaaagccaaagataggaagattagtcacgctagcccgagggaaggcattgcaccaattagcatccgcgatggctctatccaaccttttcctcactctattacagacaattctagagttttgccaagttttagcacctccatcaaaaccaagatcaagtccacccgagttgaacaggaagtccctatgaaattctccttctcgcctagaaaaggctttccctccttctttctctgattcatcaagaatggcattttaagtctcccatgagaacccaatgctcattacaatcaataaatttatcagtgagccaattctagtaatctcttttttgtgagtagtacagagtaccgtagatacagaacaaacaccaagtgggagcccccaattcagctgaaatagatatacagaacccagcctcataagtttccaaaacttgacaattaactccccttctccaagcaacttagaagccacccgcagtgccaaaagagggaatacaattagaattaatgaatcccaactgattagtaacaagtctcatagtttccacatctactttagtttctgctagaaaaataaaatccgcgttgctgttgcagatgagacaccgcagggttctttctgttgtgggcctacgcagcccacgacagttccacgctaggcacctcatgatggcggtgggggcatggatactcccacctccttgccattttgaaaattttgattgtattccactctaaccttaatacagtttgcaagtatctcgtcgagatttccagttcctgtcgatgaatcattgacattagcatcacctttcttcttacgacttctagttttgactccaaaagaacgtttgatcgaatctctcttgttccttctcttcgatagcttattgctaccccttctactcgactcatcattcttttttcagcaccaataaccaacttgtaaacatcagaggaagcttcacttgttgaaccaatctcagtaaccacatcagcattagaagtgaagttttggctaggtgaattgggattataaggttggaacgaagtgtgggattttctttttctattattaccaaagatcatctcagaaagattttgagggttagataataaagattgttgggccttgtatatgttcaaatattctggaccgtaaagcttaagaaaggtttgttgggctacagggtcatgattgggccagccaataggagtgggctcaggaaataagtgaggcttttgagatagacaaacccaattatttggtatttctaagctttgggcaatcaaaggaccaatatctgggattaactcattgttgacatcaaatccagcaaagtcagggcgcggcaaatcctgaacttcaggccccatagagaaattaggtactgtattatccatattgatcacgttttcatttaccacctcattctctacactgtcaatgtttccaatattctgattcttttcaaaattacgactgcttcacgtaccaattgtaccgtgattgtcagtcgagtacatcttagtggccgttgcaacaagcatcttttttgccacgtcactatttggcttccccggagcagccgtctgccctgcctgaagaagcttttcttttccttttccagtagtgcattccgagttcatcactgctggttttctcttccataggcctttttgaacttttctgttgatttcccacttcggtatccccttattatcatttatgagcttcgtgcttccttttccagcatgattaaaacagttgctccaaccaatctcacttttaatccatatcccatacattgggactgcttctcgaattgcagggatcccatagctgccagaacatgacaagatttatcctagtgtgcaagcttaccgcagttaaaacaaaggtgtggtaatttttcgtacttgaattgaatccatgactctagtttgccgtcagctgtcaagaagaatcccaccgggattggttgtgaaagccatacatcaatctaagcccatatatagcctctcagaaccagttcctctttcctcttggaatcagccttgatgaaagaccctactttcttagcaataataggggtgttctcattagagaaacaacgggtggatagaccatgaaattggacccgaaaccttgctacctcaaagtcagcaactctcacctcaccctccacagactatggttttagattcagagccaccccatttaccagccaaggtctattctccagaacgatgttacagtcatcctcatctcggaaaaagaaccccaacacaccttcatcacattttttcattctccagttatgcctttctagttaccgagcctaacctagttatgcctttctcacataaccttactcatatatatatatatatgaaatccatacattacgttctttcagtggtttatcctggtgatatataccaggtctaacttagttatgttttacacacataacacttaacatacctgcatgtattcaatgtttatcacatcatataaaatcttagggtaataaccctaactcatattttcattggattattaacattaccatatgttaacactttcttactttcataatattctagggtaataacccaagaccgcattaaaattaaactcaaggtactagtttaccgagtctagcttaattatgccttgaatgcataatccataatcttattagacatagcatggcatagcatttacacaatacagttcactagggtaataaccctaggctattaaccgctcatattacggtaataaccctaatcccgattacaattactcacatatatcatattcaacataagtgctaccgtgcataatctacgtgcaaactactgtcttacctgttgtcccacaataacagagattccaaacccctgggtgctcctaatcaggtgccggtaatcctagtcacacaatctgggatttcacaaatagggttaatccctaattccactttcacaaaatataaagttggcattcaaaatatagataatcataaagagctcggaacgagctttccaaggatataaagaacgtccaaaatggagtcccgagtcaaaatttatgaccaaaataaaatcgggaaaaagatggctctctgctaggttttatggccgcggcgaccataaatctg

SEQ ID NO: 298595 - DNA, 3386 bp, Cannabis indica
ttttttttttttgtaaatttatatatctcaactaatttacatccaaccccattctatcaactatcccctcctcaactactttcgagtattttaagaaaaatatataaaaaaaatatatatatatatatatatatggaggctatcacactcgattagagtcgaataccaaagagactcctccaccaccacccattggcgccatggtgtccggctgctgatgacggtgctctccctcgtaggttacaataagcatagccggatcatcgggagccctctccacgtgtttcctcgccgggcaacctctcatggtactacatttgtagtaacctctgtaaaaccaaaaacaacaacgcattgtaaataatatgaattaaaactaaatcaatcaataaattaattaattaagaacacatatatatctatatatatcagagaaattaaccttggataaggagagccttttatcggtttttgtccatacttcctccacgaaaactcgtcttgtggaatatcagcgactttggaactaatcgccgggactctaattgtcttcttcacacgatttttcctgaattaaaaataaataaaatttagatcaattaattaggttcgaaagtcgtacgccacaacaaggtgtttttatcggtcaacaataaaagaaatttaaaaataaaaataaaaaaagtcttccccgccccgatgaagtgacatatcgccatatcggtccactaaaaagcctttttcttccttatattttttctttcataattcatataaaacacaataacagagcactgtcattgtcgcgcgtgcctaagaccataaatgaattaattggaatccaacctaactcgctgaccaagaacacctaccactcaggttgactcggttagattaactcttatcacaaccgagtttgtaaatgagtcaactcgtattgtatttcaatagctatatgaatatactgagtcaactcggctcaatcaacagaatcagtatttctcggaagtagaaaacaactacatcaaattccttactgaaggcatcaaactaaattgcgcgatatatgctaaaatgcgcagcgtaatgaaaggggttaggataaggaatgtaatgttaccttctctttgagcaatggcactttccggatccggatgcagatcccgatattttgcctgagaaatcgccggagtgttcgtgatcatggcacctcttcttaaatggcgccgttgagaggggtggtttaccgacggagacagtcggtgcaggagtcaagaacatcgacccttgctttccgttcgagacgcttccgtctccggtgatcgccgacgacatgaacgacgagctggaagaaacgctgaagctgtcttttgtgaactcaacctccgcggaggccttgtgaatgttcgagctaagtatattattgttaggtttagtaaaatccagagtcatgctctgcttctgagattgtgcgaaactcgccgcctgagcggttaccggaggagcgatcggcgcgggagaaacgtaagtcggatgagaagcaatcgacgcgggagctaaggccagtgtattaggtacctgaggttgatgaagcgagagcgaaccggaggacgaagaagacgagggaggcgaagaagaagatgacgaatgagccggcgcacgtctgaacctggcatgaccagtccggttgagaagagagatcaccttcctgaacttagagacagttacatccgtaaggtcagagcagtccatttgagtagtctgttgattgtgagagagaaatcgaatcaggtgctccatactcttcaagccctgagtcgcagcttcttgaatctctttctgatcttccattttggggaacctcattagctccaccgccattagaggctctttgaagaagataagagtaaaggttagaatgaatctgagagtatttgggaacggaaaaaactcaggcttccatagacgaaggagttggatggagaagaagtaaggacgaaaaggatgagattattatgtgtatatatataataattacaagagagataggaaccgggtgacctggtaaaaggctctgtgagagtcaaagtagttacgtgatccaacggttgagatttgtttgaaattttcgtattgggagtcgtgaataaaattaaaacaattcagagtttggtctttgcttttgaaagttgtggagagtactagtggtcctacttctactcttgatgattcttgaatattgaaaatcaactctttgatttttaacgtgaatgaatgtatcacaataattaatcaactaattaagtaattctttctttacaatattttttcaattaaaattattagaaaaaaataaataaattcaatgataattgaccaaaaaactaaaggaaaatcaaaccaaaagtatatgttcaaacaaaacaattttgtttttatttttagtgtgattatgttcttaaggttaatggattaggtactttcaattatattatgaatgtacatttgatttttttcttctagagaagaatgtacatttgattttttcttctagagaagaatgtacacttgattagagcaatatttatagagaaattattctaacacatatttacaatgataatgatgtagaattcatttcaactacaattaaattaaatacatatcaataaaaaatttacaattttgtgtacaaattttgttgagttttagagcactctcactggtatagtttttttttccttttttttaatgactctcactagtgtagttaaaatagttaaaaatgtaaaatttagctaaactaaaaggtatatgtattttaactttgagcaattttagctcaaggtttatagcactcatattaaatacactaaaataaagaaattttaaaatatttaaagggtcaaactaaaaataccctattcttatatgctctaagaacactttccttagcttctccactcttttttttaaaatactttaatcttaattagggtgcgtttggaaagccacaaagtaattgtatttgtatataattagaggtaattacgcaatttaatatatttgtcgaccatgtaattacaatgtgtaattagaagtaattgagggattctaattatactcttcaattctcatggtacactgtgtaattactaaacaatttccttattaaacattagctactaaaaaaattattttcccatgtaattactaactattttcccaaacaagatattaggaatttatatgtaattaccacatcatatctaaacacaccttacattttaaaatatagtataatacgggtgtgtttggaagtaactgtgtaattactaggtaaggtatttactagggtggtaattacacagtttagtaattacact

SEQ ID NO: 298596 - DNA, 8444 bp, Cannabis indica
cttgttcacttgaagtatcacaatgaatccctcttcgagtggtgaggagcttgctattctgcagttgcataaatgggactcatcttatcctaaactaaacttgtcagagtttcgtgaagcttttattctcccacaaggcagcagttattgtgttttcaaggcagaatgaagctttgctactgcctctctttacaggttaattaggtttatttatcccctgtaacttttattgacactgccaatgttctttttataggattgtgtattaaagttttacctttttactttgcttgccggtgcctttgaccaccccaccatctaacatattaacttgtttataaaatacccatttgtgtttgcagaagattgtggtgtgactaatgaagtgaagaatagttgtagtgaaaatgtttactatccaggttcagctttagatccaagaagagatgatatgccatgtccttctggatctgtagtggattttgatagcggttactcttttgaatgtgaatcattatctggaaggtctgcttatttaggtgatgtgtactctgttgcctggggtgtttgtggggatacatataatcagcacaaggatgctttatttagagagcttttgtttgtatctggtagccatggtgtgacagttcatgctttttgtgaaaacaatacaaacactacaatatccagaagttctgaaactgcatcacagggcaagtttgaacaaggtgagtgggtggaatgggggccttctgttacgccaacttcaaatgaaaaggtagatgaaccttttagttcatttcatgagaccaataggaacgttgaggatgtaaatacaaccaatggaaatagtgaaagtccacaaggagatgagaggtcaagaggtattgaatcgaagttatggttgcaatcctttcttgctaatgttgaagattttgaatctgatggtcaaagatggaccagatttcctgataagtcatcatttcctccctcagccaaagttgtttcatttcacatttttaatagtggttttccttttaaggacttcgtacctcatagtaactctttgttaaaggagcgcctgaaggaaaaggtacgtgattcaggtggtgatgggtctacaaaattaaattcatctccatctggtcctagttttgagccagatgttttgtctagttcttttagtgttgggaaaagcagtatgtacaaatgcttcagagtattctccagcaattcacactatgttggatttgctttgacattggtggatcctgtatctactgataagagggatgaaagtgctaaaaacctatacaaaaacttagtccttgttgcaatgttggacaaatgggcgatccagtgggtttcgctagtgaagctggaggaaaatcaaaatataggcccactggttgagtggacagatttttgtttttttaataatcttcttgttgctctcacttcttctggctttgtcgttttttattctgcaatgtcaggtgagtatgttgtgcatataaatatattacagacttgtgaacttgaacctaatatggaattgtgtgagcaaaccaaaatgtctgtaggcatagttaggaaaaatatcgaagttgaaaaggttcctggcaagagagtatttaataggttgattcatgcttcacatacctttatgttagcagcagctgatgaatgtggtgtagtttatgtgatatgtgctgatcagtatattgtggatagagatgagaaattttttccacattgtcaacattttggacttggaattttggctgggtgggaggttggtggttcctgtatatgctgccaaagatcatattctaagttttctggttctcaccaaccttgtttttcatctatgtggagcagatatcattctttcttaagttattccagaaatcatgcacttcacgaaatacagcattggaaccttaatggggaaggaatgcagcaatacacaaaatgttttagtggtttctttacagcttatgggagtaccaatcagacccttcatgatgctgtagggaagtcccgtcgtatgcgcagaatatttcttcccactaatagagttaataaggatgattcaatttgtttttctcctttcggaataactcgtctgattagaaagcacaacacgaaagatcaaaatggttctcaaattgttcatttcaatctttttacagagtcagcaatttgtgatgatagtggcttgcttatggaatgtgaaatgcatctccagaatggaagaaaagaatcttttactggagatgcagttggttgcactttccagggttgcttttaccttgtgacagaaaatggtctttcagtggttctgccctctatttcagtttcatcaagtttccttcctattgaattcataggatacaggcaggggagtatcaactcaggcagtgtatataaagaaaaggacaatatggaaattagaaactttagacacccatgctcatcctggactattgaagttcttgatagggttctcttatatgacagtgttgaagaggcagatcgcttatgtattgaaaatggtgagaataacttgtggctatactatctagcatgtaataatattattatttaggcacacaatcatattagttttcatagtaataattgtggtgtttgcttgtagatcagtgttcattctctactttagaactagaatgctggcctagcgcacacacacatatattatttcaacatttttgtttttgtattagggaatgacttctttattttattttatattatttttgtgcttttcaaagatgatagcaccctaattttgtttatgggtaggctgtcttctacaagctgttggatgtttgtggttcctgtacccaaattcatgaacaaggaggattatataggatatttgattagtaagaataaatatctagtttaaatggttatggagttttcctcttgagccaaataccttatggcattatcatttgatagcatgtttgggtgtgtcatagcaatgggtgggatgcaggtctggccacatgaccttcattttggcacccgaaattaggttgtgtgagatttaaggtaaaaaatgggagtagattaaggatttggaagcatgcatgatgtggttctaggctgctggaaaatataaatgaagtaatttcaatagttgtgtaacaattgacgtctagtaaacacatctgtgctgtgtgttatggatgtggtttgttgtggtggattgccaataaaataagtctcatttttttatgaaaaaatgtacaagattgagttaccacagtttcctttgccataagtgtggctcatgtcattccttatgacctttgtccctttttcaaaaataggaaaaatgtaatggcctacgggagaatatgaatcattattgacaataaatttaaagaagtctccgatactaaaatacttttcttctcttgtttcacgctggaggagtttgttttaatttgttgtcaccccgttattatttcatatagtaattatttggaagacaaagtaaatccttctatcatgtgaaacttaatccatgtgattatgaattcatttacttaatttgaatttcaatcatgattgggataaatatgctattagatagttgttggcacatttaaacttagtggatgcaacaacgaggatgattaaagcacttagtgataattgattcatgcctgatgctacaaagttgatttgatttttaagcatgaacataatgaagggatacaaattatctataagtagagtttaggaaattgtcatcttatgtcagtgttgtggttctccttttgctttcttattatatttgaagagattctcaaataaaatagtaacctaacatggtattagagaaagatgccttgagttcaccacatttacacttttataacgtatatatattatatatataaattatgtgaagactgaaattctcagtgttgggtttgttcgtttatgtttcctatgttattgtgtgtattgctcatatcaaggtatatctaaagagtttagcacaatcttgacatatcatcaatctcgcttacagggtgggatttgaaaatacctcgaatacgtcgattgcagttggctttggactacttgaaatttgatgacatagagcagtaagtacccttttgctactaattatagatgcatttttgtttttgcttatatatttgtttatagctccaagaaaaatactaagtatctttctaaattttctcttagtatgtgaactgatcaggaactagatactctttgatttgatctcagattcttaaatgacaaagtaatgaattaatgccttcccaaaaagaatttgttaaggttggtttgcttcttggtagcttaaacttatagcataagtggttatccaataattgttgttttcttgatagcttgaaattctcgcttagacccaagatgagagttttctttgtaaattagaaaaatagacatatactttggtattaaaaattaacaaagcaagcagttcttaatcgtcctatcaacgctaccaagttattacctctcattttttagagctcctaagtctgtcataaacttgtttgaaaaaatgatttgtaatttcttctggcaaggacgggattttttagggaatgagcatttggtggctttggagttgatttgtagacctaaattacaaggagcattgggtattggtgagttagagcgtacaagtagagcttttcttatgaatgagttgtgggggtttcgtttggaaaatagttccatatggcacaaattcataaaatgtcgagccacttgaggcgaggtgaagttgttgggtatgtgagtttgtggagaggggacaagggttctccatttcattaaaaaaaaaaacaaatgtggatttagggctgcagaaggtggtggaaaaccaaaaaagtaaaggtaacaagactacgatttacaatatattattgaaatctctaagtagattaaagaaaattacaaaacgtgatttaacccaagagagaagataaaggaatttgtattttgtattccttaaataagtacaatacgctaggtgtctgatatgtacaaccaagaaaaggaatggacaagtggtcaacattaattagacctatacatccttacgtaaagaataacataataaaaatatgaatattagccttggtgcttatcatcctccttcacactgggccgaaatcttcaaaatagtccaagccattggtttggtggtagcctttggcaaaaatggagaattgaaccccatggcaatgatagttgcccaatgcaaagaattcaacataagcattattaccatgaaaaagtctagaaataataataagattgtggaagatagaaggtgtgggtaagacattagataatgtttaggggatgaatttgtaataaaaatatgagctctaggctaaaggtggtgatttaccgtcaccaattgcaacatgttcattgccatggtgtgcaaaggcaccttcgagatgagagattcgaggtaaaatggtatatagccttgaagtccatgaaccactcagggttagaaatgtaaatgggtgaaagaggaagatactaattcgacattgttgatgcattcaagattcttaacttgtcattgccttggcatcaacactccattaaattctgtaacttgcaggttcaaagcaggcacaagctgggaagagagcctgaaaaggccttcttctgagtaagatgcatgtttaatattcctagagcaagaaaccacctaacgctcattttttaggggaaaatagctcttcttgattttcaagtgctgaaatggggtttggtgagaggtttttcttacaaggatttcaaaagttgaacccaataagttgctatgtatttatttggatgacaattgactcgttaattgagcttgtccatttgggtattaagtggggtccttgctaccaaaatacctagatatgcttttaagggatggtccttgaaagattgggttctaggagccaatgtttgaaatttggctgaaagactcgatcaagaaagtgttttatcaggaggaggaagacttgcactggtttggtcaaaatcttatgattttatcaggaagactagatcaagaaagtattttatatagaggaggaagaattgcaattgttaagtagaaaggttgtggaggttttcttttgaaaggtgtactctatgtgcaaatttatataagtatggaactagaagaaagaatgacatttagatgtcttggaaaagacattacttctttttatgaagatcatctacgaattgctaaaatcaaggttgcaaatggtagaaatttgagattttaggaggatgtgggattcactagagcttgtacatatttttttggaagatagagtgaatggggaagggagtaatgggcatgaaactttcattttattcgaaatccaaccaatatagaggttttatatttgattgagttgatgtatttgctagtgggaagaaatctctgtttggatatagagtagtttggtgacaactctgtaatttattcttgcaaatctgtgcttgaaagattaatttgggatgatgctatgtagatgtttcctctagttaatacgttgtaatataatgtaatgcctaattttcgcatctgtgctccaaaatttgatataatccaccattaatgctcattaagtattcatttaaaaaataataaaagtaatacttttttattgtcattgatcatttttcttcattttacatttaatgtagatacttaaaaaaattaaattggcattatattaaataaaaaaaataagctttactttagcatgtgccaaaaacttttggcacatcattggagcaagttttttttttacaaagtgagctatactttggcaccgcatcaccattgggaatgttctaagtaacatcattctctgatatcttttagttttgtgagttcatctgtggtgctgtgtgtcagctgatctcattttgctgtagttattcctataatacaaaggtcgttgtctcttatttatatatatatatatatatatatatatatttatacattaaaaaaaatattcttcaagttgttttgtaattcccaagaatttaataaaactgaaaactccttgattggtcaattggattaaccttctgtcatccttgaatttaaattaacttcccatcctaatatctatcgactaagcagtgtacacattaaaaattcaatcgtgtttttagtgttgtggtatgtaagtggttttatgtaaagtttccactaagaaataccatttttcttttgggttgattgaccagatgtttagatatgcttgtgggagtcaacttagcagaagaaggtattatgcggttgctgtttgctgcagtttatttgatgcttcgtaaaagtggcaatgataatgatgtttctgcggcatcaaggtgaatccctctgccaattttgtcttcgcttatctctctctttatatttatgtttcttagaacttttgttcaatgtgagttttcattatggagcaaaaaaagaaatacagttcttttgctacggagtttaagttcattgtgcagtatgaagagggtctatgctgttaatgatgtaattacattcagctatagatcatatataatcatctcagttataaaatggatgcaggttttgatggtttctattacttttcttcttacgtctagctttttctttgctcctttgagtgacttgcaaagcttaaatatgttaaagagagaaggttaaaagaagattttaattaatttcaagtgaaatataaatggagagattgatatcagtaggtaaaatagattgttgtctcttgccatttatattttgtagtgtgattagcttttcatttatttcctggcgtttagggttagagagatgatccttttggttatatgacctcaaaatcatttgctgagttatgtaaattgatgcagtaagctatatttaacaatatttggtaatgcaggtatttttagaacaggtagttgattcattgcaattacctgttatgagaactgtatttgttgtttttattgctcggtgtccaggacaagtgattgcgatttcttgatgctggaattattagtatgaatgtattgaatgtcttgtgattgtaaatagcgagcttggtaaagcctaaacattgcatgaaatacattttttttttcctaaaaaaacaaaacttctgttttattttcttttgtactcaaacaaattgctaggattattattattcacttttcacttattattattggatctgtagcactttttgtgtatttcaaaaaatcaatagattatgttaatttgtttgattcatttgctcgatcagtgttttgtttctctctctctctctctctctctctctactatatatatatatata

SEQ ID NO: 298597 - DNA, 4389 bp, Cannabis indica
aaaaaaattaaattaattttttcaaaatgctaaaacaaacagaaaatgcatcggtgcaccccatctttggagtgcattgtaaaaacactaataactataatatacgccgctaaataaaaaaaattataatttttatattcaataagttgccaaaaaaaatatctctattatataattttttaattaattttaaaaaatgattttttttttattattgttttctttttaaacaataaaatagaaaaagaaatgtttatgtttcttaaataatcactattatgacgttttattgcagttataaaaaaatatttttctatatattatttaaaaaaaaatagtctattaagtggattacggttaaacaaattataattaacaatttttttagatagtattttataattaattaatgattttttataatgttttattaaattaaattaggggaaaactcatattcataaacgtgctaaactttctcatttctaatgtaatgtatgtaatgtatctaaagagagcataaagggtttagaaacatgtttttcttcaagtaataataataataataagtttgtacgaaaaagatatactctatttttagaaaatttacgtcacgcatatatttctcttcgcaaacatacattattcatagacatatacatgtattttaacaaataatagtgaaataaattttactaaaatgttttatattcttattaaagtttttttttgttttttggaggaaatattcttataaggtttaaatattttttacgacttttctaattttcaaaaatgacgatgtaaaacaaaatcaacctaccaaaaaaataaataaatacttaattttataaataattgttttgatatgttcttacgaacaaattgtatcttgtaacattgaacttatttattgtcaaaacttcgaaataaaaaaattaagtattatattagaatcaaaatatatttccaaaaaatattattcttttgtcacgttaatagtatataataaattaattgatataatttcattgcaggttaatttagagctacaatatagttaattaattttactcatgcaataactatataaatatgagaattgctaaatgtcactagtagtgcctagtaccctcctatgtgtcaatatagatattggtccaactaacgtatcgggtcccatataatttaagataataatttttagggagtatcgctaatcaatcacaacgcgacatgtcgagaaggtgctaggcaccactagtgccttatagcaatgttcatataaatatatatcttattaaatttaatttaactgtgaaattagataaatataagaacctgagctttttgtaggacatgggccaagctgaggatctgtctccgtcgtctctggagccttttcttctggcttttgtggcggctctggagcctttacttctgttgatggatgtagttttgaagccgctgctcctgtggcgggcggtgtttgctgcgactgaggtgttggagttgatgctccagccggctctgttggtactggagtcgtcgctccagcttgttctgctggtgttggagccgtagctccagctgattctgttggtgtttcatgtggctgtggttttggaggcaccgtttcttcttttagtggttctggttgtgaagccgttgctccaggtgatggcggcttttgggaagttgatgattcctccaaaggagccaccaattttgtgtctgaagcagttggtctttctgattgaggctgttggggctgtgattctggagctgtttcaacagctggtgtgggctgcaactgcggagttgctgcctccattggttgaggttgcgactccaaaacatggtcagctgatgttggtggctgcagctgtggttggggagccgattgtccttctgggagaggcaactgcggagttactgcctccattggtggaggttgcgactccaaaatatggtcagctgatggtggtggctgcagctgtggttggggagccattggtccttctgggagaggcaactgcggagttgcttctacgggcgttgaggatggttgaggagcctgctgctgtggttgtggttgttgttgcggctgtggagttgttgcctctacgggtggagaatgcggttgaggcggctgtggttgtggagctgcaaccggttctggttgtggttgtggagcctgctgctgtggctgcggctgcgactgtggctgcggctgtggagtcgttgcctctacaggtggagatggaggttgaggcagctgtggttgtggttgtggagccataacctgcacaggtggggatacccccaatggttgcaatggtggttgtggctgtggagccttttctccttgtggtggaggcggcggctgctgtggctgaggagtagttgcccctgagggtggtggagtcgatgccattcaagaggaattattaatgctgaaaagtatttgtgaattagagctgaaatagtaaaacttcttaataagttgttggcatgcatatacatatttaggtgtatatatatactactagctagctaccgctcatattctttcctaacttagcaagcaacataaattgagtttgcatatatattaaagtttctagtatattgcttttgtaaaggtaagagtacataatctcttgttcttcacagctttaactttgtatggtttacgtggaccacattgtagctgttttagcttatttaatactatttgatataaatatatattgatgaagggcaaagtatctacctttctttccatattattagtactgtttaatattctatctttaccatgttagaaaagcaaaagtaaaaacatgaatggctactttgtcttttctgtataatatatatgtattcttttagttgcgaagcaagtaacgctacaaaaaaggagaatatgacaattttttagttataataaaaaaaaattgtgactaaatgtatcttttagtctcaataaaataattgtttatgactaaacatagtatttagatacaagttgttattaatttaattttaatcacaacaagtattgtgacactacaaaaaatattacttttagtcacaacaaaatttgtgattaaaagtaaaaaagttgtgacaaattataaatcatcattcttatgttgtgactaaaaagttcgtgattaaaaatattagtcacaaaatactataatgtatttttagtcacagtagttgttctgactaaaactaaattagtgacaactcgtatctaaatattatgttttagtcacaatagtaacattttgttgtgactaaaagttacaattagtcacaaaatattatgttgtgattaaaaagttatcactaaaactagcagttttatgtagtgtcactaaaaatatatttagttacaacaaattgtgatttttgtgactaatacttttagtcacggatgttttagtcacaacataggaatgacaattaataattaatcataatatttttacctttagtattgtgactaaaaataaaatttttgtagtgtaagcatggtacgtatgaaatagaaaaccttctctttggactaatagtacaagaaaaagacaatacaaattttaaaaacatttttatttctatatttataaatatatatatatatatatataaatatgacaaatggtaagggcccttaggatgtgatttaatattgggtctataatataggaaattaaaaaattatatttttacaaataatatatttttttaaattccaattattataaacacaactgtaacgatttgcagtaacagattggaaaccagtcacaacataacacaaatttccataatcaaaatagaaacagaaataaattgtacaaaatttaaaaacttgacacaagagaattatacgtggtataagtgttctttcgaacactactagtctataaggttgcctagagaatgaaatcaattagtaaagtctcaaacaattacaaatacaattaacttaaacaagattagactccctctaaagctttgccatcatcctttgtaatttactttactaatctaatttctagacatcccaccaaataattaactccctccgtctttgacgtgtgagtgcttacttcctcctgaagtaaggcttgaactagtcttatcctaaagacatttctcttgttcaatcaagttgttcaacaaattctacaaacattatatgaacaataaaacaaacactaaaacctagttgaacactctaagtttccacaaaaataagtctctcctcacaaatatgaaaatatgaaaactgaacactactacaaaaaccccctttagaggcggtttttaagccctttcagcgtcggtttttgcgaaattcgctaccgacgc

SEQ ID NO: 298598 - DNA, 2807 bp, Cannabis indica
gccccaacaatggcccaacttttttggtagaaagctggagtcattccatccggacctagggatttatcaggattcatatcaaacaacgctgctttaacttcttcagtagaaaccgggttgagatgtaacattattaaaatcaccaactagacaccaaggcagagaataacgatctttgatgctcctcataaggttccaagtattagctctaagactccttttgggttcaccataaatacaagtcaaccgccattcaagcatgcccggaacacgaacaataacatcaatatgatgaacagaaaaacccaccacttcggcttcattactatccctccaaaaaaacgcaagaccccctccccttccctaacagtccaccgtgaacacaccatcaaagttaatagttgagcggatacgttctactctctccttactacacatcgtttcacaaaggaacacaaacttgggcttcttttgagatatcatctccttaaggaattgaagagtcaatgggttcccaagcccatgacaattccagcttaaacaactcataatgactggcgggtcctcaaagtaaggcccgcctgtgacaagttttttgaagctccaacagcactttcattatcctctataatcatagcatttcccgcctaggatacatctccatatgcttctgagcccatttttaatccaagcccattagtcaaatgtatgttatggactactatgtagcccacgtgtttgatccaccatcacctcatcttcactactaattgtcccatcttcattaacacccacccgcctcctttttgaatcaataataacacattcctcattattaggtgtgatactcttttgatccaaatcagccacctcatcaattaaccccttgccagctttttgtccactagctgcaacatttgaatacggctccaaatcatgagcaatattctttccttttgtcattatagctcaatcattctcatgcaataaagtaccttgatttcctccaccaataccattaaaggatcttctaaattaggaaacttcggagtcagcccctgagctttccaaccagcgcctgagttcatcagagacgacgaagaaactacctctggctttctcagccactgcgagccatagggaagattcatctttctaggcaccgctttcatccattctccataaggcttatcaatctgagccatcagtgtaataaacaatttggaacaaaaccgatcagtatggcctattattccacaaatgaaacaaaatggaggaacacgttcatatttgaaacaaacccaaacccaatcactatctttctttcttagtccccattttcgtttaagagggacttcgatgtccactgacactctaacccggaggtaatccctccaaacaccaacaaaattcttcgggtttgtctccacaaaagtaccaatataatttccaacagctctaagaacaacatccgacataagaccaggcactatatcatgaacctgaacccacatatccagtttatttagcttgatggctcgtggattatctctttccttcagcctttgaaaaatgagttattgtcgattacacgtccacggactgccgtcgatcaccctttgtatgtccacctcgtgataaaattgaaataaaaatagattgctttccaattgcttaacatacatacccattcacggcttccatagaaatgctagttgatgttgaacaaaatcaagatccataactctgccagataagaattttccaacaaggcaccatcgaccatcaaaggtacattcagtcacaacctcctcccctatctcaaaaccaccctgctcttcttcatccaacgtcagattagcacaaacatcttcaatcgatggacttactgaactactggctgccgtattcaccgcaaaaacagaaaacactagatagcaaagattaacccaaaagatcaaacacacatcaccatgtcaaaagacaagacgtaactttaagtattcttataattttaagcagtttaagtggtttaatctttcattaattctttttaccatatgtaaatatattaaattttattaattttattttaaaaatacataataattatttttataattaacaagaacactataaaaatattttagaagaattttatttatattttgtaatttttaaaattttttttaataccgtaatctatactgtagttgttttgtgtttttttatagagtttttttttttgaaatacaaatatcagtaaccaaagattgacaagagaaaacagttacaagtgatcttcacgatgaggaactgagattgttccaaaccatctctttgtctgttccaagagctgctcttgcaagattgtgggcaatggtattctctgttcttgggataaaaccaattgaggcacctggaaaagatgacaaagaggaagcaatagtggcaataaaacctgatagagtcgatcgatcaatggaatgcttttgaatcgacgaaccagagtctggcaatcagagacaatagaacttaggggaaaccgaactacctgacaccaaagcaaggcacagttgagagcttcggcttcaggaaattttggtgggaggcctgaagtcaatggaacagaaaaaccagcaacaatttgaccctgaatataagtgacaacagctccatatccatgttttgtagaggtgggagaaagagctgcctccacactaagctgaaactaggggtgttcataaaatagccgatccaatccaatccaatccgcaaagtgtggatatccgcacttgtgcggattg

SEQ ID NO: 298599 - DNA, 3268 bp, Cannabis indica
ataataatctaatctagaaatattaagataaaactagttacattttctgtatctgtttgtgttaaaaattatcttaaaattggttataattaaaaaaaaaattattgaaaattgagctcaaggttctatttttaccattttggaaaatatatttaacaaaacagagaatccaattaataacttttgcaaaatacatggtttaaaatggtatttacccgcattttaattgtagcatgcatccaattattattattattattattttgaataatttgcactcctaaatatacagttgcaaataatatattgtgtctttttttattttctttttatatgaacgtgaaataaattatttgaaaaattaaaacaataaattattataaaaataaaaaaaaaataattagatgctataactataatgttaatattcaaataaaaaataaattacaactatttaaatgcctaaaacactttagattacccctttttttattttttattttatttatttatctattaatttatctattaatttaagcaatgttacccgttttttagattatcaaaattctcaatgtgagaaataaatttaataacccaaattttcacacaataatattaaattaactcgataaaaaaacaaggaaagaaaacagataaggagagggttttaaatcagaaagtgaatcataaagttcactttaaattgatttgaaaattaaaatagtttcaattattggacccccaaagataattccattgacaaaatggacaccaaaaggggtcacaaaagtctacggtattgtaaggtcaagtcatgaatcataataataataataataacaacacccaattccaaaatcacccctgctctgttctcatgtaacagaactgcaagggctgaagaaaaacaaaaatatatcaaaaaatcaccaaccccagagacccaagagaggtgcccacctttgggtcattcccccaaagccaaaacaagaaaaataaaagaaataaaggcagacatggcagagaacaaggcagccgaaatcaaggacttccaaattgtgacttcaaacaaagatgataccaacaacaacaacaacaacaacaagcaattagccccaaagagaagctctaataaggacagacacaaaaaggttgatggcagaggaagaagaattaggatgccagcactatgcgccgccagagtttttcaattgactagagaattgggtcataaatctgatggtgagaccattcagtggctcttacaacaagctgagccttcgatcatagccgccactggctccgggactatccctgcttctgctcttgctacttcaggggcctctgtttctgaacaggggaactctgtttcttccggtttgcattcaaagattgatgatttaatccctaggggtggcaattggacacttatgagtggtcacttgggaagatctcatggtgtttggcctgcaataactggaattgggtcggggtttgtgcacaattctggtcagtcaacatcgagtttcgcaaccgaaaacttgaattacttgcctaagtttggaatccatggcttggaatttcctggtatgaacttaggttcaatgagttttccagcaattatgggaccaggtgggggaaatcaacatgttccgggtttggaactcggtctttctcaagatggtcatattcgggttttgaattcgcaaactttggttcaatttcagcagcaacaacagcagcagcagcagcagcagcaagctgagcagagatctggacctgaaaactctgttgagaaagatgactctcaaagtagatgatcatggcttggattttgttattgcatagaatagaattttggacttgaagggttgaaaaagttcatccaacaggttcttcaatctccaacacaaacagattgctctgtttatgtaaaagtttcatgttaactgtttgaattctttccctcttttcttttcttttttttttttcatacaggataaactatgcagtagataatggtttggaggtttggaagtttggatttgatttttttttttcgtttgcttagaaaatctttctcttaggagtgtaattgtaggtaatgacaatttctcttgcttgttatctttatccaaatatgaagtttggtttagtttagatttagattataccaaaacataacgtcaataatcagttcccctttaatatctataataatatgctttggtgaataaatagcactgatcttttggtaggactaatcttaagagaattgaaggaatgaatagggttaggttatccaatattttggttggcagtgactactgaactgactagtgagtaaatgaatgattttctttatgtcattttatttaattagttgaatattctaagagtgtctcatatttttgtatagtctaatatgttatctatccatgttgaaagggtatggtctcacactcattatatttttttcacatgacccaactttttttaattatttggctttgtatgggttgggtttatatattggttaaattcccaatcagccaaggagaaactccatataatatgatgccaattgagcaagagtgtcaaattcatttatgtgtaaattaagtggagttctaacacagacagagctaaagacaaattaaatgatcagacaaaacctatgtgtccctataaaagaataaagtaattagtaaaaatcgattttcttactattttgtaaaatcatcttcttttgatacttttttacaaaatggcatgtaaaatatgtttcttttctttattgttatttttaaaattagtgcttagtaaaattctaattttcttttttttttaagaatgtcgtgaatttttcatcttgaaatacgagtatagtctcgtgagaagaggacacgtggactcaattcctaataaaaaatgatgacgtgtcaatagtggcactcatagagccaatctcgcatgactcaaacttgcgagataatgcgatcgagataaggatctagtcgcataactatgtctagcatgatcaaaagataagcataatcaatagaaattaatactagggctatttacaaaaatatgacaaaaaggagataaatttttatatatatatatgacataaaaactttttttttaatgcaaattggaattttattaagggctgaaatgaaaaatggccctaaatttggaaactaagttagtaaatgtccctttttaaaaaaaattagaaaatggccaaatataataaatt

SEQ ID NO: 298600 - DNA, 4534 bp, Cannabis indica
aacggcagcaactcaggtcttttaactttctctcatttttcatttttcatagttaaaagtaacccaaaaaccagtgacttaattagttcatttgtgtccctctaattaacttggtcaaaagttgtatacataatagttaatttgatgagttgaaaagtcaggatacatatttgattgtaaatatatgttattgtgtttttctgatattaaattgtgtgttggagtgaacttgctaacatttgacatcatacattaaattggaatgaattagtgtcaaaattaagtgttatctttagttttttgtattatagatatatgtaagaaaatataaaatagagttgcagtaaagaagtgaaggcaggacaaaaaaacaatgagggtgcactgaatttgattggaccgaagcatagacaaaataacaattcaacaaagtctgaatgttttattttaaatttcagatcagcactatacaaaaatcacaacatttttgtccatttctttgtttcagagctgatcaccttctaaatcatatgttattctctcttccacccccattacaaaacttttttcaaaaaaattcataatttctatgaattctaaataatagtgctcgtaagataatacaatactttttatattatatcacttatttgatacaaacatttagcaatataaaaatattataattgttatgcaacactgcgcgaagcgcggatttattctctaattatacaactaatttcaactttagttactgacaaatctgaatctcatttttaatttttctcttattaggtaaatttcccttctattttgctgtagtcatggatccaactccctttcaacctaccctgcggccaccttggatccctatggtaccgcctaatcaaccaagctcgattgccttttgggaaaccagaaacgtgcttcatagccttaaagatttacatgacactgtcagtcttgcgaaatcgatgtatgttttcgattcattatacattactttgtgacattatatattatgttgttgtttgttaccatttagttgtttttgctttattgtttggtatttgtattggtaggtgtaaagaacttgaaatgttgatggtggttaaagatgttaaagggtctgtagaagtagataatgatgattcacttagcgggattttcaatatattgaaagatagaagggttggtacggaatcccaagtttcactttcagtggaaacgacaaatgctctgatgtgtagactaagagctcaacttgaaccatttagggcgattaatgatgaactgtatccatgggaagaaaaatgtgctgctattaggttatctaataaaatgaagaagtcgaaacgaaataaacgttggaggaagagaaagaggaagctcattgcagaaatgcatgcgaaggtggttttagtgaacttgctttattcttttccgatttgacatctttcttatggaaataggtatctttttgttgcttaagttgatttcatatccatttactctctgtaacgatcataggagcgtgaaaggtttgaccaagctgatcaagaagctgatgagtggagggctagggaaattgccaatgatactgcaaaacgcaaggtattggactatattgttctgcacatgtattgttaattggtaacatacaatcacaagttcatcttgttaggcatttgtctatgttctgcaagtttgtttgctactaactttggcatgttgattcccaggtggagaagatgaaagagattgcaaagctgaaagcaaaagaggagagaaagaggctagaatctgaggttagaatttatggacttgttttctaaatctacagatgttgagctagatatgaaagcttcttatttcgaacatcatgctccgtgttcacttaactaaatttgacagctaatttcttatttcagcttgagctggtattgattgtggagaaactgcaagagttacgctcaattaggattcaaaagttgaaaaaacaaggttttgtggttcacttttctttctatattctccctgtttttgtgttttcgttcttttaatgtatgatgatattgcatggtcggaactaagcttgctttggccaggccttaacaaattcctccaatgaattgagaatgtctttaccatacaacattattatgcaggtcattttcttcctgaggaggatgacaagtttctggagagggtgcaagctgcagtcgaggaagaggaacgtcaggcaattgcagcagctgatacagaggctgcaaagggtgccattgcaactgctgaagaatctaggaaagcaacccataatcttgggcccgaatcaaaagaaataagccctaatgaagataatgatcaggaacctctggttaaaaaggatcagaaatctagtgtgaacatggagaaagaacccgggaagcaatcactagaaacacaagtctatgattctgttgctaacttgccaattgaattctatcactattatcatgggagcaatattgatataggcacccttattgaggtgatacaaacttctttgttggtaggcttttagtatttctttgatcaggtctgtatcttaatgagtactatataaattttatgcaggtgagaagaacttgggatgcctacataagaccaggaggaaggtaaggatgccaatttttgtttcaatattttgctcaaccagtaaagtggcagttctaggttctaactcattcgcagtcaaactataccactcatactaaattctatttgtttgttccacttgtattctttattattacttctttaatagttaactaattgccaattgctgcaccacctaagacaatgtcacattttaacttcagtagaatttgtgcagccgcataccagggcactgggttcaaccgccacctcctgcgaatgagatttgggcttcgtatttgatgagaggtcaaaatgatactaaccgactcatgtaagcttgtttgcagtgctgcaccaagtcaattccctttgtttgtttatttgaagatcgatctagtatgactttaaacttttgcacaagttagttcgttctttctttcttttcttcttctttttcttctttttttttttttattattaatggaacaaaagttctataaattgaaacaaattgaggtcagacactccccaacagcaccatgcactccaagatcactgatcctagctactgaagctagtttatccacaaaggcaatattacaagtttaaccttatcattattagcagctgtattgccatctggcaatcagaaaacaaagagataaaatcccagttttgctcctttgcccattcaagggctatcactatttcctcaccttccgcttccagtgcagagttggcactcacctgacagtttttttttttaaaaaaaaatccctgagccggaatcaattgactttgcaagttttagaagtccaaatagcatcattattgttgccaatatcaagaaccaccaactccatgttttctttgaaggaaacgtccactattagcagagtatggggacaagagaataattctgcacctgtaaattactttgttctcttgctatagtaaactccttgaatctagactacaccatagttgatatcaacaaaccaattcgtgacattgtgaagcattaagtttgtgtactcccaaagggtctcgaacaaggaagctgcatagatcaaaaagtatcttccaatctctcctaaaagtcactagaaagcttcctagcttttccatgagattgtccccttgacattcgtcaatttctatagatcatgcctctccaaaccagaaggccctagctacttaacgtaaatgttaaagaaatttccatatgatgcttgcaaaaggaggtacatgtgagatgtaatggtggtttattagctgttttgtgccgcttggcattggtttgacattccctttgcattttacaggatcaaaatatacagattgagtaaagaaaatggatcattgaaacataattttgaatcaacaactgcagctttaaatgtgtctagaaatgaaagtcacaaggtctcatcaaatggagcaagttttttgacggtagttctctgccttgccctttttatttcattcatagaggcataagaagtgaattgttatgattgatgaggtaatgtctaagctgtcttgaaaaaaattgaggtagtctctatgtgaacgtggtacttttgcaggagaattcacccaatcggcaaacataaattcacaagtcaagcaaaaaacagattctggaaatcaattgcataatgatgttgtctctaaacaggatggagtgaacaatgtatttacaaatgaggttcgttctgttgtcattttgagtaaagtgggatcaaaatattcaaatttgaagtttcaaactgatttctgctgctgttttaatgcatgcttgtcttaacaaaaacagctgtcctaggtgttcataatatcttgactgtctatcttaggttttctgctcttatttttttatttttgttttttt

SEQ ID NO: 298601 - DNA, 1338 bp, Cannabis indica
ggtcaagtccgatgtatactccatgcatccaatacttgcatactttaccaataccctagaaaggacacaccacttatccaagtgtaagtaaactttatcgatgattatcacgtcagcgtaaattctgtgcactgataaatcatgggactaaactttgaagcatataatcataattactttccactgtgatgacattactgtaattgtgaatgactatatattctatatttaacaaaaattatatattaaaccataatcatgaaaataacatgtaaacgtaaatgacttctaatcttctattgacaacaaataaggttacattaaaatggattttatttagggcataaaatcccaacaataagagcctcttttttgacgaaatgatggagtcaaaggagttgtttttatgatacaaccccttcaacaccaaagcaacaagagagttaggagcattataaagcctctaagctttcttaataaagcttggttgaaaagatgaatattactaaaacaacagaccttcccaagtgcaccaatgcatcttcatcttcacattattaccaccttaccaaaaccaagcacacattctatggatatccctgataaattatttaggaagtttaaaataattcattgtgtaggtggggatggattcaataaccgccttaatgagaacttatctacctgtcatagaaaaagacttggccctccaactattgagcttgttccaaatacagtcacaagccgaatcaaataaagaggatttattttgcccatcaaaacaagaaagacccaaatatttctcgtgacactcaacctccacaataccgagagcattcaccatatcttcctgatcttcaatacaaatattagaactaaaaaaatcctatggaatcattgaaagattaaaaagaggatcataaacaacaaaagataaatattaacagcagaaatcaaataatgccttcaaaaacatataaactcagacatattatatatacccaaatttcttaataataaaagcaggatcggccctgaggtgagactagtgaagcagttgccttaggctccccaccgctcaggaccatattttgtaaatatacaaattaaaatagagttagtaataaaataaaaaataatacacacattactaaatgtatgttggtgcttggtgataatttaattggagtaataactgggaggtctagaattcaaatcttagaaaaaaattcccactttaagaatgtattatgttgtcatgctattctcaggtatgaaattgaaggaagagaggatcttagagactaaaagcgagagagaggagagagagagagagta

SEQ ID NO: 298602 - DNA, 1487 bp, Cannabis indica
aatacaaatggttcctcgtcgccctcaggttggaagatcaccatctttcgcttgcagtcaatactagcagaatacttggacaagaaatccattccaagtatgatatcaaaatctactaagcccaattccactaaatcaactgtaatatctcaaaaaatatataatatttaattgggcatattttattaaataggtgattatacgaatattggagtaagattataatcttacttaagctaattgcgagttaattagtgtaaatctagtaagtgattaaataaagcgtaatttattaattacggagtttttatcagattatgtgggtattgtagataccatttttgtaataaaatatttttgggtctggcggccgtggaaactcgacagggtggtcaggaatgtcacgacaattgaagttatgttttattggaattataccagactagtttagaattctaagtttccagttgggtaggaatagttagaaatgaccaaattacccttaggtttttattttaggcttaagtgattgaggaggggaaaatagtcattttggtggaatgttagatttttgtcctaagtgaattttctaggctgaagttagggatttaatatattctaatatttatttacttaattaagataaagaataaaaccaaaaactaagagtaaataaatcaaaaattggataaccctcactctcttcctcttctccagttcgacagccctagaacccagataaaatctaagtcaaattcttcaccaattcaatatttccttgcagatttggctagcccaaggtgttgctcaagtcttgaggtaatgctttctcttcttctctttgatttcaagattttaagttaggtttggactagggtttgtttgattttgggttgtgttgtgaaattaaagttagattatgtttctagggttgatttatggtttaattgtgtacaatttgtttatctttttggctatttgagctagaattagggaaaaaaaatgagtttaagagcacaattttgattcaagcatggtgattttgtgatttgaatgtatatctgggtatgggatgttaaaatatgttgtttttatgctatggaactattttggaaggttggagtaggttggttgaggttgtggttgggttttggttcgaaaaaccagggttcccatttctactgtagagaaactgattaaccaattttacatgtgttgtaaaaccggtcaaccggtttgccagcaggggaaaccctagtttttggtttgaaactagttttgattggggtgttttttagagcttagattagggtattttagtaatatttaagctattttgaaaccagtgggaagttagagttgtctggttatgtaattagggttagtttcagagtttggataagttgttgatcaagtttctgttggaaattattttaccaggatctagatttactaacaagtatgctggattaacaacctaatatgaa

SEQ ID NO: 298603 - DNA, 2133 bp, Cannabis indica
tttaatattaaataatatacaaagaagttataaaatactaatataataaataaaaaaaaatgcagttgctatagtactactgtctatgcagtgtactagctaaaactgcatatatgctgttaaaatagaggattttttttactgtaactccaaatttgaggttaccttggagatgctcgtgagattcttaacaacaaaatatattcaagtttcgtaaaagtgcaccctcattctcaccattaaagccccactcaaggaaaatgaatcagacacactgatctggttcttaactcaccaaacttacaagagcatacctctcaagaacttgcgctaaataagtcctcagtacccgtttgggtgagcctcatcttcttgctcatgagtttagccatttcatggctagttagttagcatggtaagttggtaatttgggtgcgagctgccattaaatatatcctaagaaaactaaaaaccattaatgggatttgtccaaaatgtaaagacaaatcttaaaatgagaaggcagttttaaatttataacatttacatgctgtcaataagaaatgacagtgtacctggagatttgtttattgaatggaataatgacatacattaatttgttctagctgactggagataacaaaggcttatctgaaaagaaagccttaaggttttctaagactagtaggctcagggattcaatggatgcttgggttgtaacagcattatgtggagaaagaacaacattgtccaaaacatacagctccttgggcacatcaggctcgttctcaaacacatcaagaccagctccaccaagttgtccttgggttagaaaatgaaccaattcttgttcatctacaaggcccccgcgtcccacattgatgatcacacccttctttccaagagccttcataacatctttgcttacaatatgatgagtttcagttgttagagagcaacacactataagtatgtcactttcagttgcgagttcacatacatttgagaagtaaggaaatagcatagatggcttctgctttcttgaagtgtaagagaccctacagccgaaagcagagagcctttgcgccacctccaagccaattctccctagccccacaatcccaactttcttccctcctatctgtaattagaacagttaagatcttaaacactacataacaagcaaaggctaatcaaatgttaacatttcatatctttccaagtataagcattctgttagtgatacagccacatgaacaaaccattttgtcatttcaatgtacattctacactaacactaaaattgatgaaatagcttatattaacacaaagattaagaatagaaaacaaaaaccaacaccaaaatctgaccttagacccaagtgggtactctcctagagaatgccagagtccagaccggacatacctatcggcagccgaaacttgccgcagaacatcgagtaacagagcaactgcgaaatcggcaacatcctcagcaaatgatttgccagcgtcggtgacggcgatgcctcggaggcgacatgcggacaaatcgacgtggtcgatgccggctgaggagccaacgacgagtttgagagaaggtagatggcgaagagtgtcttcggtaactgggcagagcccaaaaatgactagagcgcgtacggagtgagcatggcgagagtagaagctgtggagtgggagatcaggagactggtgcggatccagtaagcgaaaatggttcttcaatagattagtcaaaggaaggaaattaaaggcagggttgcggtggatgaggatcgatggaaggtcgttgtcatcattgatgagaatttcatcttcatttgaacctccattgaatgccatgactgctgctctccaccttggaaatttgagattttatgtctataataatatctcacgtaataatatgctaataattcacttttttacctaaaatagtactcttaactaaaatttggaaagttatataatgcacccccttaccagggatacactgatacatctttatctttatctgttttagtatctaatataactttttagtcaatttttttcttattgtcatgtaaattatagtcatttaagacaccctgcaaaattttaagaaattcg

SEQ ID NO: 298604 - DNA, 3077 bp, Cannabis indica
atttcttttccctttgcactattatgctctgttgaatttgtttcatcatctctatcagaataaccatcctcaacatcagttaaatcattgtcagaaatggaatctgcctccaatatgctaacaaatgaaccactaaattcttgtgggaatatcatttgtttcttttctccaggttttccctttctcgcatataggtcaatcaactcatggaaatctttctcgtaagataatggtgaagaggttctactatgctttacctgtaaaacagcaacagcatgaatgttactgacaaagattatgagaagttaaaatgtttaacagcccaaaagaaatgactgaatttatcctaccataaagtaacatatcctggtaaaaatttaaagctctggagccctctagaaattaaactactgaaatgaaggatggataatgccgtgagagggaactcactgaaaacctcaggtttggtcgaaaaaacgaggtaaggacaatctttgtttcttttgtcatggacaatgacttgagaatgtcttctcgaacctgtattgtggcagtagcagttaatgccatcagcggtatactgaattttaggaactttaagttgcttgcactgaacttctctcgcaggacagacaatctcctgaaatttataatacttacattcagatatttgaagtacaaacacaagaatgggtcttgaaaaatgtcaattttttaattcattcaaagcaaaagtcactgtggaaatgcaaatctaataaatattgtggtacaggggtaaagaattaaagtggaaattgacagacctgtagtctggccgaaaatcatgaccccacttagaaacacaatgtacttcatctatagcaaataaagcaatcccacgattttctgctaatgtctgaagtggtttgatcagtctgtagcacagcagatttaaaattttaaaagtaaatacaaacttgtatgcacctaaatgacacaagaaatagcactactcttatacataccttaaaactgtctcagggcagatatacactatgctatacacgcctctcatagctttagtttcaacagaactatcaggctggccagagccaagaaagcaagcagagacgccatgttttgctagttttaagcactgatcatgcatcaagcttatcaatggtgatattacaaccacaaccttcccagtcaataatgctggaatctgaaaacacaaagatttccctgcaaactaataattgagtataaagacctgaaactcacccaacacaagaaagagtgcatatacattaacaactgttaccagatcctgttgcagcaagaacaaggcagtcttcattagctagccatgcagccaatgcttctttctgaaatttttttaacgaaaaattaccgaaatgcttttgcaataaactgttcactttatgttcccaacctggtccaatgaccatctcatctgagcaatcatctagaaatgcttctgatgtagcagtcttgatacaataactatcatctgaaataggtggcttgctttgttccacaacttcagtttcccttctcttgtttctgctagtggattggaaatgttctagtatgctagattgtcgcttctgaccagagacacaagaggaatacatggttcttttccccaaagccttgacattgttctcagagctggtagaattacttgttgtcctatgactgtttctacgacatccgttcaagatatgttcaactgcatcatcaacggatggaccaactaatttcacagcttctacagcaatggaattctcaaaccccatttcaataagttttgagacaacatcttcttcggaagaaatactattgccattcatgtttgaaattgttttctagacaaagaaaaacaaaacattcaaacacaagttaaacacttgcaacaaatgaaagcttgtaaacatgatacctgcattgacatagtaaaaaggactcatgtcaaaattaacagatttttgttctctcctaagagtagagctgttgagtttataacttccagatttcttctatgtttcccatttctaaataaccaaacaaatcttcaacttccttcaagcaaaataaaaataactgatccgttcaattgcttagctgaaatcattttgcagttttaatttttacccaataataaaacacattacaatctaaaaattctacatttcattcttacttccaggtgaacattagcaactactgaaaccagccagcaatgccttttcgacaatagaaaagcaacaagcaacataaaaatccctattttattctaaaacctacattaaaaaaaattaaaaggaaacccctaaattttttatgataactgttccgatatgtaatctactatacattactagcgaaaattggagaaaaaacttaaatgaatacaagagaaagcttacaaattaagagattgagctaattggcgtaggtggatcgcaaaaagaattattttcggtgaaacaaattctgtagaagctggatcctcagatttcagcaaaaaaaaaccgcgaaacgttttttttttttttttctttttctttttcgggtcagaccccgcgaaaacttcgaacgttttggggtttgggaacgctatgacggccttatatttttgaattcaagaggaaattgcaccgtacaccttttttttgttagcacatttcattttcatttttcaagggatttttacactatgtgtcaaatttaactattttttacatttttaatgtttattaattttttaaacatttttacaaaaccatttttacctgtttaagcttcaaaaagtattaaattacaaaaatactacattgatgatatcagcacaccttttggtttctctcattttgtctcacgacgtcttctctatcagcaaatcttcataaccctttttctctttcttttcttcccacaattaatctgttgaagccaaaactctcaagccctaacccttacctttcccccattgtcgttcaaataatgtttgtaagatcatcttcatcttcttcctcatcttcttattcttcttcttcttcttatttctt

SEQ ID NO: 298605 - DNA, 5343 bp, Cannabis indica
ttttgtttttttttttaaaagaatagggttaggtctgcttaaacatggagttgctgtttgggtcaatgtatttttgtccttgagaataaactgagtgagttttgcatgcatgtgcctacttgccaacattccaaattcccttgacaggcgttcaacaaattaatgggcaaatctgctacattctattaccttaaagaggaatatagacattttccattttatttaattttctctggtagaaagaaacttggtttgattgtggttactgtctagtttcaatttttatttctttttggatctcttgagcgtacctatcactttataattttcatgatagtagtcattaatatattttttttttaaattaatatactttctaatgttacatctaacctgtattttcttactcaaaaaatatatgcttctagtttgacaaagaggagtctctttgtgtgctacctttgtcggaatgttgggtggtaagccatttgtatccctatatcttctgtaccacaatcttatcaactgctatcaaattattaattaattgtacttcattctccagatatcaaaacttcacttgcttgttgatgccgtcactgtaagctatgacaagtttttctttggagatgtcggaagagagacatatgatttcttttggagcgattttgctgattggtatgtactttttgtataaatagattttcattatattatgtgtgcatgtgtttggcatgactagaatgtacctctaaagtatcggctgcataaatttactgctgaataaaatcaaatcacaagatttaggcctttactaagatatgtgtcaaaagaatgaggatatccaaagaagcatagtattgtctttagtttacatttagagtttgtcgaagttcaaatgatcaaatttcttatccaaaagaggtagctcaaatggtcaaactatgatttgttccctcaaagtttgatgtttaagtccctcatggatacttgcgtagaaattctgtagtatcctggtccccaaatattattggcttagacgggagcagggatacatatatgaagggtctgatatatctttgtttctggctgattatccatcaaatgtcggaaaattattagtgtaaaatcaacattgtggaagttttggatcaaagctgttaatggtccatcactgaatatatggttccaaagatcagttgtgttgttttatatatgaaataattaaataaaatcaagtgtattacaaggcatatgttcaaaaatcttgggagcactctgattattttggtgctactgttaattttttgtcttaataaatgatgaatatattgataggtaatatatgtactaatacaaataacgtatttatgtataataacataatattcaattctccataaaaacattatggtggtggagatggtgatgtgacttatgtcttttattgaatttgtagtttccataaattgatctttttctgacttctaggtatattgaggccagtaaagctcgtctttacaacaatagtggtgattccgcagcttgtgtaacacaggcagttctattatacgtttttcagaacatacttaaaatattacatcctttcatgccatttgtgactgaggagctctggcaggtaaatcgttttccattttctagctaacatttaaatttaaacttaaattattttaactggccaaatatctttcacaattagatcaatgaatgatagatttcattaatgattggtttttggaagttccttttctggggacaaacatctagctgctgtgaagaatagctatgattcaagtgattaactttctacccatacggattctcattaactcattgattgttgaagttcaacaattggctacattttgttaattcttgatgtctttcaaatttctatgtacaggcactccccaacagaaaagaagcactcatggtgtcttcttggccacaggtttcacttcctagggatagcaactcgattaaaaagtttgaaaatctacaagcactggtgagtatcaacatcttcactggcaccctgccctttggtttgattttttcgtttacttgtgttgcatccggaggtcaccactataaattttgcttctcttataaatctcagactagatctattcgcaatgctcgagcagaatattctgttgagccagcaaagcgtatatcagcatccatagttgcaaatgaagaagtcctccaatatacatccgtaagaacagtgtcatttatattctgaattctgactggttagcacctttagtataccttagtcatgcttatgatgtcactgccagaccattcacctgtcagacaagaaattgatgataaaaagaatagagaatggatgataaagtttcacgacattctattcaacaccttttctgttattataattatctctaccttagtctccatcaaaccagttctcttctatggaaaacaaattgtctgacaattttcttattttttgatgcagcaagaaaaggtggttctagctcttctatcccggctagatttacagaacgtccattttacaaattctcctccaggtgtgtcttccataaattagcaccttgtcatttgactataagttgtgactttgcagtctatgaataatatttatatatataggaagagacattatttttgtccctaccaagtattctatttttcgcacctagagaaaatatatcctaattttttttatatgacggtacactatatttttttttgtaaggtacggtacacaataattataatagagcatcatgcacattttcgagaaattttgaataatttacgacatcaaaaataaaatttaaaatagttagttacacacgtataaaataaaacaggcatgcgtgtagctgacaatttgaattttatttttggcaccttaaattatctagaaattttaaaaaacgtatatgacatctactacaagtatagtgtattccgtcaatataaaaaaaatagtttataattctctatataccaaaaacaaaaaatactcttaagttaggggaaaaagtgatgcccctacctaaaatttttcatataatatatatatttaaaataatatttggtatcttggtcatttgattcctgaatcaggttaattgtcattaattttgccactatggtttggaagtagcaaattcaaagatcaaatagtccaaacttaaatagtcaagggaccatatcatcacaacttaattatcaaagatctaaatatgccaaaattgataagttagagcctgagttgtagagcatatatagttagggaccaaatgttctaattacccgaattttggttcaggagaacaaggttcaataatttaattttaataacaaagatgacccatttgttggtgaattcaaaatcttcagggaatgcggaacaatcagtccacctagtagctggtgaagggctagaagcatatctcccactggctgatatggttgatgtaaccgctgaggttgatcgccttactaagcgtctttccaagatgcaagcagaatacgagggatatgctacccgcctcagttctccaaaagtatgacctacttatattcaagcatgcctcattctgatgtaaaaaatttacttgtgcagtaacatttttacgatctttcagcaaaatgtgttttacaagaaaataatttttggatcaagaaaatttgagaaagttcttttcatgttttacaaacagttttttttttttaatttttgaaggttgctgtaccaatgctttttgtatgatctaaaaaaacaggtggatctaggtgcaataccatttcactgagatgttgaatgtttacacattttcttttccagttcatattccggattgggttaatccctctagtagtcggatgaactgggttgtgcctgttccgattcataatgacaaaagaacagaaccgggcagcagtgttcggctgtaaagaactaataatgtttatttattattttaagtttaatgtatggattagtgtcccctttccttctcaccctgcaaattgatctatttttttttctcatgcttatattatcaatataataccctgcaaattgatctattctaaactgccatcttaatcttccaacatcttccatttatttatgcagtttgtggagaaagctcctgaagatatcgtcagcagtgttcgggaaaaagcagctgaagtagaagagaagattaacctcaccaaaaaccgtctatctttcctcaaatcaactgttcttgtttcagaatagactctacgttcacttacaatatttctgatactaacatcacttggtgtctttcttttgctcggtaaatctcattccgagatcagttgccgcccatctttcaaaaattaaacttcaactacgtggcatttgcttctttggcactacggaggacttgtaactaactcaacatgcctggcagcgactgttgagatgattgccgtcgactggcaggtgatacgttcgttatttgttctagtaccaaatattcctctcgttacattgaatggatgctcatgtaggtgtagctctccacttcaacaattctcttgataattatacttttttttttttgctactttgcctacgattcccactcttgaccgttgataaaccgacatttttggagattagcctcttctgtcgtacactatttattgtacaaagtcggtatacgcaagtcttttatccaacttttgttgtttgttagccatatacgtgccaagtgtttgttgaaatatagtatattggcacaataggaaaatggaaaatcatcctatgtgccacaactatattagctatagtttaataaatctcgatcaagcttaccaagtaaatttattctttatacttcattatattttgttattttgtttgtttaaacttaaatttaataaattttattgggcatatattgaaaagattttgtactcttaagatacagttagaaataaaaatataagaatagggatgataatgaaaataagagtaaaaatgaaatggaataaaattaaatatggatatagaaattgataaagaaaagttattaaatattttttatctgttatgaaatattatttatggatgttcaaatcaccaaattaattattaccattaatgcttgattgtattttcctttattacatattgatttagtttcccatttatttagtcaatacttttgtataaataggggttcaccccattcgaataaacaactaagaaattctcattcagtttctctttctctcttcttcttcttcttcttcttttcttcatacctattttatatt

SEQ ID NO: 298606 - DNA, 5093 bp, Cannabis indica
aaaaaaagaaagaaagaaagaattgaagaacatatctttatctagcattataacaaagtcaaatacattacttgttacatgcatggtccgcatggacagataatagtgtgagtgcacgttcaaacaaaatgtggccaacttgataggttattgtggggtaattacaaaagtgtggtgtggaaaatagcccagatcgaacaaaataatctaataaagatggctttatcaaccaaagaaagaatagaatggttcgttcccctcaaaaggaaaaaaaaaacaaaaatagaatggtccctctgtacgaaacgaattacataaagaaaaaaaaaatagtactgctactttgttattttgtagcaagtagcaagtaattttgaatcagaatgtgtaatatatattactattagtggttgattccattacataataaaagaaaaaaatagtacaactttcttgtttggtatagcaactagcaagtggtaattattaactattatcatattatatatggaaacgatgaatgggtaatattatgcgcaaatgatatgaatattgattatcatgccaaagaagttttgttataaataattaaatgaataatcatgacaacatattatgtatatattatgagtgtgagtcagcccattattcggttgtaaagtagagtcagatgctaacttatcaatatatatattggtagctttattatcctttataattatcctctctttttgtctcccaatccatgttcacagtcagcttgggcagaaacacaaatgtatatatatatacaactacaacgtcaaaaactcaaagatggcaaactaagctgctcaaaaatatactagcttagtattctaattacaaggagtgctgttggataccacaccgaaatatgcgagttgttggtacaagttattcgcatactaagctcgccgcctaaaatttagtcagtaaaaatagttaaactcagtttagttacaaacagaatccaattcaacactactcaaaaataacatgagtttaaaatattatgtcgattcgagactggttgctactttgtgttagtttatattaatgtgaaattttgttaaccaataaatgaacattttaaggtaataaataaactataataataataataaatagcaagagagtttttaacgtagttttgaagtgaattcttcatatttcacgagttcatcttattctgagatttcataaatcgtatacaaaatacaaaaaaatattagtataattctcccttttctttttaaattggtcgtcctttgtttctcgagttctgttcctatttataaaagttttagggtgacacttattctattggatcttatccttgtaaccgttttttaaacgtggacattctcgacgttttatatttacaacacatgggataataataaataatcgtcacaattgttctttgtctttatatattaccagttatgctgactatgcttcttcatcttgcaatataaataatcatctcaataattttattctgaaagatactttttgtgcctaaatatattctggagaatacttcttgcatccttctctaatgtcaaaaggggcaaatgcgaggcgctatcatagtgtgacaaagagataagttataaagcatgcaatttccttagtctttcaatatatttacgcatatgtgagtcaataagttacaacctcgtaaagaactcgttatctacactttccaagcattgtcattatgttatgtattctggttgtcacgagatggaccttattcgttggttatttatctagctcgctggtctcataaagcggtagttattattcatcgctcgcccttatctttaaaaagataagttcgaatatttctaccaattgtactttctgaggcgagtttattaaacatatttactgttttataacacgagatgatttattctctggctttataatatgtgtcattaccatatatttattgcttgaaatatgggtataataattgctccttaaaaagtgctttttagaacaaaaatgactttttaattactagagggtacgatcgtattttctatttttgaaagaaaatgcatgcttcattttggcagttcaatactttgaggtaaatatcatttcaacatttattattttgactttcttttcccagtagttcccatcactactggcagttcaatacaagaaatgtcactaccgccagcacatttttgtgctggcaaaagtttggtattgcgctggtaaaatggaatttacttctaatgtgttggcaaaaggggttggcaaatcaatgttagtattaaaacttttgctagcacaaaataaaaaatactgaaaaaaatgactttttccagcgcatttatgcgctggtaaaagctagattttagccactacaaatgttctctggtaaaactttgaccattttgccatctcaatttgtgaaatacgctgggaaaagttttaccagcgcagtagcgaaccgtgctagtaaaagtgacatttcttttagtgcatccgtttgatcattcatcattacgaacgaacggtttctattgcttgggtataaagtttgaaccttccccttattctgccattaccgttttacagagtttcgaattcaaatttcaaccattttttctatttaaaattgcatgccctcactatccctcacatacttctttcgagtttctaccaatcttttccctcaatcccagaatcaccaaggttcaaaccctcagcatcagggagtattcaacaaggaattctttgagaccatatttctaagtgaatttccaccttgttcttttgatttgtctattattattgctttccttgtatttttttgcatcaattattaatttttatggatttatatgggtttttagtaacttaaggctataaattttaaggttatacgattcacaagttttggattttcgtgctctacatttctagaataattcttgtgacacattttgttgtgatcaatacattgctccattatcatcaagattatgcacacccagaccttgtagaatccgattatctgcaattctaagccattgtttttaaacttcaaacccatgaaccccaatctatacttgagattaatgaagaaaaaattaggaggcataccattaagaccaatcaagaagatacatccactcattataggctattcttagatgaagttattaagtgtaaatgttgttacctacgagaggcaacttgcactgagttgcccagtttagtaaaaacctccttagcaagaccattatttttatcccaagtcactgttgtttttctcccaagcatttaagattattgctcctaaagcttaaaagtctaagatgcctcagaatcccagtgttacgtttgaggcaaagctaatcgagtctaagttcggattgatcgccccctacgtaggtcaatttttaaggtcttgtggcatgaaaaatgaaaaaggatgtcatatacactctgtcgtacctggcgagtttagttgcttcttccaaacttgcctcttgaatgatgaaggctttagtaccagcaaatcttcaaggatgggtgcttggagtgtcgaacatgttagagaaagtgttgtccttccccttaccaaatactttaaggatttttgtaactaccttaggattgtgctctttcaaatcgtccccaactcttacagaatcctcgcatgcctaaagtcattttaccacatcttgggattagaatgcctagccccttttgagatcttgtgcttctactctattaaagcatgtcctacgagaaaaaattgttcatgaggcttctactacttggggacccattctaatgaatatagaatcattattataggcttcctaataaaaaggagttcaaagatgattttttctggacgacggggcttcacctagttgacaccacatgattcagaattttacgtaagagttcatccttcctaaaatatgcgttttgagttttaaaattttgatgattgaatacttttactaattctctgttcttctatcttctatttttggctgctacaaatagaccaattccaacaccagtggttcaaaggaggaacgacatcctggtgaatcttccttatggaccacggttgatttcttgctacatgatgacaacttgaaatcttatggccttcttgcaaaataccaatgcaccatggactataagagcccctagtatcctacttagcagcagattccattgccttaggaagaagaggaccacgactatgttgactgtacccattacataaaaaatgtaaccactagggaagttgctgaggatgaagaaggggcaccctgaggtaaaacttcttgcttttatggatggtctcctattgtccttaggactgagccaaaaaccttagtgaaatttaaagatagtgaatacaattcttacatctagaactgtgtcgacttaataactcatatgttcgatagttggtacccaaaatttcatgtctagttgagtagtaataattcttattatagaatttctaactaatatggcacaaatactcatagggctactaatcgagattgggatatgtctccacttaattcatttgatctcttcatgatcacaaactctagggagtttagtaaatataatagcaatccttcatccctagcactttcggcaattacttaagtgggagttttgatcttggcactctatatttatccttttttttagaggtcttaacctcctttgttttatttttgcagatatagataactatgaagatctcatctgtagccctggtgtcttggtcaagcaaggtgaaaagagaagtgcctctaaggtagtgacttttgagatgcaacttgaggttccaaagaagaagaagggaaataataaaatgaagattgcttcctatggcatcattattgaacaagataatgttgccccaactgactcccctccatgttggaattaatttaccaggatcttagatctactcacaagtatgttgatttaacaacctaaatatgaacctctaaaacgatggaaaattaaacacataaaagtaagagaaatcttac

SEQ ID NO: 298607 - DNA, 1309 bp, Cannabis indica
aaaaagacataaaaaagattcactttctctctctgcgaaggcgattttctctctacgactggcaattttcccatgctctcttcagaagagcctaatcagaggatgtgctcggaaagcatggatcaaatggaggagttgctcgctcgcaccagcaagttaacggttacagacgaagaaggatggaaaataaacgaggaaggggcagaagacattggcaagtcgtgccttattggaaggctatgcaccatgaagccttttagccgttctttactcaagaacattctctgcaaactttggaattcggggaaaaccgaatggaatttaaaaatcaagaaagtaacagttacggcattgttcttggttctttcgttcactacgaacaattcgttggaaaggatactaagaaaatctccatgggtgctgaacgctggcttccttatcttggagaggatgaagggcattctgacggattgggaagcggctctgtactcattcaccatcttaggtcgaattcttaaccttccaattaaagcaattactaaattaaatatggcccgtttggcaggaatggcaggggaagttactgacattcaagaaacagatgttaatagaattgttgttaatggattcttcaaattgaaagttcggaactccattcaatccaagctcttgccaggttacctctttccccatgaaggacggcgtatttggctccaatttaaatatgatcgactaccgtatatgtgctttaattgtggaaggattggccatgaaatgcgccaatgtaatgaacctcgagccactaggactcaagaagatggggaattggggccaacttatggttcttggcttaaagtagatacgacgagaaggattgatactaaaagcagcaacgagccaagtcaacatcatcatgtaaaaattcatgaaaaccacaaccttcgtcctctgcaagtggcagaacagagaatcaaagagagaggggaatcaaacctaatcaacaatccatctaaaggtacccttaatataatccctaaaattaataattatcagcatgatatattgaatcttaatgagaccaatctaaccgccatttataatctcccttctgttgttctgaatgagatgaatgaggcaaagattatgaacatgaagatggagcaaacgggtaacagaattcgcaaaagaatgggagaagatctccacaatgaggcgcccacgagtcaaatgggggataggacctgtaaagcaagagccatggatcccaaaacttatgtcaagggactggataactgttggaaatatttta

SEQ ID NO: 298608 - DNA, 3488 bp, Cannabis indica
tttttgtttaatttttcttattaagcaaaaaaatgtaaactttgtaaaatacctattatagaaaaaaccccttattctgctatctaagagaattttttgatctaatttattccacatgtcgatattgagaaagtacttaagggatcatactcatgagccaagttacaagaaccttgatatagatcttgacttgtttatgaggaaaagctagtggagattttggatcgcaaagaaaaagtcttgagaaacaatgttataccaattagttaaagtatagtggtataaatacggtgttgaaaaggcaacatgggaagttgaaagcacaatgaaagagtcttatccaactttgttcttattttcgagatgaaatttttataaattgtaggtattgtaacatatcgcttttccatgtgcatccaaataatttagttatgtgacttttaggtcaaaaattgataatttttgataaattaacaatgagaaatcgaattagtgttactcttgcctttttagaaattatgcgaaactggtacgaaataaaaaattctaactgggtaacatattgaaaattgtaaattcgtaattctataggttatggcaactaatattgggcttagaatattttatttggagtagtagaatttatctcgtgaaattccaagtgattgaacgcaaaaagtgagaattttggtaaaacgggtaccaagtgtgaatctttttgtgctaaataactatttggataaaaaaatatttattgatgtgtttgaatgtgataattatttaatttttgcacatttgatttcattaaaatggcttttatggaataatttttagagggaaatttagggtatagttttaagggcatctaagcaatatgcatgggaagccccctccattggcaaatttttttattcaaagcattttaagcccatgcaaagcttctccactcttacacttaagtaggcctatctttagggtgtatgacagctacacacacttcactctctcttctctttgtatagggtcgaagccccccctctctctctacactcctctcatattcaaactttcaaaaatagagagaagctctatcttctctcttcaaacaagtcccatcaaagcacatccatgcaagctttgatcgaagaaagaactaagagtaaacttctatgccatttcttgatcttttactttcttttcaactctagttattttcctcaccactccatttctcattattcattcatagatcatcatcttccacttaaaggaaaactccattagaggttccttgttcaaagctaagcacacaagaggataaaacaaacgatcgggagtctcgaagttcacatttagacatctcatgcaaggacatcgtgtaactccggcataatttatttgtattcaagcaactccaacaaactcatccacacccctacgaaactctacagatcgtctatttaaagtcatccagcttatgtcgctcaccatatttctacacaatataaaaagagaaagttcaaattaaagttaaaaaagtgtcatactccaccttctcactccatttctaaaagggtagagaacatatcacattcaagttaataatatacatatagtgcaatctattctcttaagattgcttttttttttttctcaaaatttcgacagcacctccccacagttctcataagtaagcaaactattaacaagtataccaacttacaagaacgtgtaaggagatgacgtaccaaaatctttaccaaagaaacaatcaaatgagcaatagatcacactataggtatacaacaatctcaaactatccatgcgaatataaaaagtcctggataatttggagaagcgtatttaagagtccttactaactcagcctctccaaacgggtctaagaaaaaatgcgtgtgtgaaataaattatcactaggtgataatacaaacaaaattattctatcctatctatggtttataaccaaagaaatcaaatgaagataagaatttcattttatgctatattaaatgtcttatggtatcttacaatgtcttatgctattttatataccacctataaacttttattgttaatttaatactttgcaattagttttcatgaataatttatatttttttaaaaaattaactcatatttcttaatttcaaagtttccactttgttaaaagttgaatgttatttttaattcaaaatgttttcaattaaattatgagccttttaatttatcaaaacttaacttaataaatttcactgataaacatattattttttaccctaatatatatgtgtatatattatatttatatgtaaatatgtatgtatatatattatgtgtattttttacaccaaaaatacaaaatatacactttattacatatatatcttcacacggttaaaccaacattaatacccattaactttttttattacatttttaccacttgcacacacaatcttgtgggtatgtctggaaattattcatggcggaagtagctgagctcgtggggaagaaagatttcatggtgtctgctatggattcggaatccaacggctgatgttgagaggaatgaatcccgacccgttacgatgatctgcgttcgagtgctcatggcccaactgttatgcagctgaaaattatacccagaagactccgactgttctaccgtgagacccatttccactgccaccgccgccgtcgcagcatgtgggtcgggatcctccgtagctggattttctgtgggatgccagggtggcagctcagcgagcttgtcgatggagttcttggctttcttaatgagccaatcgacggctttgctaggccggtcgtagcccaaccggtcttggacgtcgtagaattggatgtaactggttgtagaaggaaagaggataggataggacaggtcactgggataggtcttgtaattcttttactcttgaaatttttggatattacatttgaacctggaatccatgaatagtctagtagataaattcggtgacttccttttaagtaaaattgttaaaaaaaaaacaaaagaaaattttgggtttacccttttacccatggtatttgtggatattacggttgagaggtgtaacagtagaattgtagcgtgtacgtgactacgtgttttaatgtggagtggagcccaactttcttagtctggtcgacttgtaaacgtgtaccttgccacacgatatgtaactgtgggctatgggcctagatgggctactggagcacttcgtttacatgaatatctatttatccatgagaactttttaaaaatatgtattttaataggtaatatatatgaatcattctaattttaacaatattaaatatatacgaaaatatataaaaatatatatattggaaaccaataatcaatcaaaatgcaattgtatataacatagatatattattcatgaggtttttttttttaatttttcaagtttttcctgtat

SEQ ID NO: 298609 - DNA, 1287 bp, Cannabis indica
tatcaagcaaccaaagcattacccatgtgctctaaaagcataactttttttttctttctctttctacaaaataattataaaaaaaaacaaaaaaaaattactctcttggaggattattacactaaaaaatttatattgtcattagttactaaaaattataatcattcaataataaatggcaacaatattaaaattacacttacacaaaatatgttttttttttactcattaacacaacatgtgttttctgaaattatttaaaatatactaataatatctatattgttgagaaattgacagtagaaaataaataaataagattacataatatcataggatatattaggatctatcttgctatgtcatcatcatattctcatgcatgaattaatttgcttctatttcactataatgaatggattgaattgaattggatcatagaataataaacatcatataatgcttgtgacacacctgtaatttgtttgttgaccccatcacatctattttttatttatctattattattataaagttttacgtttataatcagcataaattaaataatttttttaatgacataaatattcaatatttataaagccgcaatttttattcagtttcattttattttaaatgtactaaaaacatatttagatataacttatattacatattttcgtcaaaactcaatgatttagcatctgaattttacgtatgtcacatttaagatattatagtcgaaacttgaaaaaaattccacttttactgatactaagtgtttatactactaaaaaattattaaatttatgtcgtttataaactcaaaattttacatacttaacctttattattattacaaagaaaaaagaaagaagaagaatagaagtctaatctaaatactataatgtataaacacaaagtggttttttagtggactctctttatttgccacctctcagtctctcatcaacagagtttaaattcactttggcttttttctaaaaccactttgtgtgcttccacttcccactttcattttttttaattttaattttaatttttaatatatattttatttatatgattattaatgttaatggaattctttgtcataattaaatagttttctccactttgatcatctctctattttcacacaaaccaacccttgattatattataattagtattaataaatctccattaacaacatcaacaacaacaataatactacttttatattaaattattataaagaaatatatatatgtatatatatgtata

SEQ ID NO: 298610 - DNA, 2677 bp, Cannabis indica
gacaccttatatgaaaattctcatgctaccttttttatgttaagaaagtaaattctaatgactaaattgtatacccagaactttcactcaccattatattatgtgcttcatttattaactacatgctattatgcaagtcttgtattcatcatggtcgagatgcaaaaaataccagaatagagtatcatatcgttattagtacaacttaatatcagatcttacaaattttaatttaacaactaatatagaaaattacgaaagaatctagtttcaaggattaccttggtaatggtagtacatacactccaattcaagaattttcaaaagggtacaaacaaataacaaaaacacaaaaataaatacaaaatttgtcatcctcctaatattagtagcaaattttgtcttatatgattctaccgaaattttctatcttaagagtagatgaaggctgtaaaataagcctttctcaatggaaaacatcatgaaattctaagatttaatcaagtagttaacaaagaaagatgatgacagtttcagtcatttgttatgacttctccaaatcgcctatgtaaaagtcttcgatcatatcgaaaactcgagttgcatgttgtggcctacaacatggaaaaacaagcttacttgttgtgtagaacataactgttttaacataacgaaagaaccgaaacaaaagactcacatacccgtaaaagccttcggttgaatcatccccggcatgtgcaagaatggcatcaccgccggggtgttcctctacatacgaggtaacatcatatacctatcattgtcaaaagggattgattatacagaagaaaatgaatcaagatttagataatcaaatgattctaaacatcccccaaaatcaaaaaataaccttgtctttaatgatgatccaacaatcagttcccttgttgtgcaaagagacttctgatttggtgtatagttttgttccctaaataaaacagagttaagttaattccattaagtattgattagtaacaaaagcacttgaatcatatgaacaaatggaatgtgatcttgtacagaaatcttcttacttttacaatgtaattgttatcaaattaatcacattgaaaatatatggatagttttatcttatccaatcctcatctccatttatgaaaacataataaaaagaaatttgttataaaacaaaatccatatttctcaaatgtcaaaagtgaaatttctaaggaattgtggatgcaatggcaaaagccttttcatcacctaaaggagaattcatgttcattccaaaaccattatagatcctactttgcatccaacttattttctagtaatttattctaagcaaatgatcaattcaatatagatttaaataatatgtaaaacagtgaatttatttaagcaaatttctgatttatagattttggaaataggagatttttaagggtgtgtttggaaagacgaagagagacttggaattgaaggtaataacacaattttagatatttttctgaccctgtaattacaatgtaactgtgtaattggaggtaagtaagagacttcaattacactctccaattctcacacattgtaaatattatttactaaaaattattacttttttgtgtaattattaactattttgccaaacaagaaattaaaaattcttaataaattaacactgtatacccaaacacacattgtattttaataattacacagttacttccaaacgcacccgattaagacgtttagtatgaagtttaaacttgatgcaaataactaataagaatgtcaaacttaaattaaattttaatgaccaagaagtttgtgtttccaggtaggtctcgctttttaaatgtaatattaatcccctctaatacttggtttcatatttcctctaagtctactctctccaactaaaactcacataacaaatacttcattaagtggcgtcaaaggaatgaaaatatagctagaataagaaataaaattctaatgattaaaagaatagaataaaaattgtttccattctacctaaatgtccataactccaaagacaatcagtaaacataatcacttagtctataacatacaagaaagaaatgagttcagttattgaatgaaaaaatcaccttattgagtttaacatttgactgatcattctttgtatgacctgtttcacaaacacattcccaaaccaaacccaattcattatacttgattattgcatatcaatcccaaaacaaggtccaaagaagagaacaatttaccagattttgggggtctgggaatcaaaacaaaagctcccaaaagtaaagccagaaccacagctactacaattgctatcatcttataaacccaaattctaaaaacccaaatataggaaaaacataagtcattgaatagaactaatctaagtgaaaaagcagaagtgggtgaagattacctgtggatttgagtaaaagggttgttgattttccggccaaactgatggaaagtttgaatcttttcgcttacaagaatgaaacgaagacaagataggtttttggatctgagttgggaaatattgttgttgggctttgtagaaaaatgtcccaaccagaaaattagactctatagtctatacttttttttagctttttttttttatttttacccttcttttttaaaa

SEQ ID NO: 298611 - DNA, 4198 bp, Cannabis indica
aattttttttttttttcataatcgtaaatgttgtagttatttaagaattcttacaaaattttaaaaaatttaacatactcaaaataagattcaaacagtctattgcattggtaattttttcattatataaatgtgtgaaatggactctttgaatattattttcggcgtatatttttttttattttttaaaattttataagatgtcttaaataattgcaatatagatgattataaaaaaaatttgactaattttcttttgtaaatactaaaataaataaaggtgtatcatacactacttttaatttttaaatagtatattatagaatttttcaaaactaaattattcgtgaaaaacactacagttaggatagaatttttttttttttttattcattatttttcctaaaggacagaataaaaagttgtcggttaatttaaggtaatttaatcttttttcattagctttcaccgatattagactaacaaggttaacataattgagagataatcacactatctttttatatttattatattattagataatcaaaataaatgaaaatatataaaataaattagaaggtcatatatttatttcatgtaaaagagatatatataactattaaaactaaattagtaaaatttatataaagttcgtaaaattgaatttctttttgtggttttatgattttttttactttacatttttacatattggtgttttttagaagaaaaaaaacattattttttatatttttgcaataatataaaatattttcataatgtgtaaatacctttttaaaataacttaaaaaaaaacagttagtaataaaaaagagttcgtaaaaaagtaaaatagtatttcgtaatagttgaaactttttgttttttttgggtatttttaaaataagttgttttttttaatatatatctcttctatataaaatatgaaatgtggttatataaagaatttttagtttaacggtattttttgattttttttacgttaactttagcaaaatatctcaattacttaacaaaatatattttcttttttttgatgaatcaggaaagctttgtattaatcacaacaaaatttttacaaccatatagcaccccatagggccaaaaaataacattaaaaaaaaatgtgtacattcctttaatctctatactctaacaaacatccgtctttacaatttttgaaaaccaactagtgtcatttcagttcactttctttggccaaactacactaattttgtgtgtaattttctttttaattccttcaattagctttcctgcatcaagttttgttttttctcaaatgctgaggtttcgaactctccataatgagtataccagacagttgaaagcaactgataacacatttttcttaaacttcctgagcttggatcttccaatccacttggtgaggctgtgaagtgtattagctgatacatgccatgacaaccagctttttaaaccctgaagacaagcaacaacaaagttgcagtcgaaaaacagatggtctgcattttcattatgtgctaaacacagttcacagtgtagcaattgtcatccccattattctcaatctatctttggtttcgagtctattttgcattgccaaccaagtaataaagctgtgtttgggggtatttagtctaccctaaacctgctaccaaagcacttttgtctggactggacagagcaaaacatatcccttggatatttgataactctgtacaaacagttgctgccctgctatgtctttgaactgctccttcaaatttacaaggtttctccagtaccaactactttgtgctaaagccttgtaactccaccagtcacaatccttgagataaacactgtgaacccacttcaaccataaactgtcctgtttttgagcaattgcccaaatgtatttccccatagctgctcgattccactcttaaatcttcctaagccaataccacctgcaactttagattgacaaagagtatcccatgctactagactaggtccatttgagatagcttggccctttcagagaaaggctttgcaaatcgattcaagctgcctcacaacaaaatattttttattaattttataatattattataatatttaaaaataaaattatatagatattttataaaaaaaatattttttttaacgaaaaaattaaatttaataaaaaaaaatcaaaaataaaaattactataaaatatatatatttaaacatcaatttcatcacaactttttatttaaaaaatgattaatgatatatgtatacttttaataatttgtacattttattgtaaccacactctcctaactacaaattaagaatgtatctataactttcattattttttttaaaatatatgtttcgacattatatataaaatatattttgaaagtaattaattcactaatcaaactctaatcatatagatattactatgtacatattagtatattgtgattgtaatatgtattgatgacattcttcaaaatgattttaaagataattgaagatcagaaaataaaatataacaggattaattattactgtaacagtaaatcgaataaatggacaatagaggtagcatctaccaattatcatcatatattccgacggttataatttgatagtttcttttcataagtagattttctttcttcaagtaatttttattgatattaataaatcaactatatatttattatcttaattctcatcattaaaaatgatctatgatatcttattatatataaataaatataggtggttgtgagagaatgagggagatagttgaagcaatagatgatgagaagaagagtattacttttacaacattagagggagatatcacaaaggattacaatgacaccaaggccatacttgaggtgagtggtagtagtagaccaggctgctctatcaaatggactgttccttatgagaagaagaatcgtgatctccctgatccttctaagtatattgattttgttcagctcatttctcaaaagatcgatgcttacctctccaaaacggcttaattatctgtacaaatggtactaaatactaaataaatgatgatgatattaggaagcatatatctactacctaattactatttgcttccttctataatgtatgggttataattattgtggagtgattgtgtgacctaataataattccaatacttgcctttctcatctatactagattaattaaaaaatgtattgccaagttatgcattcaattatcataaatttatctaattgttcatggatgaaaaataaaaaaccataataataaccgatactttttcatattatgggacaaaatattaaagaatatttatataatataacaaaataatgccaaaaaataaaatgagactaaacaggaaaaaaaggataaacctatggagaacaaaaactatataaacaaacttaccataataatttgtaaaattttctcatccaccttctccaatcggattctctctttgcaattctctccaaaaacacgtcacaattttactagccattcttcctcactccatcgttgatcaattacttcagcaaatctatcatatttcaattgttcaactagttattccacagctttggtggctttgtcaacttgcgacttcactgtcgattatcatctccacatccagtaacctgcaaaattcataaagcctgactaaacgtgcatcaaatattacaaaatgaattgcattcgataaaaaaaggaacaaaaccacaaccccatcagaagcagagcaaccaactcacacgaccgacttctatatcaaatctcaaaactcttcaggtaaattcaaaaaagcatagtcaattatatatcttcataatcaaataataacttacataaacataaaaaatatgtataacatttgaacaattgaattagcattagatttttcaatattaatatgtataaatgtacattcttcatctaattatatatgtacagaaatcaattattttatcaattgcaacaaaataaactaagtgtaaaattcattgttttgatagattattttaattgtgagtccagtcttatatgtgattttaatctgttataactgcataccagtttttcgttaaaatccttgtgagtcggttatgttttaactattggtataaattgttcttaggt

SEQ ID NO: 298612 - DNA, 1719 bp, Cannabis indica
tttttttttggaaagacagaggtcacttgtctaatgacttcctcccgaatgttattgagtatgaacatacatatatatgagttaataagaaatctggagcattttatccaagggggagaaaaacataattccttttatgctctaggtagtggaaggggatttggttgtagagaataaactgctacatctaaattataaaatttaatggcatttgcatgtatcagaaatattttggactttgttcagaaaagaatggcatcccatgaacacttggcccaaggaggaagaaagaaaatgaatacaaaagttcaaattggttgtgagtaaatgcacataccttcgcccaaggaggaagacaaacatcactaatcaattcaccatcttgtttcacccctagatgataagtgtttgagttgacgagaaactctggcatgtaaaaaaactcaggtattaactcctttacatcacttgtattagaaaggcagttccgataggtgccctcaatgctttggaatagccgatctgcatggtcaaatttaccaccctgaccaaggcactatgttagatcctttaaccaagaatcttgatgcacaaaaacaaacagaatgaaatgcaaaccaatgtaatgcaccaacaaaagcataaatcaatgaagctatcattggaattactatagtgtatacccaaaataaaattttaattttttcagtatcctgtgttgatgttatgagttaaattgtgtggcattgtcggttcattttgtaagagttcagatattcctatctcgaaatggttgagagaaaggaattttgttaagtaatttatatattttgcttcttttaaagacttaacgttacatttttgttacttccgtcagtatcattccgtcaactgatggactaattatgttggcatgtgttagcatattattggtccaagtcaattacttaattaataagaaaaacaagaatcatattttaatttttttagaaaaaaaaacagatttttaataaataaataatattaactaataaatgttgtttaattttttttctaaaaaaaattagaattatataacaaaccttttattgaatatatgagatggactactaatatgctgacacatgtgagcttatcagttttaataagacttgatgcagattggtaatgacgaaagtaacatgaaattaacattaggtatttagtccgacaaagaagaaaaatggtatatgagtgtatcaaaccgaaaatattatgtatttacgcctcaaatgctcaactaaaaaatgattgatcatctttctcctttttcttcgcaccccaagattgatcatcttttcaagcattgggggcagtaagagaattagaaacaacatcaaatgtttcttaacatacctgcaagttcctgtgaagagaagtaaaaggctccaatcgaagaagataataaagtacaattcccatgcttgagtaatgagacccgtagtagaaactgcataagtgaataatagctgttagaaaaggaatattttttttgaaaaaaggagagaagagggccaaagtctttggcccccaaccccattatgaataaaaaccctctcttgtggcagaaaaaaaccgtggttacaaagtaaaactaaattccaaaacttgtaacaactctaggtaccctaaaaacaaaccactgcctcataaatttgattaaaacaatcaaccccctag

SEQ ID NO: 298613 - DNA, 3530 bp, Cannabis indica
tgattatcgagtctaacctaattatacattgaacgcataacccttactcatttatccacacaactcatttaacatattctcataaacaaaaatgattagcatataaaggcgacacaacagtaaactctaagtgaaaagttcactttcttacttgaattccaatgtatgtggagaaatccttactgataggtaacctcgttcaagtggcactaattctagtcacaattcggggcatggacataataggattaatctcaattagataataaattcacaaataattagagctcacaaactggacagagatataaagctcctcacacactttctaacggtataaagaatgtcaaattttgacatcgcaatcaaaagtgcataaactatattttttcgcgcttttcaaaatatgggttgtgtcgtgtcttgtcaaaaattttaaatggtatgcccaacacgacctatactcccgattttttcatactgtgctttgagctgacccatttatcttaaatgggcgaactcgtatctcatacgggctcaaattcgtgctatactttttcacaattatttttagcactaataaggtactaaactatgtatgatttttttttatagatttaattatttttatatatttttagcaacattttaccaacaatcatataatttattagagtttgaatatttacttaaaaatacttaattttttaattactctccaataaattaatatatgtagttttagttttacattttctaataattttaattaagaattataaaactcgatattacatttgagttttattatcattttaatttatttatgattgataaatacatatttattattatagaatttttaagcgtgatccacttttgggctagtttgttacgtgtcgtgtctttcggcttcgtgcccaaacctatatttctgtgtcatgttgtacttatgtcaattttacgtggggtaaaaaaaattggctcctatatatagcgctactcgcaactattaatgtcatttaaaatgtaaacgattacaaacataaaatcaacaactaaattgattgtatatgtttgagaatggccacttatgcagatttaggttaccatatgttaatagaacccttcatttgcctaattgattcagatttctagagacttttttaaaaaagcattcagatttctagagattaatttaaaatttgtagtagtaaggaattttttcaagtcgtggaaacagagttcattctttcttttgatgatgtctaaaatattaattaataacaatgatttacataatcaatttgatgtaccgagttaatttgggaaatattttgtatagttttttgcgttttggaccaatgttattaaattctaagaaccattctcgagaatggtccataactccatacaagtatcaatcaaaggtaggaaggatacatattgcaatgaagaaaaataagcacttttttaagagagaggagagagaaagagacaggaatggaagaccataacattgttctttgctaagaactttttccttttgaaatggacgttgctaaaaacttcaaagaaaacaagcatataaaatacaaactaacgcgtaaaattaaacagctattgtaaatatcttggaacatctgattgaataatgatgttttctcttgaagctcttgaacaaggacacataagagcatgagctagaacatgcaaatttgtcattatcatattcataggtgcaagtatctaaagtttcatttgatgtaggtacaaaaacctgcacttttatatcctcgaatacctagctaaaactagttctaattttccttcataaggactaaggagaataatcttgaataagaaaaacattagaacatcataatagaattgtggagttcttcgttctccctaaataagcacatgaagataaacttcttattcgtaagctacttccatttattaattcaattatgagaaaatatagataaatctgacattataaattaaggaaacatattcaactatacattaatcctctttatatagctggtcaaacttaaaataagcagactagcttaaatatatgttcgatgacaaaagcagtgaaaaatttatatcttattgatattgacaacgcaggccaaaagacaaagaaaaagaaaaagaaaaaaaatggggtagatatgagacagaaacacaaaataaggcagattggcttggtctatagctaaagtcaaccatgtatgtagaaacaactaaacaatctccatatatatatataataactaataagtgtaaaaatatgttcaacaatagccccgacccaatacggaaatctagatgttttcctgaaacgcgcagaaatcttatacaatcaggccacttctttacatagccttttttcaattgtgcccagcaatacctgcaacactctaaccaactacgatcaaaaactattgccactaaaaattaatgtcaactaaatataagaggaattcgttgtagattcatgttatgttgtcacatacaaactttgaaccttcaaggatctgaatctcatttaaaagaaatataatgatgataatcaattgacaaagaaagtagttccccaagcagataaagcccactaaacatgtagataagaaaatggagaaatcatatacagctgatgaatgacctgattaaagagccatttcagcctgcaaggcagccaattcatcttcttcagcagtgcgtttctgaggaacagggcgagcaggttgccggccagcagggacgtgcactggagcagcaggagctgttgtagcaggctggagaagttgctcttccaactcagcaccttcaagctcttcaagctcagcttccagctcatcctgcaataataacagtaacacttttcagcatccaaataaacaacacccaagtacagaaaattaaattttaaccaacagacaagttgtgctaagtaaagaaatcattgagaaaatcatgacctcgtcgaaatcagctgctgcaccaaatggagctgacaatgcatcctggatctgtttcatgttctcagtctgctcattaatctcatccatggtcttgtcgacatcatcgatgttcctgtacagaagatacatcataaatatatatcattagagtgggtttctaaaattaaaagtaccaaataaagcaaatgtgctacatacgttgctttctgcattgctttcattgcagcagcaccagttctcaaagcatcaactgtttcagttgtggctttcgcaccttctaacattatcatctgcaaatacaaatcaatcggcaacaatgacattaaatacgaatcaaaaaagcaaaacataactaagagatcatccagagtagtcagaaccatcaggctcttaaaaccccaagaatcacctgatcatggatacgcaactggaaatttccaagttgctctatttgctgttcatagagcctcttcctttttaaacattgtatggcagctgcaaacagaaacatgaatcagtccaaccacaaac

SEQ ID NO: 298614 - DNA, 2572 bp, Cannabis indica
ctaatcagattgtaatgggttttatttacggcacaaaacccaacaattttttcaaagatttggacacagaagtagttaggagtggagagatacaaattggccagattctctgttatatgggaaactcaattgttggagggggagaacattcaccaattgaaggatagggtgttatgttggaatgtgaaggggttaaacagctcttagaagcacaaagaggtgaagaaattcattgcagaaaagaaagttcagctagtttgcctccttgaaaaaatggtcaaaataaagaatatgagaattttataccttttgtggattggtgcatcacaaaaatctccttttaacacccgaatggtcgaataatcattgcttagaatccaatttactttgatttttatatcaaagaatgtaatagtgaatttgtttactgtaaaatctctccaaaacatgttgtactcatgatgccacctttgtgtattcattcaatgagagtaatggtagagagctcctatggaaaattttaaaacaaaaggcttctatggggcatctttgggtcttattgggggactttaatgatattatggaacatgaggagaagataagagctaagaagatagcttaagattataagcatatgaaataatgtatggatgattgctatgtgcaagatattccttattcttgttgtttttatacttgaaacaacaaacaggatagctctactcgggtatatgcaaaattggatcaagttttagctaataagagttggcttgataatttctctattgctacaggaattttttttcccaaaggtgattttgatcactcccctgcacttttgcacttttatctttttattctactaacaatgatggagcaaaaccttttaggtactttaatatgtgttataatgtccctgattttttggatagagtgaaagttgaataagtttctctaatccaaggtaccgccatgtttcaactttgtaagaagatacaacgatttaaaaaggttttaatggagattaataaagaatgttttgggtatattaaagccagagcagttaaagccaaactgaagttgcaagattgccaagtaaggcttcatcaagatctttaaactctattttaattcaagtagaaattaattccaaggaagaatatcataggacaacaaaggatttacattgctttctgaaatagaagtaaaaaaacttcttggaatcaagatgaggattctagctcaaggctatttcattcaagcttaaagctcagaagaaggaaaaataatgtgtatgcaataagagatgattgaagggatttgaaagattaccccgtggaagtaaaaacatcatttttagacttttatctaaatttactcgattcaaaattgctatacaagagaaaacatctaaaaaattgatgcaagaagcgccagttctttccgattagcagaaacaatttcttaatcagccttacatagctaaggaaatcaagacatatctgttttccatctcaaacactaaagcacctaggcctgatggttttagtagtggctttttacgaaaagcatagaatatagtgggggatgattttaccacaactggcatgtgtgttctcaaatgtgggaaattacttacagatgttaattcaactaatataacatcctacttacttaggcaagctacaatgattttctaattacccaccctttgctaatcaaaggatttcttaaaaatatgacaaattaaaacttttgaattatacttcaactataaataatttctgggatgctattttaaagtttgcaacagtacaccaaatacgttttatcataaagtcgcctagcaactaacaaataaaattctatcagactaaacactcctgacctaataatcctcatacgtacaatcacccacaagctctgaactcattgttactaaccttcacctttcatttagctacacatgaaaccatatctttgagttgacggactcagtaaaaaatgcataaaacatataaaaatacagtcaacctgcagctaggcacccacacacctatttacaagacttcagaagaatcaacaacgttcttaacagaagtaccacctatgtgccatatggactaaatatctttctaatagtagggttggtagggttttctcgcacctcaattactattgccttttgtaccaattgcaatctgtactcgtcccgtactagtgtttgtaacgttgtgtcatacccatcaacaatatatactatacaattgcactcagtaccacaaccgtactagcattggtagtatgcaaatcacataatttagcatgcatattacatacatacacattgttaacgctgatttttgttaactatattggagcttaaatagtgatagatttgcgcaaaaaataaaagcagtttaagaaagattgaacacaaaggtttttacgagattttgcagttaaaattctgcatagtcgacgagtcaatcttattagatttctgatatagctctcaagcctctattctctaattattttttcgtccctttttcagtgtaacttgcctcta

SEQ ID NO: 298615 - DNA, 7835 bp, Cannabis indica
acgtgttgaaacttaattattattattattataattagaaaaaaatatataaaattaattatttttattttattttatatttaattaaagttcatagaaatatatactaataatcaaactacaacaacactgcttggaatttttaaaatggtatcaaattattcttaccaatcaccacatgaacctaagaatttaaataatggtaattttttttcttgtaaattattttttattatcattgattaaacatagagaatagatcttatcatatttcctaggaatatatatatatatatatatatatgttaggtagggtatatcatattctacttattggagtaaaaaaataattaaaattttcttggtactaaaaaaaataataataatatagagctttcaacaaataattaatgaaaatgattatatataattaattaataaattataatgccattttcctaaaaataataaaaaaattacaaggtcattttgtatagacaaccaccaccttcaaatatataattgataatgacttaatatgtacaaaatatgactttccacatcgtttaaccaacaataaaaaataaaaataaaaatattttagagtatgacattataaaaataataatagtaaataaataaaaaataaatacaataataataataaaaaaaattaagggtaaatataatggcataaatttttaaaattttaagtttataagcataaatttaatgatttttttagcggcatagtactcaatctttgtaaaactgtaatttttctccaatttcatcaatctatactttgatattatcttaaacaaaacacatataagactcatattctatatcattgagtttggatgaaaacatgtagtattagtatcaggtacttctaaatcttcttttaataaattcaaaacagtctatactgataaaactggaaaaaaaattacagttttacaaacattgagtacttatgttgctaaaaaaaaaaacttgttcaactaatcatcaaatttcattgatctcaacatctcacaaatttttcaaattgtctttgcataacactacacttcaaagtctctatcttttaatcaatctatgaatcttattgagactaatcaaagagctaaattaagactaatatatctatttttgcatcaacaactacaatttcaaacacttttatttctcctcctagcttcccaagattattttttttttccaatgcaaaacaaaaagaaaattgccatttttccttctgttcgatttttatttgataaatcacaccaaatataacttttatccaagtattaaaatcttataatgacaagttgattcaattatatttcaaaactagacaaaaatttcaacaactagataagattactatatatcttgaaatataattaaagcttttaatatcaagtcattaagataaagcaagaattataaacaacttcaacattaaggtatttggtttttgtaagaaaatatgtatataaaacaaccatctttatcacaaagcataagaaaaccaaagaacgaaaaggttgtaacaacaaacaaacaattactaaacaacaaatagagaaccggttcaattcaacaaagcttctttttctatatttctagcttttacctcatactttaaacttgcagaaaaagaaataataaacaaataaataaaaaatttacgattgaatgaaaatttaggttgctcatgttgaccaaagaagcttctaaattaaacatatgaaaagaaaaccaaatttaacttgttggaaccaattacaaatagctttcgcactaatccccgcgccgtgaatagatttcaaatcatgccatataaaaccatctaacgagatcatcctagtactatttttctccaagcacgctttattgcggcgttctgatggtatctggtgtattagtgctggtatgattgcacccgtttcaaagaaaacatcttctctgtgctataaccataaggattgattatctaaatgatgctgcaatgaaacagctcccaaagtcaataaaattcttcacacaataaaatgcaaagtttcatgcttttaactttaatacacacgaaacaagataagaagagagcattgtaatccaacagacataatagactacatctaattcaaactagcttgtatactagaagacttaaacagctatatctatgatgagcatgaaagaaaacagcagcagaaacattaaactctctgtggttttaaggaaatgtgcatgcatacatacattattcgaaaaacttgtataatggcaagcacatacatatatagtcctggaagagtttctgctgctactactaatgtttctaatcatgagtcatgacatgcctaatctgacaggtagatagctcttcaagttgggaatttgggagcacttctgatgatgcttcagaccatcttcacacctcttcccctgctacaattgaaatcacaacaactatagtttcaattcattgttttagagtataaatctcattgatgatgtaggagcataatttgaacatgggatttaaagctttacaagcatatgatagtggtgaagtcattattactcaagcaatacagaaaatgacaaaaaactaaagtggaaaaatgttgatagtaaatgcggccaagctatatttcaataaagggaagttctgtataatccaattttaaaaatggtaaatgtggttaataatggtgacaaagaactagatcaggaaagaggaacatacaaagtattagacttttggcagcccaatttcgtcttctcaaaatgccttatcccatgagaagataagatggagaatatgatacgtcgtgtttgtagaagttcagtagtttggcctggaatggaaacttggtggatagaagtccacaaagctgaccaatgcctacgtttgataagccattgatacccaactcaacaaattgtaacagttaaataagtactcaaatgagaggtataatggtttcagcatacaaatctattggtctggtccaaatatatataatatattgtacattgcaaagaccaaatatgagcattaaagcaaatatgcatgcacattattcaggcacaaccaccatgattaaactcacttcaaattcagtgtcttgttgagtccaaagcaatagccggtttatgcataatcttaggattaggaaccttattcaagagatgtatgtaacgatatctaatccccattaaagggtgtttttcaagcaagaaatcctttctataacactctctaagaaccacagtctgtgttctaatcttattcgaaaggtaaaaaataccagggtgatgaaccagagctttcttaatcatcaaagacccaaatcccaaatactctcctaaccaaaacaagttatctctatcagtctttttcgaaaccataagccataacaattcatggagaacagcaacagtccatttctcagcttgatcactgttcggagatagatgaaacccattttcgtaaggagaaatgtaaggcaaaagctgccatttttcgacccaatcattaatcttcttaaccaaatcaaacccttttgggaaaaacattggaaacccaatgtgcttagttgatttaccttcgtttaatgctcttttctctaattcagacaaagcaagatcttttctccatgaaattaactccaaggcgagatctttaccaccattagggttttcaatttcgcaaacctgaaagtaatcgggaaaatcgattacaagcgaagatatgaaattgtgaggaagacccatatcccattttagcttctcgatcacgtaaatgggtaatcttgatgatttggtgagcataagaagccttgtgagacgttgtacggcgtcgtatcgatgagtttgggaggtgtgaatggagaactcttcagtgtggattgagagagcttgtcttgtgagtttgacacgtggaggaagacctggatttggttggaagatggagaagaaagatgggtatttgttgaagaatttggatgaagtgatattgagatcgagacgaggtttgagaagtgaagctagtgagagagggagtgattttgatgggtctgagatgatttgatccttgaatgatattgcttgtttgagattcttttctctttctactgcgaaatctaggtatgggtctcgtacccatttgactctggcgttgacgaaggttcgagtgggaatgaagctgtgtggaagctttgtctggacagccatggtggctgagttcaactcgctcggctcactcactcgaccaaaatgaacaaagaaagaagaagcagtccatgaatgggtttgggcttcttgggctgggcctcatttactgccaaatgggccgattaaaactaggcccaatggctcgatgaggcactgtgttagatagtaaaattttaattgaaaaattcattgccgtcttagctcagccggtagagcgcatggcttttaaccatgtggtcgtgggttcgattcccacagacggcgattgatttatatattacttttgtcttttttttgagataatttaacccatatgatactagaactttcttatatcattactattcttttcttaacaaagtttagttttttttttccatagaattttcttgacaaagttgttagtagtatattagtgtaaagtccctattaatttacataaaaatggaaataaatacataaccagaaagggccatgaaaaaagactaaaaactaattgaaaataaaagagctcctcttatttataatttatggattaaataaagaaaaagaaaaagaaaagcaggcattttgattttggtacttcataagttagaaactactaaataaagtagtgcaacataaagtacaaaaggccgtgatgagatgtgaccaaaaaaattatgatccaaaactataacaataccagaaaattaaaaagaaataactaacacaaattaatcaaagttccattttgacatctcagtaactaactcattcattagtaactcctagtgaccgcgggtcatcttaactctaggcatggacttcttcgcctgacgttttgcttctttctttctaatggcttctgcgctgagtttggcctcggcttcttccattagttttctcctctcggctttctttctctgcaatgcttcttgcctagcattctgatgttctttgtactcctcttgagctatctttgctcttattgcatcggttttagaccgagcctgagattgaacaaaatgagtatattttgttaaaacaaacatagctaaataaattatcagttttgtgtatgtatgcacataagataagaatgtaaaaccaacccacctgtgagctaagcttgtatcttccgatcagatcgatataataggttaccaaagccaccagattagtcatatcacccatgtcttcaacttttgggagggcaaacttgaacagcagcatcttcttggttgtgcctaagtgttgatctgagaaatgcattgagatgaagccctttccatatttctcgaaagctttctcgccaaatacctgcaaattcatttgtgtacttgttcaagcctcaagctcataataaaatagaatatgcacatatgggagaccagcacaggaaactacaaattacactgaattttacgaaaaagagcatcacataacataatatttgctaaagtaaagttaatatcctagttagatggttaatttcctaattcctctccttatcaaaggaaaaatgttagagaaatgctaagagtgtgcccaacaccctaataccgctattggtgtaaataaatatcgaattacatattctcactacataattgtaccaatcacaatatacctcgtctctagatgttggacaacgaaaagccagatagcaaagctctaaaaaactaagttgtgcataaagaaattagtgacaatattcggtatctgattcacccaccaggtgaggaattttatcacttggattcatccaacccagatattggttgcattttcaatttcagcagcagaccctttatccttttcgggtttgccagcttagctctgactgagttctgcactatcaattcatcttttgccattgtgatttattgttatgtcaagaagaacaattgctttattctattacagaacagaatcatttaacttatattatagggactcagattaactaatgatcacatcaagaaagaatatacatatagagggaggcttttaggtgggacattaacctgaagtatgaacattttttgtttttccgtaccaaaaaaattattcttcaatttgttttatataacagtgtacaccataattatagacttatagtttgcatcaataaattcagaataatttaagtcatcaaaaaagtaaatctcaaaatagtcagatacatacttataaaactacacccaagaatttttatttacgtatatgcaatcacacacacaaatgaagtggaaaaaaatgcagtcttgccactctaaatgcaatcacaaatgagaacaaacaacacccatatgaaaaattaatcagtaaatagaaagaaaaacaaaccaacaaactaacctgatcaagaactgtatcagtgatcaaatcacaagcaacttctttagactcagaaataacactcaattcatcagcaacccattttctcccattaggaggagaaacaacactagcaaacctctgcaaatctctaacttccttctgcatagttttggccgccttcttcttagccaaagcgaaaatcacatgatccatagcatcatcattcatataaacctcgaaagtaatctcatccttacaaggaacaaccatgttataaatcctagcaatcaaatcatgtctactcttcaattccatcgtagccaaaagcccctgacaatacctccttccactagcgtagaatttaaacacattctgaccttctttaagcaacaaaggcgaatcatcaccttcactgattccaagaagactgaaattcttatcgaaaatcgaatccttaacagcaaatttaccagcccaagaaagagcgatgttctcattctcacgtttaccagtaaaataattaatcaaaaacacaatcaaaaagcttccgcaaacaatctcaatcgtataatacttcggaccagtattaacggaactcgtcttaggactctccgatgctttgggatcggaaactgtaccttgttgttgttgctccgtactcttaggagtctcttcctcctgaggcggcggttgttcgattggaagtccttcgaattcgtcttcatcccaatactcgaagttagtagaagaaggcttagtagtagtcggaggaggaggaggaagatcggagggttgatttggatccagattctgatccgatggagctggatctggaatcgggtcgggttcgaggtgagattgagtcagtggaggagaacgagggagggaatcgggaatgagagatgagtcttcttcttcttctgcttcttcatcggcttcgaaaccttcgaagtgggaatctgtagcagtgagaagttgtaaatgggagagaaagagagagaagagaatgagaatgagaaagagagggagagaagagagcaaagtagctctctttgccgccatgggagacacagttagagagagaaagagtgagagttttagagagagagagtgatgagcagccaattaaggtttagaagaagaagttagaaacatatataaactcatttttcttttgaagaaagatatttgggatgttatattagagaaaaaaataataataataataataataattaagaaaaaaaaaaataaaa

SEQ ID NO: 298616 - DNA, 1498 bp, Cannabis indica
agaaaaagattctattgttcttttttagtttgagcactgtttcatttttaaatttatacttgattttcatttgagaggtatctttttctcacagtgaattggtctacgtaggggttgcggatatatttcccttgagaatctgctatttttcgccaggacttatccggtaattagcccaaatcattttcaaagtgaagtttagtaaaaatcataggtgtttaagctcctcagtatatgatatttttctttctagttactcaattagtaaaaagaatgaattattactgattgtgtaaaattcaaaatcaaggcatcttttcgtaggttattattaaagcaagatgggaagcgagcaacatgggagtatccattcgctgttgcgggaataaatgtatcatttatgttgattcagatgctggatttatactcaggtacaatgtggtaccaagaaagtgttagtcaacatgatcatttagttcatattaccaattcatttctccatttgctctattttttctccaaaagaataatgagtgtttgttgctctgaaacttcactcttttcctgtctgttttacagcaaagccaaaatgcattccaggaatcaatttcatgaaattattaggaggtaaaaaaaagcaaaaacaaagaaaaaaccccattgtgctctagtctagaacgtttgaattcctgtcgctaaaaagtttgtgctcttaatcaacaattgcagaagatgaggaagcatttgatgtgctatattgtttagcatttgaaatgatggacgctcagtggctggctatgcatgcttcctacatggagttcaatgtaatcttcatctctatctctcctttcccatatgaacacagaaaattgagttgaatttatcattacatatttggcttaattctgttctttgttttcaaatactttcaggaggttctacaagtcacgcgaacgcaattggaaagagagctttctttagaagatgtacacagagtacaagacttaccggcttacaatctgttgtaccagtaagtaagtacgtagcttttggagtgactgacctctttggaagccataaaagatgatgattttgagaattagtaatttcaatgacatgaagacatagagatgagagattgtatagaaatggattatggatttgaatgtctaggtcaccccttgaataattgtgaggagatctagttgtgatatatgaatcagccaaggattgaattagattctactatttgatgtatcaccgaacttgtattatagaagttgagcaaattttctaggttggtatagttgaaggaacaacatgatatgggaatatctcttgttttggtttgtattatattctctagtctctgcaaaacatgctacttcccctaaattttaaaagtactagcaatatccataggacataattattaactatgtatgcttgggaaaaaaaagggaaaaaaactcgaagcaacttaggccatcagtgagga

SEQ ID NO: 298617 - DNA, 3065 bp, Cannabis indica
aaacagcaagattccaacgaggttttgaatgtggccaaactgaactatgtggactggattgatgctaggaacaagtttgttgtggctactgaaagctgtgttgtgggtggtgttgataaatggacggcaccagactttccattcgttaaagtcaacgtggatggagcgttgttttctagtcatgggaggtatggagtgggattggttgctagaactgctgctggtatagtgatggcggcaagaactttgtgcaaagggggcgatttgcaacctcatatagtcgaagccattggtatcaaagaggctttgtcctggagtaaggcgaatggatggacaagtgttatagttgagtctgattgtttaaaagtcattagtgatttacaaaagccaaaatatatggtctctccttatggtcatattctttatgattgtaggactttgatttctgattttgataatatttcttttaagtttgttaagcggtctgctaataaggttgcacatgctttagcgcaaacttctctttttgagtctgattaccattttagtagggattctttatctagtgtaattacatccttgattgtggatgatttaagttaataaagattaatcattattcaaaaaaaaaaacaacaacaatgttctatgttaaattcaacacaattttatacaccacataaatattttaacatttcacatagaatgtgatatcactctaaatttgacaatacctatccaaccaaaataattaaatttatattcagactcaaaacgctacacttttaaattcaatatttcaacctagcaattagaattctctcatctaaatccatatttctttgctatgcattcgcagctatataaaatttattaaatattgaattgagacttatattttaaaattgtagatttctattttttttgtttaaattatacttttgaatcctgatataaatatgtacatataatataaatatgtacatatatattttttttaaaaaaaaaaaccacttgtttaaaattatctcaaaaaataaaaaattatagttttgaatcgtgatattttcattgtgaaaaaaaacacagaagttagttactcttttaaaaaagaaatatctttagaatttaaaagggaaacctttttgaacaaggcctaagcccaaaacccaattgaaactgactattagtgccgtggtaggtagtcacttattagcagtacaaagtaaatatatagagcttagcttagcaccaccacgtgctcaataaaaaggtcaaaagccacattcagacttttgtagatattgtttggcttttcatattttattcaataattctcaccatgaattccaggctcctaatcactgcggctactctagccgtcttggcagccatcttggccgtcaatcaagatccttctctcattaacatccacgcgcctccgcctatacctgggtcacgcgatgtcctccacgcggctcagatagtcaatgtcaccggagcagtgggccccgagagcatcgctttcgaccccagtggtcggggtccgtacgttggtgtcggcgatggccgaatcctcaggtgggaaggagacggccttggttggtctgaatttgctttcacctctgagaacaggtaagatcattgtatatacttaattttggtgttcttttattgatttcgatatttgtataattgtttttcagaaacagaaaagttttaaaattttcacgaatttatgtgatcagatatatttcttaattgactcacactgattgttgatgagcttaccatagcaggagcttgcttttgtgtaaaaattatctgataataataattataattataatatactgaatttattatgtttcttcagcttcctctgtttttgatcttatataaatattaatttttgtttgatttcattgaagataatgaacatatagaagaactactaaaaaaaatccgttaaagagaaattatattattattatgatttataaaatataattgtgtcagttttttattcgttttattctataatctcttcagaattccagcaaaaaaaaaatctataatctcttatttaaatatgtatttttaaattcacactaaacattatttatccaattaccaaggcttgatagtttatacgattttattttaatttttacccttttacggcttattagtaattaattattattgttggcgaattattaattataaatgtatctttttgtaaattatatgatcttatcatacatctctttaacaagtctaatatatcggtgtataatgtatatgttattttttgttttgctgtcacttccttagtatttttctatatgcgattattttttctttgtaattcttgtaacaaaaagtctctaggtgagaaaaatattttttttatatatatgttttctcattatttgagtagatgattaattttgtaaaatataaaatttaaaaggtgttttaaaaaaatatgagagcttattattattattattatttaaatggtgatcaacgaaaaaataaataaatggagcctgaaatgattctaggaggggaggggttaatcctaacaaaaataaataggaaaggctattttctttctctcttattcaaacttcctcactaatttttcaagtttaaagttgtgagcttgaggtccttaagcatggtgctagcattggagaaatttaactatctttaagtttttttcttatttaataattaattaaacaacatattttgttataatttttattttgtttcatttaacttttgtttgtctttcttattattatgtgtataagtttttctatatcaatacaacatccaaactaattcaaccgatccaatcatatattataattggattggattaaatgttaaaaattggattctaattgaactagatctcagatgtcaatatcaaaatttattaaaaaaaaatgatcaaatataattatatttacatatattaaaaattatttatataattataaatattagaaagtaaaaaaaataatattaattatatttttagtattttt

SEQ ID NO: 298618 - DNA, 994 bp, Cannabis indica
aagaggactgtcatccattgcttcaaccccaaagttgaggtatgaatcggcttgaatgcaagctgtctgtgccttctgcttagcttctgcctcctcacagttgtgacaataggatagcatgccttccatgttcttacccagataactaaagtcagcctccttgttgtttagccaaaatttgaagaaaacatcggtggagaggttttcagcctgtttcatctctgcagctaggccctcacactccttgactttagtttcatgctccttggcaagcttggtgtaagcctcctttttaccggtaagcttacccttgagacgctcgttctcagcagcaaccttctcagtagaagcttctaggtcatgaatcttctgagagtgttcttgacggagggcatcaagttcaagctgaagcgaggctgctccctgcttctcgtgctcctcctatagggcgagaactctagattgaccataggaggtaatcatcgcggcctgtcacacatcatgacatatatgttagatgatggctaaagaaaagaattttttacaagaatgagaaacttacccttatcatctctcaacacccaaggtcaatgatctgggcatgggtgagacactcaagcttagacatagtcttatccatgctatccatgatgccttcggtgtaggtacaagccaccgtcaggcccgtggacaaggcttgataatggccctccaggggcagcacagcaagtgattttgcccctatagacgtctagccaacgaggatagtatcattggcggccccatatgcagagttggaaggatgcgaccgagacgaggcgggcgaatcaacaccaggagtatgaatgtcgatagtcgagcaagagctagtcctcctaaccttaccaggaggggccatgggagaggtgttcgagggggaaccccctattcctggtaggtcacttgtcgcaataggttacctaaatctgcaaaaacacacaaaaatgattagtaa

SEQ ID NO: 298619 - DNA, 5291 bp, Cannabis indica
tgtttgtgatcaaaaaataaagtctgaagcttcaagccgatgcgttcgatttcaggaaaaatattgtgaataaaagttctagatctctcttttagcttttcaaaacatcttgaatgtccaattctaagtaatatcaaaaagagttatggccaaacattatcggtcgtcgcaccaggaagcttgctgcctaaaaaccaagttcctgggttgcaacactgaaagagccatgttgcgacccacctatttttagaggcccgatagggtaattaaatcttaattttgaaggagaaagggactcttttattgggacgaaaatagagatagaaagcaaccttggagtctacaaccattgatcttcaaacagtttctttcttctacctttattttatgtttttaattagtcttaatcaattgttgacaatgactatgagtagctaatttttcaattagggttattaattgagattgtgtgacactttagtttgattttaatgtgatttgatttttttctaattttctttgtgtatctatttcatttgtacttaatttattttaattatgatcaccaattaactatttaataatttcaatacaaaatctgagaaataagtattgattatgttattgtgaaatagagacagatttcgatacatgacgagaatacccatatagtttgtgtatcatttaaaatttttatgcttaatgcctcatatgtgtaaaatttatgacgagagtagaaagtttgcgtataggttgaaatttatttgtcctagctcaaatataaattttttttagttaattcactctcacatgaaaattaaaatttagaatcgaattatcttaaaaccatacaaagtagattcaatcgaaattaatcaccctaagctttaattattgttaatttcactttaattatttatttttttaagtggaatttagacatcttttcttatttttattgttaccaaatagaattaaaaattaaattatttggtaattaaatacaattcttgtgggatcgatccacccttgtgagtcacttgtaaacaatgcgcataagtgctggaatttttacaataaccactcactagcaaacttaaatagttattatttttaaattaactacaaagaataggataatacatgttatggacagagtaacagtacaaccaaactttcaaattgaaatacaaatggaagttgaagttgaagaaaaatacacatgaaataggccagagaaagattattcgaaaacaagtttctccttacctttaatgcttgttggattaggtcctcttgatgtttctgagttaggatccaccttaggaatgctgcagctatttatgctagtacctgcctcacaaccaatggtgccattagaatacatcttggttttgcttttattactgagacaaacaaaatcctcattttgtgacaatgacttcatgcagtaagcaatactttccttaaactcatcctcatcgtgtcgaaacaaaaggcggaggccacacttttcaacatgcaagcttcttccactgtcactcacaaatgaagcctctaagagactacaaccatttagctgctgattcgaaaaccacccttttggtatgtaggaaagccaaatgaattggccttgctggtctaaatatatgaattcttcattggtggtttggtggacatggagatgttctaggctgcctcgctcagtttgcaaatgacaaataaggcggtgagacattgccttgtattatccaaatggtcaatgctgcaggcatttggatgcttataatcaagatcagaaaagcatgcacataatgctaatcctatccagttgtcatcaaataatagagtagtaggcagctcaattttgactgaagggcatccagtattataatttctgaaccactcaagaatctcagttgcagtgaaacatgaattatatatggaatgtcgatgaaactcctgaaataaaaaatgagaaaataaatagcctgataagatataaagtttaaacaaagaaaaagtaatttcaaaaactaaaaattgtattgtcttactattactagcagctcaatgtccgttctttggtttcgaggaacaatataagagtcatcaaaatcaggagatttttccttatttttgtctttcaaaaattggcatatgggatccaaatcatcaaagaaggaagtcacacacttgattattgtttgttgaaactcttgcacatcatcttggtaaagaagacgcatgccgcacctctcaacttccaaaccagggcagtcaaagctatgcatttcagcctgtacatagcttacttcattcaaatactctgtaaatgcattctttgggatataagttaaccaaatgaagccacgaagattcaaccacttaaacttctctttactgatgcggaaaattggtgcaggcattagacaattttcttgatccaatatgaaatgacacataaggtggacatccatttcagaacaaaggttgtcgagaatagcagcagggtgctcgtgaacagtaaaggcagcacacatcacaaatcccatccagtttttatcatcatatagatctcggggtatttggaatatcaccttgggcctatcagtctgatatttgaaccactctaaaacatttttccgaggaaaacaaaagttaaatctgaagtaaggatcaaagcttctaaggaatgagattgtatggcctgcaagactgagcatgaccaccagagaaaccttgaagtacttgctaagaaatttctccaagttatttatccactcggctgttgaatggctttccaagagtgctgtctcagctgttatgtctaaaacaatataagtaggctctgactctgagtctattgaagatgggcttacatctaaaactgagttgttctctacaaggctttcttgcattagatcccaatcctcaaaaaaggcattcatgcaatgaagtatcatttgctcaaattcttgttgatcatataccagttggattccacagttattcaccaacaaaccgggccgctcgcttccaaatgaagcttcaatgaaactgatgaactgatctgacaatgatccacatggtatgtaagataaccaaatgaatcctccaagatgaggcaaccactttatttcttcatttgtgattcggtatgagtgaataggttccaggctaccttcatctgtttctaaataacagttaaggaagtgggaatatgctgattcttgattctcatcaaccttgccagttaaagactcttcagctgagaaatatgcccacaaggcaagtccaatccaattgctctcttcaggcagtatttgaattttaattgagtaatcattattttgatggtggaacaactttggaatttcacttggaggaaaacaataattatacttcaacaattggttaaagctctgcaatatagatatatactatctatgagagagacagacaatgatagagatcataaacacaaggtagagagaattgtgtgaaagacctgataatatttttgaataaaatgctgagtaatgtccttcccgttctcagttggcaattgtgactgactattactaaaatttgagttataatccacttcttgcacttgtcgatgcaaaattttatgctctctacaaaattccacatgaagatctactttagagaaaaacataaactaagcatgaaaaaataaaaatttataaagacttaaccttggtaatttggaataacagtagcccaaattaaagtccttttcttcacttggaatatcaacttcatcaagaatcttgttccccatgtctccaaatgttttacaatactgctcatggtgtacatttggactctctattgtgcactcaattattgtttggatgagatctttcatatcattctcgtatactttacggatcccacagatttcaatctctaaataatctgagttggaagttgcaaacaaagcattaatttgtccacactgattcaacacttttggaaaatgcacacatggtacataaagtagaacaagtcgatgttccgagcctactaaattgtcatttttgagtgaaaatcgtgttgagtgtaacattccacctggtttgatatgcaaatgagcaacaacggaagccgaagattctgagtccaaattgttaagtgagaaaggcaaacggctacgaaacacaacatagagagcaaatcctagccatttcttatcctctaataagtttggagtaagacaacagaaggcgtgacgtcccacacattgataggtgaaccaaggcaaaatcgctttgagaggaaaaatgcatccaaaatcaagataacctgcataactttcctgtataatgcacacaataaaggagtaaggggaagaaactagaagaaataaaggcaaattaagacattgctttacctgaaaaagtcttgaaagcgataattgcagcttacttctcagctccatggtggagaagcttctccacccttgttttgcaattgaaattgtagaatcagttgaatctacgtgaagcaagaacctatttggtgaagtgaatttcgattctgcctcatccgatagctcactaaaagtgcctttatgttcttgttcagcagattccatcatgtcaattattcttcgatctgttataatagattccacctcaccaacagggattgttttggttacccgatctactatatcttgacaatgattgaaataatcttgaacgtcatcaataggaaacaaatctctcacaaactttgtcacatcttgcttatatatgagatgagccccacacattttcacacttatgcaagtactatttaaggatattgaaacttcaacacgacttgccttatctaagtgcccatcaaaacgttttcgaggtatgtacttgcaaactccatatgactcttcactagtaatatactctttgtcattgaactgaccaagggagatctccatgcaatcttcatcagtgtaaaaacgacaaatggctggtagaacagttgaattcgtatttacccgtgtttgcacttcaaaaacaatgcataaagcaagtcccatccacatattattatgttccaaatctggtggtaattggattgtaactgaagagccagtacttgagttgctgcaccaatcaggaattgtagtatgcggaaaaaaatgtgtgaattcatttccacgataaacgtgatcctatgacagtaaaagaacataaataagcaatactagaataatgtaaaacatgtgtttcttataaatatataaagagagagagaga

SEQ ID NO: 298620 - DNA, 2554 bp, Cannabis indica
ctcctgtggaggagatacattctcctccacagggttatgggaatcagaagacccactagaaacagtgtcatcgatcacaaaagaaccaacaagcgggtttttcaaaataccagagcaactcggggaactagaactgtcctcagaaggatcatcaatcaccaaatcagagtcatttgctttgtgccttgtatcccagggaaaatcacgaacgacttcaggatacttctgcggaactttgtggggcctagagcaaagagaggcagacgcttcaaatttttgtttcttaaaaggtgtcgttctctcattaacttcagaggaatccgggaccccaatgtctcctccaattttccgtatttcatataaattgaggttcccaaaatgtttaaggtcatgcaataggctttcttgagctttaaaaaattgggccaaggctttgtcttcattagaaagctcctcggatccattagatactctaggcatatatgtgctaagccccacgagcccaacatcattaggagaggaaaagattggcccattagcaaagaaacgattacccaaatgagacggccccaccaagttgcttgtagagttatgaattccaagagtgtccaccatctcgggcccattgggttgcaaagaaacatcagtaaaagccggcccagtagtaataggaggagagcaaaagttgacgttgacttgttcataaattgacacacacggcccaatagagcccagcccaattcccaaatccttaactccaaccgagtttctagccacatcagtagagtgagaagtagcaagcccaccatttgtctccaaatttggcccattagagctcggcccaatacataatccatcatccccaacggtctctttattcaaatcactaagaccttccaaagaccggtccttttccattataatcaaaatgggtagatttgcaggctcaactcccacatccaggtcctccgtattgcttcccctaccaaaagaggtaatggtttttacatatcgagtaggacgtgacttgggaagccacgccttacgatttgcctccccgaggatagcaactccacgagaagtcaccatcgactgatgtctcggccgtccaacctggtaagagccaggacgcttaggaacttccccacaacccgccatggtctccggcgttgaactagtattcccactcgacttccctgaagtcacagccaggaaactacgtgaaccaaagtgtttcggccctaagaacacgtcacgatacacaaatgttgtggagagccagggaccaaacataggaaaaggagtgccatcagtgttcgaaaccatcaccggcgatgataagctgcaccccctccgctgatgacccagccgaccacaaaaatagcagaaaattcctattttatcatatttcacttgtatccatttcttaaccccagcagccatgtcaaagaaaaaacccgaaactaaggggttattgatgtcaatgtcgacctgtactttcaagaaattgtcccacaatgcaggtttttcttcctccaattcaacattaacaacctttccaaccaaacctcacagcaggttaccattagagatagaaaaatattcatgggggaggttatgaagttgaatccccacacgtaaaagatgaaactcaaccggcccatcagtagtcggagcccaagcttggagaactaacgtataccctctgatgcaccagggaccatgatgaagagcccagtttctatcatccgcagagacaaaaccaaacctaaataagttagaggtcttcgagccatcccccatggccaaaacagagacttgtttcttccatactttagccacaaaatccacaacagatggttcctccacaaccataggagcaatcactttcccatataaacagcaagtagcaagagcacttagagatgaagcactcggagataggttgacaaatgtttcagtgcaagaaaagcacttgccttttaaatgggagttggtagcaataatggacgccataaatatccgacagaaagcagacaaaaggaagagaatacaagactctataccaacccaccaaccccacagaaactacgagacaaacggaacacaacacaaaacaccaaatcaccaactttaccccacaacagaggaaagcaaacaagagtcaaacaataaaaacaccaaggcacaacacgtcaaagataaagacacacaaaatacacacaagctaactcaacacaaaactcggaagaaacaggagatagctcacaatctagcacaccactccaaagcacccacacactccacgacagcaaaggagaaggttgaagaccatccctttagaaacacgcacagaaaacctgatgtcctgtattttcaataatacttatttggtaccctaactaaaccacactcttatcttcatgtatggccctccctctcctttgtatttgatctcactacaacaaaacatagtattaggggcgacaaaagttgcccctaaaaacctttataatcgtccctaaaatgtattagggacgacaagtcgccacta

SEQ ID NO: 298621 - DNA, 1066 bp, Cannabis indica
attaattattctattagtattaaactagtttataaaatcacacacgtggcgtccctatagattagggcgttacacagagcttcatctagtccaaggtttccaagatgagctctcatcttctcgcaccaaagacagaagttatttttcaacctaaacttctcaatgtcgaccttaacacttgtcatcttccttgatcagtgcacctttaattctgttcctcaatttcttcttctcacacgccttggtcttgatcttcaccaatcgagttatttctcccataatcataagctctgatatcactgttagaattttccaatagtaactcgatcttgatcctgtacacataagcaatacgtaagcaatacaagaacaacaatggaagaactagaaatgtaatcaaatagaatttaaatcacatagtgtagaggttcgaattttccctcacatttgtgaagagcctaatcctctctctaaattccctcatatggttcaatttgtccattcatctctcgtagtagatagctcgattacaatcaatagcaataattaagagtgtttcaatctctacgatctttacaatcaaaaaatttatatttatactgcacatcactacaataacaactacttttagtgataaccttttaaccacaacatatttttttgtgactaactgtgacttttagtcacaacaaaaaattacttgtgactaaaacattgtgactaaaacatagttttagtcataacatatatcactactacaaaacaagcctttaggagcacttttttcagcataataattaataaccgacactatagggttgaaatttttcggaaggaaatttgatgccacttttggcatcggttatttggaaataaccgacgctaaaagggtttataaccctagcccatcacttcgtcttcctcattcgatcagccaaccctgaaacccccaaaccctctccgccaaccaccacggaaaatcacccccatttaactattttttcaccattttagctcatttttgtttctaaatcttttatttttcatacctaaaactatatacctg

SEQ ID NO: 298622 - DNA, 3012 bp, Cannabis indica
gtaccaatcaatccatttaagcccttttaaattgtgtagttccatacacagtctcagaatcatcctacttgaccttcccaaggcgatgtgggactgcacagcttacccggtataacctcttacggatcacgggactactgaatgtcacaagaaaccccatcaacgaggatgattaggaagaataggaggaagatcccaaaaatgatgaccacgatggaaacaacaaggagtattactatgagccaaatcccaaagtggtatgaatggccgaggaacttaccgaggcacaatagagattggcagagcaggaagacttctcccatgaaatgcaaaaagcattggcgtgactacaagcgagtgtgcctgaagaagatgcatgcccctgaagaagatacttttgaagagccaattccagaggaaaatattccgacaaaaaagtttaaacctaaagatgttggacctttcgctccaacaaaagacaaaggaaaaggtattatgggtcagcttatgaataaacctactcacgaagtgccacgaaacaacaagaacacatccaattaccaacctctgcaaaaaaaagaaggccacccatgcccaagggcaggacttccctatatatttcggaggtagagtttttgtggaacaataggcttggtgctcaggtacaaaggcctaacattggggaatggaaaaattgccccaatgattctgttaacctaagtgaaggagtataagaagtatatctggaagacagtgtaagaatcaatatttttactatgacaaatatggtccagtcacctttggcataactcttagttgtgtctagagtttagttgtttttagtaaaatgtccacatcagatgtttgggcaactcgtttgttagtttctattacatatgtaacttttttctggtgaatacctaattttaggtcaatataaataccactctttctattctgttagaactagccttttttattgaggattagggattatgtttctttccttcttattttgttatcttttgcaagttcttgcaagaactccattgggggtggttcaaggttttgttgcaacctttgaagtcatggtgtgaggggattttagctaagacttggcaccatagatctaaaggtgttcagatttgaacttttgttaatgggatttcgatcaattgaagtaagggaattttgtattcataaccaaggaatttggttaactggggtaaaagttcacttctgtaaagattgagttgttttcttattgtaatccagattggttattgtacaaacattttttaatataatgaaggttattatcttagtttgggaacccaagtactagtcggattgaatgagtttacagtgcaaataaagcttgtaaatgttgtgttcttaattctaatctgagtaattattttccaagtaataattcaaaattaaataattggtgcaattaaaatgattagagaaatataaataaattcatattctaggctttttaattggtattaaagctataaaatttctgagaaagtttgtttctatcctcctatctttaatactctacaactgtttgttatttttcctctgtgacatttttggttcttgatttctagtttatctagttgacactcaccctctctaagtcttaactttgggagtatattgcattttttgtgtgtctctggtgttcataccagatggagatgtttagggaaggtggatccacatcatgaatctcgatgttagaaggggctaattaccctttcatgaaataaaaaatgtgggcattcttaagagctgttgacgaaagagtttggatgtccattgaagatggctggagagatgcccaaccattgttgaagatgaaggtattaagatgaatatggttgtggattccaaaggagatggagatggcaattttaattcgaaggcaatgcatgctctctttaatgcagtgtctaaaaattagctcaaggtcattgccaactgtgaaattgctaatgaggcatgggaaaagttgagaatcaaggatgaggggacggatgctatgcagaagtcccttctaagagcattgtgcatttcaagttatgtgcaaccgatcttttcttgataaactatacctgtcgcattatagactagggcatttgaactttagagatttgaaaagaatcaaaaaacttcgagcaattaaagggatacctgatatggaagacaccagggatagactgggtgggtcgtgccaactaggaaagcagacaaaagcctctcatcctccagtaaacatatatgcttctaacctcacgagtgttggaatggatacatgccgattcgataagtggtaagcgattttttatgcttttggtagatgattactcatgacatagttgggtagagtacttcaaagaaaagttacacacttttcgtctattctctgcattggtcctttggttgcaaactgaaaaggactctaaaattggaaaagtatatcggatacaaagtgaccatgggaaggagttcgataactcaatgttcttggatttttgtaatcatttgggaattcaacatgaattttagctccgaagacaccttaacaaaatggagtggttgaaaagaaaaaaaaataagattctacaggaaatctcacgagttatgatgcatgataaggatatctcaaaacaattttgggctgaagcattcaaaacacatcatgctatgcatattttgcaattaagtgcatctacggacttccgggcatgctaagaaggaggtcttaaagagcctgaatcaataagcttattaatttgattgaagggggccaaaaaaattagtgcccctctttttaaagcaacaagcgagaaacttgattttgaagaacaataatataaaagaagttatatagctcctaaaatcactctgttttaactgtcacaaagatcacaatttgttgtgactaaaactataaattagtgacaacatgtatttaaatactatattttaatcacaagt

SEQ ID NO: 298623 - DNA, 3592 bp, Cannabis indica
caaaagaatattaattagcaggctgtacttgtataagaaagtctcaccaaaagaaactgatcgaaaacataataataaataacagcaacacaacttgaatcttgtactcgtgtgatggctaaaaaaacagatgcattcatatacgagaatataagaatcttggaaaggatagattaccaggaaagaccatgggattgattatgagtaggagcaggtggaagatagactttgtggtcaactagaatctctggtggactaacattatctttctctgcatactcctgtgcagctgagtcaattactgactcaaccagactaagatcagcttcacgacaacgcaacaacacagcaggctccttcaacctgagcaaactctgcaaaagaaactcaaaagatttcagtattacgaaaggctgcagataatcctaaattccattagcccttatcaactgttcataaaatttatatcaacctgcaactagatacaaataatggggtaaaaaaattgtctctgcatagaaagatagctttactgacctgaacaataagacctttcagaagcttcttatagacatggtgatctcggctgacattcagaagctccttagaggctacatccttcatggaattaacaacatcatcttgagcttgaaggaccttgattcgagaagcattgagttgcatggagtactcactgcagcagaccataaagaaaaaagtttagtatttctccacatctacatagcttctacaataaagcaaggtaaagcaaaaagagggcccactttctaatatttctacatccagattctaacttggatcctatcattataacaaaaggaattgagtaaaattacaagaaagactttgactcatagggagaagaaaagaccaaaattgaaagaaaaaataacattcagctcgtggatccccaaaagaagaaaaaagaaaagttccatggcacattcatgaaaagttacaatcagtgcacctacacaagccttcatccacgttgcttattgagagcatcccaaattaatctaactccaccacacaaattgaacactgctggagattgatcatttgtttactagtgcatcaactcaacaaataaataacacagcaaacaagagtgaatacagtagccgaaaacaaaataaaacttttttcccaaacagtgtattaacgtcactacactgttttcaacaaacccattgtttcaattccccaaacagtgttcaaaatttgcagcttactctttctgaatctgaatttcactgataagcaacagatatccctaatcaaaatctacaagaaaaatcctataacaattcaaagaaaatcaacaagattataccctccgattcaagtacgaaccgatcagatctttcaattcacagcttttcaacactaatcccaaacctgactcttacattcaatttcaaaaccacttcaactaaaaaacaaaattcaagtaaaaaatcttacatcttcttccgaacatcaacctgcttctccttccgttcatactcctgtctgatcttcttcttctcagcctcaactaactgcaatttctcaatgttgaattcctgacacaaaaaaacacataaaaatcaattcaaagcaataaactcatcagattgaaataaaaaaaatgaaagataaatccgtaactacgaggaaaagtagagtacctcttcagcggagactgagatctcgttggccttttcctccgcctcctggcgaatgaatctgaccatctgctggatctgcttggagacatctgcgtcgttcatcttgatcggcgatggattcgaatcggagaagatcggagagagcaaaggggattgttatgagagtgagagcgaaacttctctcgaccacgattattgagagagagacaaaaattacagaagggctttcccttataaatataaatactttcacaacgtaacacatcaccattttattattattattattattattattattattattattattattattatcttttttaacaaaaaaaaatatttaaagaaagtaaatattcttattatcttattgaaaaataacacagatattctttttaagttttggctaattgagaaatcgtccttattttttaaaaaattacaaataagtatcattaaatttttttgatgtagtgattagttacactcataaatttactaatttgaccttaaactttgtgtttttgagataataataatacggtcagatgaaaatattatcttttctaataatagggtcagggagataatagaaagctttaacaagtcaatgagtgactatgtttatagattgtttaacataacaaatgaaatattcctaagagatgcaagaaattttctacaatcatgaataaatcgaaagtagaaaacatttcaataaaactatttgatgcagttggtttttacttgggcatgaacaacaaggttattcttcaatcaattgagagcttcctttacaccatgagtcttagctacatccgcacgcataacactctctgcacatcacactcgagcctccactagcacaccaacagaatcacgaatgaccatggagaaatcaaactttcttgcaccatcaaaaattgcagcattcgtattaattttgatcatattagctaatagtatcatccaatgctcaatctccctaacagagccaacaaaactttaaggatcatctttattattctcatgagctatattctacggatcaaaaagagtaagagtagtagaccttacagtgttacaagtataggagtagaaaaattttaaaccatctcatttcgtgccttccaaagttgcaagcagataacactaataattcttatagcctctatagaaaaattggcaaaaatattagcaagccaagtagaaaaatctcattcgaagtaagtattacacctgtattaagacaattctagtataaaattattaaacttaatttttttactaaatacaaaatataatataaaattaaatttagtttggattttaccgaaatcattaagaaaaattgaaacataaataaaaaaatatcttttctataattttattttatttagttatataataaggggtgttagtgtaattttcaaaatccttaggtagatttttgtaatttaacggaaaaggagagggttttattatatttgtggacttgtttggatggatacgataagatgggaggtagataacattagattttttttttaagaaaaaaaaaagatttgatagcaaactaatcatattttaataaaatttatcttttttaagctataagttatttagaagcttgttaattttttatttttttaaattaaaatattacatactgtcagcatcattttttgggacgacagtaaaaaaattatttaatacataaacaaatattaatgaaatatattttaaatttattttagtgcagcccaaaattagatccacttaattattagctaatatgatatttctgatatataagtgattataatctctaattttttttataagtgattataatatttctgatatataagtgattataatctctaatttttttt

SEQ ID NO: 298624 - DNA, 1284 bp, Cannabis indica
gtaaccaaacgccacctaaattacaaccaaaagaaaaaatataaagaaaaaatatagttggtttttttaattgttcatacttatgttttgacttatcttttaatttaataattattataaaattatatataaaacttatattaattttgtaaatataagttagattttttgatacattacaaaatcagcataagttcagaaaatacgagtacaattagatatgatgaaatataatttttggtatgatatataaatttgtataaaataacacgaaaaatataacttaagtacgatacgacacaaaaaatctaaaagataaatccaaaagaataacaccataaaaaatcttataatctaaaaataataataatttaagttgttactagtaaatgttaaaattttaatatttctaataactttttaatatgattattagtcaaatattattaacaaattatcataagataattaatgctaaaaaatatatataatttagtaattattttataaattataaaaataaaatacaaattcgagcccatataagaaaacataccaacccaagcaaaataaatcttacaagacatatcggattaaccctttaaaaaatattataacatacgatataatacaatacaacttgtattttaaaaaatatgaacaaaaaaaatatgaatcgaatcagcctgacatgcagatatttaattacactattaccttttactatagtgctaaatataggtgaaacaaatttagcaatttttttaaataaattgttgacgtggttgcttgtgagtggtgtttcatttttgtggtttggaggaattatattggtgactatttggacactcatataaccacaaactctctctttctctctaatttagtagtcacaagagaatgtttgaaacatcattttctcatcttagattttagattaagatttggaatatttagacaaaaattggcaataaataatgacctcatgatgtttgtggaagcattattggttcatttgtacaaattctacacgttcattattgtgtattaattcaaatataattaaatagaaaaatcaaatttattcatggcctaaattgctcataaatattttaaaaattaaatggatagaatcttttagaagagtaaattgaaaatatagtataagaatgcaagtgtgagcaacaatgtataaatatatatactagaagatattttcaaagtaacaagatggacatgttaggcactcttattagcactaacatttttattttatttttttaa

SEQ ID NO: 298625 - DNA, 2775 bp, Cannabis indica
ataaatctggcttcttgaatactagagaattggtatgcaacccccacccctaaccataagtgggaattaaagcaattaattaatggattaatgtgcaaataaataaaagattcgaaaaggtaatttataaaaagggcccaaccgggttcgaaccggtgacctcttgatctgcagtcaaatgctctaccactgagctatggacccaatttgtttattcatacgttttactaattaaatatataaacataatacactatcataaatttctgaaatttattttcctgtaaaatgagtttgaatgcaaaacatatactaaccaaattatgaacttcttgctcagcagagaggttaattatgtcataatcatgagattcacaactcacaagacaagtcttataaagcaattaacttccttcccaagaaacataatcaattttgtgggtacaaattctcatcactacaaaatctaatttcctttccccataaatatatttaaaacttttttctttcagatcgacattgaataataataaactatcacaaacacaaagcttaccaatcccttttcataaaacatccagctataaatatcaaacctgtaatcatttaacatttctatagttctacacctaaaattctaaacttcgggttagggacgggaatttaagtactgatgttaatatcttaatagcattgaaccgattaagttggatcttctgctcttcaaaatgaggtgttacgtttggtggagtagacactaaactgaaggcttagaataagaatcagcaatcctagcggcagagtcccaaactggtttagggagtaattaatttagctgcacggaatgattccttggtcatgccataatacactggatctgtgctggtaaaggtgatgaaattccatccaaaagctgatcctccaacaacgtatgtccctttaatctcaccggattcaggttgtgccttctcttgttggtctgaagagacattttgaggcttctcttgctgattttgaccattctttttccaagaggaatttgcttctgatatcacctgtttgaatagctctaccacttgcttcagctctgtaatttgaaggtttggaatgtcacaaacacaatttaacagccaatccaactaatatgttaattattgacagaccatacaaatatcaactgctaacctaatgtgaattttatttcacttctaccaaaaccccagatcctactaaggtcatatccagtttaaaaattggagtacaacctttcattgtgtgcaaaaagtaccagacttgtaataaagcggtctgaacttatgatggcattggcgtctaccccatctaaaaactatacttgtaaactcagcacaagttttgtccataaagacatggatatgagtcatgaagctgaaagtactaaaatttaagggtgtagtattccaacattcaaatatgaaaagaaagtaaatcatctcagtgagcttacgttcttggatttcatcagccgccctgcaattccgaaaatccggggtgctaataaccttcaacacaacagaaaggatttcatattatttggtatgaaaagtagtaatttactcagcaaatgtatataaggaatgtgctaaatacatatcctcaaacgaaacctagaaatttcagcaacactaagttactaactataaataaatatgcaaaattcatcaacctttctgtttatcaataaataagtttagcaattgaaaaaaaaaaactctaatttgtaagttttctttacagagtccatccagtttttttctgctgttgtttcttgaaaaaaaaatttatcttgcaacagcgatctttcaaaatctgaacctccatgagtttaaaggttacaattaaaaacaccagagagagaaagagacccacttttaacacagttgccagaaggaattagcaaaaaaaaaacccaataaaagaaataaaataaagaaaaacgaatgaagttggataaaagtcaaaaacaaacctcaataaaatgaggacgaagactattgagaagaagacgaagtttgaggcgtttggaattgtgtggaagagagtgagtggagaggggtctcttgttggaattaaaggagagaggttgagaaggttggggttgagctgcctttggtccctccatggatggtgtggtgaggaggagtgaggtgcgaactgcgaagatggttgagagagaggactctcaaagtgacagtgaaagcgggggatttgaagatttgatccgggcgggtggggtgttggacttggcttgggtcaccgcactcgccaccgctaaagacaactctttttaacttgacttgccttcacttccttcccttccttcccttccctataattatcgagtctctatcttccctactataataaacgatgtgtcgtttaactcaatattaatacacttcatgccgttttatccaaaagcagaaagtaatgaaaatgagcaactaacgatattgggatctttttgggttttttttcttccccccctttttttttttcccttttagatatttctattcaacttgtttcaaaagaaaaataacaaataaataaaatatcacaaattttagactttgaagaaaatcgatagttaaggaaaatcttagatttgtgattagggatgcacacggagcggggaattggcggggagtactcccccgtcccatccccgttaagaattttaatccccatccccacttatttcccatcggggatgggggcggggaatcccctaat

SEQ ID NO: 298626 - DNA, 1423 bp, Cannabis indica
tcttgggttaattgttaatttatctaacatgaggtacttatcctgagatacacttgtggttctcaagggataaactgatgccctggtgctacgagttgcaggtgcagaaggtggtcttgcgcttaatttgtacctttgtctggtacgtgtcaagtagtcccgagttgcagaagtggtggttgttgtataccctttgttgagatgttaggagctacaaggtgaggtgtcgcctctactcataccctctcgtcaacagatcatgcaagaagcgtggtcatactccctttcgcatctcatcctttgtgtggccacaaaaaaataccacttttagtgataactttttagtcacaatattcttttttacttgtgactaaacatagtatttagacacaagttgtcactaatttagttttagtagtcacaacaagtattgtggctaaaaacacatttagtcacaataaattgtgatttttgtgactaatacttttggtcacggacttttagttacaacgtacgaatggcgatttataattaatcacaaattttaatgtgactaaaagtaagattttttataatgccaagtagccgttgcccttggccgagtgactatttgattaacttagataaagttttgaacttggttcatatatattagatcaagagaggagtagatcaaatggttagatttatatagcaattgttttagttttggaaaaaggaaaattgggttcatcaaaaattcacattacaaaaaatttagatttttagtcacaaacaaaaataatttgtgactgaatgtacttttttgtcacaatttgtgataaataatattttagtcacaatgaactatttgtcacagttcttaaatttttaaattaaaaggtcacaactaaatattgtaactaaaaatatgtttagtcataattataaaattttatgactaaaatctataactaattattatttagttactaattaatttattgtgttgtcactaaaaattatttttttagtcacaaatattattttttatcatcttttaactatatttgcgacactatatttccataaaaaaaaaactatatttgtgacactataaaggtttaaaataatattgtacaattgaattttatagtttctgttcatcattatttttttgttatttttgagtatttataaaactattattggaacaagccttgttgattgggcctagcagcataggccatcaagtttatcctgatggttcgatatggaccaatgtatattgtaagttgggcctgtgggccgggtaatgggccctggcgtggtgtgtagaagtctctaagtacactgttagctcgtaaaaaaaaacttttttctctaagacaaaattaagttgtaaattaaaaattaaaattttatatttttttaatataataat

SEQ ID NO: 298627 - DNA, 2288 bp, Cannabis indica
gtttaggatcaccatttgaaaattcaaactcataacccctatagatgttatggactcaaatgtaactcttacacacaccataactcctatagcattaagaatttcaaataaaggtgtgtaacatcttttacactcttaatgttggtgataatggtagaggttactcatagtaacaactccccaaatgttacaaaaagatgacaactaatatagtcatatgttacatattattagtttattacacatatttaatctatatattatattattataaataatataacaaaattacacttatatacccttgtaaacaaaagctcatatcccatgtgagactctctctatatcacaaactctagaacactctcctattcactttctctctaaaaagttccaaacatacatatctctctctatatatagctaatctctctagttctaagcatttattactctgtttcattctcactttgactcatcatcataaatcataatcactctttcacacccaaccaactaaccaacccctttctcctttctttcttcttcttcttattattattaagagaagaattgaagaagaagaaagggagtaattgaaaatggggttgggaaagaaatggtttttatggtcacaagtggtgattggaatgttattggttcaagcattcgcaactggtatgcaaattctatcgagaatcattcttgttgaaggaacttttgtgtttgctttgatgacatatcgtcatttggttgctgctctttgtgttgctcctttggccttctatttcgaaaggttcttcctttgacttcttacttctttcttctttcttcttcttatataagttttcatctatacatatatatacatatatatatatatatatgtgtgtgtgttgttgttgttgcagagttagtgaagtaaacaagtgtaataagaatgtttggttttggctattctgcaatgccttagcagggtaagccaatttcataccatttttcatatgatgatcatttgatttgtttctcaattgttcttgtttgatcaaatcaattcaaaatggaatctttgattctggtttttcattagttttgattatgaaaattataataatatgcagacacaaacacaacacatgttagctgcaaaaatattgagaattgtttccactttttcatagataaatacgggtaaaaaagtcaccttttttatatatatttatatatttgtatttaaagcctatttcccaccttctctttgatttaatttttaatgacccttttcaatgcaattcagaaaagcaattaatatcatatctgaaatgccaattcactattgtttttgatttaattaatgtgttcatcacattgaattggctcttcaaaaagcaatcatatcaatctcattacatatacacaaattgtattatgtgttgtgacttgtgactaggtaaacagatcatattatgtaatgtattgtatgcattgcataccaaaatggttttcaattctatcctatgtgctctgtttattataattatatgattttgttgttagaaaatcaaaatcagcaatataaaatttgtatataataattagatgataagtaagtatgtatatttaattgattcatagtaaatttgatagtgaaatattaactaagttttcttcactaaaattgtaaattagaaccaattttatttatctgattattaaaaaatatataattatgataagacaatatgtatttataaagttagggaggtgacttagctaggtaaccctaattggattgagtctgtttatcaaaaacttttgttaactaaaaaagttcacacttctgttttagctatactttatacacagagatgttaagctcattaaatattgaccactaacacaaaactatccaatcaacccatattttatcaaaactaataaaaattaatgtaaatgtaaataaaaagttacatatgttgtatatgtatatatatttatatacatgggaaatattaaaaggcacatatagtgcctagtacccttgtgaagtataatatgattattagtgcaactcaatattatgtcctacttgttttattttaataaatattataaaaaatggttaattaattatatagtgatattttatcgtgatactattactaagcacaatgttctatattcatatctcatcaatgatgtaaactcaagagctagccttaggtcaaggcagtttattaggcttgcgcttaaggtccactcctattaagggtccaaataaaaaaaaa

SEQ ID NO: 298628 - DNA, 1231 bp, Cannabis indica
aattactaatttgattggatcggatgagaagaaaaatattgaattggattggatgtccacccttaaataaatgtgttatttttattcatttaaaataaatatattcattttttttgtaaaaaacaaataaatacacactgatattaacaaacatttgtgtcacgatagaaaaaaaaatcacttcttcttcgtgaagtttccacaagacttgttctgggatactaggctcctacctttactatttgcatttgcatttaatgcatttaaccaccacctccactcctttacagtgatgattgcacccctgatactcaaaatccaaatcttgcttgcattaattgcacttgttattttgcatttactttcgatggctcatgttaattcacaattaatttggcatcacaagatttatggctctaaacccttcgaccctctcttctccgatcatcctacagtcactttgagttccttgaggccacacggagtaatcattgctactcaaatgatggctactctacctcaggggggatttgagcagacggagtccacgatttcccatactcctacacgcattttcttctccaggtattacatcttcctcctcttacttttctatttaaggataggttttgccatttttgcatgtactccatatccagttcttagctatttcagtcctccttcgtttccaatggcatcctcttcaaccccaccactctctcactcacagaagaagaaaatctgatccacgacttcaaccatgtttctctcaattctggagctgctttcgattcccactgccttatcgtcaaaatcctcactaccaaatctcctaagccagcttggatcgagaaagctatgtctgaagcttggactcttcgttttcccattaccatctctaaataccactccggtctgttcctcgtcaccttccagtgtgaaggagaccgtcgaagggtcttagaggaccaaccatggcatttcgaccaaaatctcatgatatttaccaacccagaaggccttgataccctcaccccagaccaatttcaattcgtcccttcctggatccaagcccacaacattccttttggtcagaaaacccccaactttcccagttcattgctgacgagctgggagatcttatagaattctatcctcttctgttcttgaaagcttatcgtaatatctatctgattcaatatcacctacgttgatcttagatcaaatgatc

SEQ ID NO: 298629 - DNA, 2540 bp, Cannabis indica
aagaaatgccgttagataggcacttttaatatataaagatatataacgaaactttacatctcacaacaccaattattataggtctggtacttttacaattgctcaaactatactaaatccaattttgccactttctttggtacaatatttttaattctactctttacatcatatttgattatttttacaattacatcaattatataaattttcatattccaaagagcttaattctaacaccaccatatgtaatatattgttgccacaagtgttgctgaaaaaacttggcacctaaacctattggatttagctttagaaagccattgcaatatactaggggcggtgaccatggcagtggtccaatgcagccattgtttaattccattcaacacttcatttggacatatattgtatttaaacaatcttgacttgaatctcaacctatctaatgccacaagccacaagataaattgatgctttggtatagacaacctattccacactttttcttccagttggaaattcaggacaaatgatagcatgtcattttttgatcaagtatgtacatgttgcaacattggggaaacattcaatccatcaattcgttctttactcttacaatctgcttttaataccagttgttggtgggaggcgcctcataggccctccaatcttcttttctattatatacattacattcactcatttcacccatagtgtgtcctgtttagactcaattgaccaaacatatttgcctatcgctgcatcattccattctttggttttctaaatctcaatccacgttcttttttaatcttacacaatcctcccatgccaccaaacccaaaccacttctacaaatggcattaacattttgtagaacattcaaagggagaatcattagttgcgaccaataaaaatgaatagcaataagaatagaatttactaatgttgcccaactcgcataagacaagttcttaaaactccacactttgattctttgcaccatcttctcaatcaagatgtcacattcaacaatatataggtaatttcttggcacaaatcggtatgcccaaataatgaaacgacaattggcttctttcgaagcctgaggcatccaccactctttgaacttcactttcagccatgttgcaacaataaagtttagatttggattcatttggttgtaggcccgatatttgagaaaatagcttgagaccttgaagtattcggtaaatagatttaaagtctccacactactacaaaactggacattcccgcgagtcctcaaaatgctttttttcgggaccgtcgctaataaaattaaatgattgttttaaaccatcaggaaaaattagatgttctcgactgtttagagcactcatgagggcaatctgcaacgattttaagtaggggtgggcaacatctaatacaatctaattgaaccaaaccgatctaatccaattcaattacaaaaaattagaaatctgattacaattggattagattggatgatgaaagttggattctaattggattggatcagttattggatgtcaatctaaaagttagaggaaaaatctctaacaagaagataaattgttgaagttgttaaagattgtatttccaaaggaaaataaaattcaatcaacgtactgtgaggtgaagaagaagttaaagaaattagggttgggtacttacgagtctatctatgtctgtcgatacaattgttacttattttacaatgagagtgcatcaaggaggcttgtcgagtttgcggaagtagtcgctgggttacttctgagaacagttgaaggaaaaaagttccttgcaaagtgatgcgctacttttcatggacacctagactcaaaagattacatagttcgagaattacaacggagagcatgatatggcatcatactggtaaaacaaaagatgatggggtgacgcgatactgagttgatggtcttgcttggagtgagttcgatgcaaagaatcatgagtttgcaagcgatccaagaaatatttgattggggttagctgctgatggatttaatccatttggcaacatgactcttgcattcagtatgtgggcggtggtgttggctaattataacctacgaccatgattatgtgtgaaaggaaattattttatgctaaccgtccttattcctggtgcaaaatctccaggtaagacatgaatatatttttaagaccgttggtggacgtgctaaagaagttgtggattaataatggactacccaccagagatagtttgaccaatacgatgtttacaatgcgtacatcgcttttttagacagtgaatgattttcctgctcatagtagcttgtttggatggagtggtcaaggttataaagattgtcctacttgtaatgcatataaaacttccattcgagtaatcgagattgcaaactacttaatgcttctccaaatcactactactccacccctaagatcccagatgtagactttctgtcatcgacacaagcctagaaatctgagtcggtatagcctaaagg

SEQ ID NO: 298630 - DNA, 1786 bp, Cannabis indica
aaaaatataatatggaattagtctgcatgcactgtgattagatgcaataaaatatataaatattaatataatactaattttttaaaatttaaatatatgtgttcataccatacacatatatttgaaattcaaactcattaattaatacgagaagtcctaataataattataatcaattagttttgcaaagattttatatttcgatcaccatatacaaaatttttattgcaagatgttaaatattagttgaaataatatagcaacaatactgaaatatcttaatttattgatctttatttagatgagattgcagctcacaagtcttaaatttattccacatgtactataatgtattaattaattatgtgatatgattcaacttctaaatataaatgatatatatatttgtgtattatagatgataaacaatatcacattagatggagactagtatagggttacttgatccctaatcctgggggcctgtggataagcatgttaggtttgtgtctagagccaattttttttctttaaaattatatatttaaaaatattttttttttctatcgccccattatatgttgatcccacttaatttttttttccaaatatatatatatattaattattgaatttttataactacgctcttattttaatataagtatttaaatttacgtttttgtaaataatttttaaaattcttttaaagtaaaaaattttgtttgtagattgctaaacaaaaaacacattgtttaactcgataaaatcaacttatacaatatcattaataaaaaatccgacaccatgtgaacaaagctttttctcattgtttgaaccacgttttgttgggaatgcaaccaaagttccacattggctaggaataggaagaattatgggtatataagggaagaattatgggtatataaggatgaacactactccattagtatcaggccttttaggaagatgcccaaaaataaaaccgtgagggcttaggtccaaagcggacaatatcatactaatgtgggagtcagtgaggtagcggtccgacaaggtggaagagcggggcccaacacgtttaaacaatcaatctccacaacaacattattagactatcctttttcctcttaatccaacttaattaatacttcatacttagtcttataataaattaagtttaattaattaagattataattatcttaatcatcactcgcttaataatatatacactcaagtacttgattagtatggatttattcaaatattgactaaggcctaattcaacattaaaagaaagccatagtcaattcaaataactacttttgaacatagtgtgagttttttctcattccctatttataataataataacaacaaagagagagagaaagaaagatatttatatatataatatatatatattgtaataataaaaatgcatttggccttttgtacatctttgactttaattttgtttaatttgcaaattgtaatgagatgatttgaagaattggttttagtgaatgaatgaataataagctgatgatcattgatcaccacaaatatctatatcatcaattacattagttaggctgtaacaagttgttgtgtagccaatttgactatatatatatatgggtgtgctcttaatggttattacccatgaatgagtatttaattatggaccattagatttaatcaaatggatgatatttatagttattaataattttttaaaattaatattttttgttgtcacctattacctgatgacatggca

SEQ ID NO: 298631 - DNA, 3253 bp, Cannabis indica
tcaaaaactactttttgttctcatttctaaaaacaattttttgaaaacaaaaaacagaaaacaataccaaacatgttctatatttttgcaaacttggactttagaaactataaaaatgaaaattctccctttttttagtatatattgaaaaatacaattatttacataagaaaaggaccatttttttttcatagtttatattttattcagtaaaaaactcaaatttatatctcaaaaatataattttttattttttatatttaccacttcatattaaaaaaaaagtatatgtcaaggctcctaattagcttggcccatacctgtatttatgtatgaatgtttcaaatttataaactttatgtttttaaatttggtgaattttattttcttatttaaataaataaattatattaataaatattaaaatagaaattagattaaagattttataatgtaagttttctttctcccattaaaaaatgttcggtttaaagctatggtaatttgcttgtattgtcaattctaacaaacttgtaatgactttgtaatgaccttaggatgtaatttatgatctaatgaacactttatattaaaaaaaaaagaagaaaagaaaagatgttttcacttttttaaacacataaaattactttaaaaataatatggggtatttggccaaattctttaaaataattttttgaaaactgaattaaataaataaaaaattagaaaatatcaaaaaattttgaagaatacaccactactctgatattctcttttccaacaacagtacacgactcttcttgtcactgtcaacattactatgcaccgtacgacaatctgtttttaataattgggcctcacctaccaagtccaattagggggtaacaaaatgtatcatcgtgtcgtgttcgcattatattttatgtggctcacttttctattttgtgtcaggcgtgttgatctgtttttgacttgcgtctaattttctcaaccctaaacgtgtcgtgttcgtgttgacctgttttgctattactgaagcagaagttgtagaaaaataatagatttaagttccattagaaaactcatatacatttatatttatagttttttttttatatgtataataaaaattaaaattttaaaatattttcagtttctttttaaagataattaaatttaaaatttttgacttaagattaaatcatatattttttttacataattatattattaataataatttattatttaattttatttaaaaaattatgtcaaatgtgtcaaattcgtgttaagcgggtcatgtcgtgtttgacctattttatttcgtgtcaagtcttgtcgatctgtttttgaccaacgtctaattttttcgatcataaattgtaaaattcgtgttgtgtttgtgtgctctgtcgaaatcttttttcccacccctaagtccaatagcttaaaatgtaatattaaacaatgtattttactccactagtgagaattgtaatactaaatttagtacaagatagattcgtctgactcattaagcataactaccaataaatatgacattataccctccattattcacaacctaaaaaggtacacactaaaacggtaaaaactcaattgcaaagcttattaaactgcctcgtgaactgagacttattaacgtctcaaccacgttaaatggtgtgtcaatttctgtaaattttattttctataactcattatttaaaaatatttagtttccaaaaaattcgataaataatttcagtcctctttcatgcaaaaattgagatttattttgttacaaacccaagtataaacccattttttaaataaaagataaagagttttgacaacaaaatataaggagttaagtttaaaaaatttaaatatttgtttagtattatattatccttgattgaaaaacaacatattttatgtttactcaaaattataaataatgaataaacccatatattaacattaggaatgagattcaaataagagatctcctttatatgagtaaaaatgtacttagtgtggttgaaaatatgttgtataaagaaaaaaatgttacaatttttgttattaatgtatttaatttaactatttgagcatgaatttgttgagacataataacatcatgggatgatcataatggtattattaaccataaattctttaatcctaatatatttgtttgagagtagagaaaacaattatgatgagtgatgagtcatcaactacaaattaaattccatgtctataaaagaaagtttgagcatgtgatgatctctacttcattatggctaatggtccaaatttgattacacataaacatgagaagagcttttcacaatttaattgtataaacctctcccacttctacctctgaaaaatatcatattttctttttgggtgtctaagttagaccaatccactcacttaaatgaaaaagttggcaacatggcaatactaaaaaagtgtgctccttagaatttttttgttgtgcattttaatgaaacttattgttttgtttgtattaaaaccaacttagttaattaatataccattttagtactttatacatgttaattccacttaaaagtttactttttttatttatttattattattaattatagtaatcccatatttttttattagtatcattttttttattattaataaatgtattttaaatgaattttttacagctaaatactttcaattattattctacttacacttaattttctaaattcaaattagtaatttaaggtgttatgtattttctatagttaactaccaatgtagattgtttgtgtgtacacttttatacatctttgtgtgacatttatattgatacacataatattattatttgaaaaataaaaaaattcaaaatttataatatttttttaaaaatatttttatttttttttataattttatttaatttcaaaatgaatttttaataataatattaggtatatcaatataaacgtgtcatgtgtacaagaatgtatgtgtaagtagtctatagtgacacttaatcggatgacaccttaactttattaccagttcagtaatttacaaaattttactactaaaatttatatttaaagaattaaatgcaagtaaaacaacagtaaaaatggtttagctgccttaagttgagaaataccctttttattaatcaattaatcaaatttacctctaattttatatttatttaaaacatacctct

SEQ ID NO: 298632 - DNA, 2106 bp, Cannabis indica
gattatattgaaatagatttgggcacaaaacccaacacattgtgttttgctttcaacacttatttgctgcctataggttccccgtttggtggtggcttcaccaatatccatgtttagtttttctttaattcatagatttcagtgttcatggaattattccaattatataggatcttaaaaagaagatgtaacagtcctgggctcacaaacaacaagaaagcttttgtttcctgatacatgcttttagcctagtggttataggatgagtagacacaacaactataggaggcagatgaatattagcatgggcattagaagaggaagtagtggtaactcttgggagaagagtaattgtttgatagtctccaataggtacattggcaacaaaagtgtcattatctcaacagaattaggtgttagggactaaggatgtggagaaggagtggggaaactagtggagatggaggaggtggtggagctagtggcactgtgttctagggagctagtggtggtggattgcaaacattgagaagagatgataagggaggaacactagaagtgggagagtggaagtgaatagtattagatggaaaggaggtagaggctagagcatagggaaaatggacctcatcaaacacaacatcctgagatatatagagtctatgatctttagacaagcacttataccccttatgtgacatctaatagcctaggaaaatacaaggtgttgacctgtatagaagtttgttcctattataaggtctcaaattaggataacaaaaatggccaaagacctttagcatgtgacaattagagggtatgaagtaaaaattataagtgtttggcattttgtaggataggagtaggtatcatgttaataaggtacactatttttctaaatgcttcatcccaaaattctaatagacaagatgcttgagctaagagagttaagcctgtctcaacaatatatttatgttttctctctaccaccccattttgttcatatgtatggggacgagctagcttatgaactattcctgatgtttcaagtaaatgaatgaaagctctgaactcaccaccctaatcaaactataagtcttgatggaacaccctaactgtaattcaactcgtgctttaaacttagtgaatttaggtaaatcgtcatctctagttcttaacatatagatctaggtatacctagaataggcgtctacaaagcttatatagtatctatacccattagataaattaataggagcagagcccataagtctgaatgtaatagttccaggggtgaagtataattggtagtagaattaggaaacaacaatttatgatattgtccaagacatcatgtagtgcaaacataaaaaaaaatctttatttgagattgaaatattacaattggagagagccatttttacaactttggccatatgatggctaagcatattatgccatagagaaaaaatggaatttgttacaggcaattgattatgaagaagtgaagattctgagacgacaaactcaatgtagaagctggtggaacaaaagctggactgggagacaaatggatgagatgggttgaatcaaacttgtacaagcctttgtcaagcttcccaaccgataaaatcttcttggttacctgatccttgagacaacagaagaaaggatgaaactcaaagaagaaattgttatcttggaaaaattgggagacactcaataggtttttagtgataaaggaaacatgtaataggtttttaagagtgagttttttagattgaaaaggtggaagaaatgaagagttactgatattttcaatgaaaagccttgtgccattcctacaaagatctattcttggcctgagtaagagttgctagcatcaagatctgagctattaggcgtgagatggtgagtagccctagagtcaagataccaactttcatcagagaccgattcaagagaggcttaacaagcttgcatttcatccatatttgtagttagcagtaggggtattcataaaatagtcaattcaatccgcacgatccaatccaatctaatatgcaaagtgtggatatctgcacttgtacggattggattggattg

SEQ ID NO: 298633 - DNA, 3894 bp, Cannabis indica
aaggatgcctggatcccgggatacgggaaactaccctaccttcaaactccaaacatccttgacaggaccgtgtccagccttataacaaccaacggagaatgggatatatccctgattcaatctatattcccaagaaatgtttgctaagctatacaatccatcccaatccttcgctcacctgcccaagatcgactctattggtctcacactccacatggaacctacacagtaaattctggttaccatcatgcatatgacattctccaccaattttagccttcaccctccattacaactaaccaagaaaagtggtagaagttgatctggaatatgaagatacctttgaaaatcaaacattttatctaaagagtataccatgatgctctgcccactagtgtgaacttttaccaccgccaaatagtgagatccccactgtgttgccgatgccatagccacgaagaaacctgaggcacatgctttgtttggctgttcaatcgtccagaaggtttggaaattaacaatcattcatgaaaatattagtaaactaaaatacttgctttgtaatgatactttatatgtctgtactgattaaagacttttagttttttgtatgtatactctagaaaatttggcattgcatgaatgaattactacataacaagctagttcaagacgcccctctgaccatccaatggacaaaagattatttgctccaatatcaacaacataatgcagcgaaaacaccacacaagattcaagacgctagaagtccttcattccattggcaaccagcacctccaggccagcttaagctcaatgttgacgccgctcaaaatattcaaaaaaacatgttgggctttggcttgatagttcaaaatcataccacaaatgtcgttgtagccttagctattccttggagaggtgttcaccaaccagttatgatggaagcatattctcttcaactcgctctcgaatggtgtcaaaagaactcacttatgattcaccaaataaaatctgattgtccaattctagtagatgttgtacttaaaggttactccaataacattcatctgcaagaattcattatcaacattaatagcttgccgtcttcatttcctcaagcttcgattagctatatccctcaagaggctaattatgccgctcatagtctagctaagtaagctctaggcttagaacaggaggctattctctgatttgagcaactgtattctctttcttgtatcttgtattttctgagttttttcttaatggacagtttcccttcaatatatatatatatataactgtacatgtttagctaaacatgctctaataatagttcagtattttacctcaacatcaacaacaacaacaacaacaataacaataacaataacaataataataataataataataataataacgggagcattttttttgataaatcacaccaaaactttaacattgaggagcactaccaaaactttatatatattatatatttttttaaaagaacacttgaatattatttgttttttctatttaaaaaaattgtaaattctccaatttcttttaatttttaacacattatttgatatattttaacaattttcataaatttttacatataattcgatataattatatatgatcttaatattgtcgaattattcttgacaactattggttcaaccttgctagacgttcttgtgtggatttgaaaattacctttggatgctggcaggctgagcttgatgtagacgatgccgtgtatgctcagagtggccaactgaattttggagtgattgtgagagacgagtggggacaatatgttcggtgttcactgctcaaaagatgtgttgccaaaatcccgtaacggctaaactaatgatcctattcatgtcttgagagctactgtttgaacgccattttggctatcctgctgtggcacgattgttttgcagatgacattattgatgagaatacctacagttttatttatttttgtcagtttgttccaaataaggcaaaacttaatctgcgaatgatatttctcgtttaacctttagctggtgtttagttgggaggaatgaaaatatgagaatagaaatgagaatgagaataagaataggaatagaataaaatttaaagtgtataaaaaaattgataaaagaattattaaattttttcttatcatgcattggaatggtctttccttctatttcaaaatggtgaaaaagtcattctattagaatgacattctaatatttttatatgcaaccaaataaagaaatagaatgaaaattgtttcttttctattccattctatttcattacctccaaccaaacgccacctttaatgtaatttatggttgtatgtctcaagaatgaggacattttgagaaaagaaatcttatgttgttgttggcatgttttcttttgaaccaaactttttctatcctatagtaccagtctaccggatttataatgtttagaatcttaatactaaaatactcattattttgaaattaaaatttcatatattttcatacaacaaatcatattctacatttctccatcacaatttgtataagtttgtgtatgcattgtgtatgcacatatcattactctaataatatattgtattaagtaacttaacaatatcactgggcaattctcttaaatttttgttcatttatacattttctctaacattgtccttattttaattcaatattaaataatatcaattcagttagtcctataattttaaagcattgttattaaatattagtattgtacaatatcttttataagtgacaccataacaaaaaagtgttagggcccaataatatatttattagccttttttataatattaatatttaataatatccaattcccataatcgagatccaagtcaggctgtttccagatcaagccgcgatatgtatcatgtgtcttcagatttcattaaataaatatttcataaactcaaaaccaacttcccactacattattgactttcgtttagcggttgaagaaatactttctttttcttttgaagaagggaaaagaagtactaaaaaactctagttttcagctaacacttaaataaaacaatcctcattaaattatagtattatttaactttgcctaaattcagagtaggaaaggaggggcaaaaacaaaccccaatcatttactcattttccttttcccagaaatcatttttacttttctaattcgaatttcaaagtaaatttgttttattaacttaatcaacgctaattgacaaacatcactttctaactctatttttctttaccggaaagtaccttaagatctgatccatcctcatttctcatttatataaaatattgctggaaagagagaaacggccatgtagtgcaaaatataatattaaaattatcccatatgaacaacttttcagtacaagaagttcgaagcaaatttgtttctattattattattattattacatatttcaaacaaacagaaccatgaaaataaagtaccgattatacatataataaattaagaatttctgacaattagtttttaaataacttactgtgcttcgaacaaattttatagcacaataaattatttaacatataaatatatttaaatataggggtcttatgtaaaacctcacctcaaagtgaggtttgagatccctcaaataagacaaagataaaataattgtaggctaacttgattgactttcaataaccggttttacaaccggatggtacaaatattgatgtgagaataattatattttgattagtttttcttttttgaaataaaaatataatattttaaggggtaattttgtaatttgattttattggtgagatgtattta

SEQ ID NO: 298634 - DNA, 505 bp, Cannabis indica
ttttttgaaaactaagtatttagagagaataaaggaaatagcaagtagtaaataatatgaatagaagattttatgtggttcaggcgttaatgatccttactccacgagtttatattattggactctttgggcgaatagtgtaagattacaatgtattacagtaggaaggccttgtgtagaaagagttacatctaggtatttttgtaggataacagaaaatgaaaagtcccccacttcatcataagaatgaggatatatgtaaacacacatggggtaaagggcatgtcctttacctacctaaggtttcgtcctccacgcgctaccaaggctggtactggaaaaaggacgatcttaccatccactggggggaagcttcttcattgtgcggtgtagagtgattgatgagagcctttatacgaccttggacacgtgttgtgcaaaggtctctctgttgggttttatgccctaaataaaactcattgcaatataatcagattttcttatt

SEQ ID NO: 298635 - DNA, 5933 bp, Cannabis indica
tatgtatatattttgtatttggtgatttttgtgaccaaatcatgaactttaaagttatcgtattcttcatcatgtaggctgacaaaactcaagggaataatggggctgagagcaagcaaaccagtggtatggtgaagtttcatcacatatattatcttgcattggaaatatttttattattggaaatttcttggccaagaaatgtattcattttggaaggcattattagcgtaagctaggaattatgttaattgtgcttctggttcttgttgtttggaaactgttcgaaccgtatggatttatttcatgctgactgattgtttgctcaatcatttgggtggcagatattgataggagagtccttgctcaggtcacttcttcaacagattgggaggcaaacgagacttcttcaaatttctctgacaatacggtgcctcctatgaattttattgggtatgttggatcctcatgcgagaaaacaggaaatatgtccgattgtgttgcttctgtgggagcagggacgtcttctaatggcatgactatggtatgtaaaaattgacaatttagctcttttgctgacttattttgaaatatgatgaccaacgtaaagatttgaaccattagtacttgtctgcttgtttaaaatgatgctatcggattaatgaaagaggtttggaatttcttcagatttttagaggcttgctttgctgaaaaagagccaaccttaagaccctacagggtagttattctgaaacattgttttgagtagttggtgactttgagctgagcttgatttataagaacacttgaaagattagaagtgatctttagatatttacgttatgttatgcatctcgatgttaatttcatcaggatgaaaggcttttgaaacgtgagagaaggaaacaggctaatagagaatccgcaaggaggtctaggatgaggaaacaggctgagtacgaggaactcgtgagaaggtgggactccttgaatatggagaataatgcccttaagtccgaattaggacaactcaaaggcgattcagaaaaattgaggcttgaaaatgctgcactaatggtacttcttctaacttcctcattatactattctccattttgccaatatccaagcattattattattatcacatacttctccatagtttggccaaccaagcaagctgtattgatcgagttactcctttgttaacccgagtttgaattcacaggcgaagctgggatgtgcagcggtggatcagcaaggagacacagtttcagataaggccgaaactaattcggccttactgaatagtagtactgagaaagtagttgaaatttctaatgattctaataggaatgagaactcagataatcctgaagccaagcttcatcagttgttaaatccgagcacaaggactgatgcagtttctgctagatgatcaataacagcagctactagattaggtgagctagattctagaagagagaacaacaaagctataaaaaaatggcataatttggtttttctttgtccattgtgtgaggatttattattgtactggtcactatggcaacacattaggatagttgtaagtgtatcatcattaccttatgattatgaacattagctctggttcagaacattacagatttagaaggaaatttatttgtattgatgattgtactcgagggatatcgttatattatgaaatatgggatctgaatcaattctcaagttatggaattagggaatgggaataaagaatgtgatttattatcttgtttacttctctaattttgttaaagaatgagaatgaaatatgtgagtcctatttattatcttagtcattctgattacgtgtaagtaaacatgccactatttagtcattttgattgggtgaatccaatttctattcaattcaaattttggtcatttcgattacgtgtaagtaaacacactattattgtagggatatcacttttgtcttcattagtatgttttatttttaatgttacgaaaaataataattaaaattttcaaaaaatttaccgtctcgaaaataatattcaaacattcatgcaaaaagatacaagcactcgcgtaactgaatctttgaattctgttatcaaaaaaatttaaaaaatagataggatcagtcatataaacaattataataacaaaagtgttttccttctatagttttatcctctatatataaaagcttataaactaggacatgtttgtttgtagtggaactaaactatgattgtatagaatgcagttgaaaatgtggaactatatttgatgtcattgctgatagttttagactatgttgtctaatatgcttacaccgtccaataacttcaatttttgactgtgtttgttttgttttgtattgttatttttttttttctagaaaagaagaaaagagaaagaaagaaagtcataagacaagtcctacaattaaattcatgcatctaagggttgcaaatgtttgtcctttcgttccccaacaacctaaaatatattcaaaatgggttctcactactcctaagaataacattattattgattcaatattttcaactcatttgactttgtttcctttcttgaatatctcatctcactttctcttatattgttaatatgactatttaagatttttgcatgatttatgcacctcttgaattttttagtccgttaaaaataatctctaaattatgaaaagtgagtgtaaataaaataataatatggttacttaaccagttttgtaagtttttttatttttttaatattaaattattttgtttgccacatgtgataaaatttgacaaaataactaatttacaatactataaataattcatcgaccatttataacctactaaaaaatttaaagacaataatatatatattatagtttgggggtcaaaaattagcctattattattattgaagaattttaatcaaaacatatttttaatcaacaaaattaagggatagacagacagttaattctgttagtctacgtaccttaatcaatgaaattccaattttaccctccaaccagtaaactctgcatatgggcatttctgtactttcactctcttctcttccttccttaaccgttttctggaaattcgttcctttttttcccaatccaaacaaaaatggtatttttcttcagattttgtagcgtaagacatttttaacaaaaaaaaaaagaaaaagaaaaagaatttgattaattaaaatgaaagaaagagcaaagaagttagttagttagttaaaaattggtacagttggatttctggtttactcttcacgagaatttcgggagagtttatcacctgattcagtcatctccttccactttttcccaactgatttatatatacacatatatatatatgtatatatatatacagagagagaaagttgcaattttgatctttaaaaataataaaaaatgcacggtagcagtggtggtggtggtagtggtaattcctcatcttcttcttcaccaagaacttattcagtggatcttgtgaaagatcgaaatggaatcgaacaagttcttctcaagaatcctcgaggggcttctgttcgtgtaagccattaatcatttttgtttttaataaattcaaattagtcataacattaatgcaaagaaattttcataggtgagtttgcatgggggtcaagttcgttcgtggatgaatgagcgtggacatgaaatgttgttcactagtagtaaggtaattaattgaaagaaatttgatcttgttttgaattgaatcttttatagaaacaggggaaaatttcagcttagataatttatgttctgaaactatttgatgtatgttcttaatggcattgaagaattgatttcaactattgtatttgaaggcaatctttaagcccccaaaaccggttagaggaggaatcccaatttgctttccacaggtatataatatatgtttatgtatatatataatgtatgtattgtagatgattattgtttaaaacaaaatgaacttaactcatgtttatatatataaatgtatgaatagtttggaagtagtggaacattggaacaacatggatttgtgaggaacaagatttggtcaattgataatgatccaccacctttacctcctaaagattcaattggtaaaacattcattgatttggttttcaaacccactgctgatgacatgaaaatctggcctcaccggtaactacataaccatcatcatcatcataatcataatcataatcattaatcttgtgattttgaacttattaatctttttttctagtttcgagattcgattgagggtgtgtttgggttcagaagggaatctaatcttgatacctcgagtcagaaatcttgatacaaagccattcagcttctcatttgcctttcatacatattttgccatttcagatatcaagtatggcaaaacaaaaaaaaaagcttcattactaatccattattgttatgttgtcttattattaatctttctttcatttatttctaacagtgaaatcagaatagaaggacttgagacactttattatcttgacaatttaaaagaaagagagtgtttcactgagcaatatactgccataacatttgaatctgaggtaaaaattatttttacataaaattcattaattgttcaatatcaaaacattgttaatttgttttttctttaggtggatagaatttatgttcgtgctgaaaatgttgtagctatccttgatcatgagagaaaaaagtctttcatcataagaagagagggtcttcctgatgttggtaaattttttgtttctataaatgaatagaaaattcatttgaccccatttcatatcaataagtgttgaaccattttgttgggtgtatatatgtagttgtatggaatccatgggcaacaaaagcaaaagccatagcagattttggagatgatgagtacaagagaatggtttgtgtggatggtgcagctgttgaaagaccaatcactttgaagccttgtcaagaatggactggaaggttggaactcacaagagttaattcatgtttagatgacttatcattattaagatgatgatgatgatgatgattataataacaaaattgattcatgtttaggtaattgcttgctgaccccttttactagtttttcatattgaagtggagattatgcctttttttgttgttgtaattctctccattatcagtatatatgaaaaactaagtatttaatttcaactgtaaatacatccaatttgttaataataaacattgcttgagtaagcatcaattgaataatagttcatcatatgtttgacttcatattaacattatgtttggtgagaaggaaatgtgcaaggatagaaagaaagaaaatgagagtgaaaggaaagattgagggaaatgctatcccttcaatttttaaatcctcaaaaatcaatcctttcaaagagtgaaggattttattggttgcaagggatcacgtcggcaaggtgatctgggtttctacaaaaagactggatttttctaatgctctctgtggggaagcgggggcttgctgtttggctatagaggaggctaaagctcgtggtattgagttccttattgtggagagtgactcgagggtggtgatcaaccttctcaatgggaaggagttctgttgggagcttgataactatgtctctttttgtaaaaatacctccacctcttttattggttgtacttttcaatttgttcgtagacagtgtaattttatggcccataatgtggctaactgggcattttcccatcagaggtttggctctgtgccaatttcctctatgcctgatattatattttgtaatgaccgcaaggtctaacagtttctaatctaatataagtacgcttttcttcaaaa

SEQ ID NO: 298636 - DNA, 2473 bp, Cannabis indica
ctaagcggtctttacacatggtctgaccaaaccttttgttagagctgaagtggaagtggcgctgcaacaaatgggaccggataaaagttcgagaattgatagaatatctgcagcatctattagcaaaatgggaatattgtcactgatttagtcaccaaggcagtgttgggagttctcaatgatggcactgtaccccacaggtttgaatggaaccatcatcacactcattctaaaaattaaaaagcctcaaaccattgaaagactattagaccattttacccttctaattatactattgactacattgtactatccattcaattgaacaatgtagaacaattaatctataacttatgatagatttggatccaactagttagcactacccataattaacattataagagaactaatattcaaactgctaggaaatattggatttcactattgtatagcatgttccaagccactcttgttattaagttcccaaaacagaagttataataattatcttctttgagaaaatttaacgagtgaatcaaagaactcaatggacaaatatagaagttcatgtatactcacgattcaagttgatccattaatgatcatcgttgtgatatgaataactctttcatggtaaatgacatgctaatgaaagatgtttattacatatcggtctagttatgcataatctaattttgcacaatacattttactatatgtctatccacatatgtgatctaaatcaaaatcacatacacttgaagtatagtgtatagtaaatcgtacttagcaatttcatataaaaaattctcattactttaatatactactaacttgttttattcatatcatataatcttatttttcttacacgtccttacaagattatacatttcccatatgaataaggaattttcagatatttaataattatattattatgattattgtatcatttatcgtataattatatatattctctaatattatattcattaattactttcttttagggcataaaaacatcgtttagggtagggaatttcttttgaaaggtttatgatgaaatattagtgaagggagattagttcattgtgcacttgatctctggatacctggccatgattctttccttctgattcaatatttaggacctatggatggggttttggcaaacttgataatagatgatcgacaatggaatgttccactgctgcaacaatgattttcctagattgatatggatcgaatcctgatcttgcctttgcattttttttttgaaatgatgatacacttatttggcatcatcacacctcaggtgtttacacagtccaatcaggataccatttggccacttctattgaagaagctcatgaaagttcatgctccacctcaccctcttcttggtggaaatatttttggtctctaaagctaccacaaaagctaaaaaaattgcttggtgagtttttcatgacgctttaacagtggctacatctttagtcaggtaaaaaatcatcatcgactctacttgctcgatctgtaaacaagcttgggaatccattgaacatgcactctttggatgcaagtacgcacgatcagtatggggcattacacatctgagttttgattggagtaagtcgtccactatgcataagggtgattatttggtgcatctctcaacaatttacaccaaagaagagatagaaaaaattatttgtacgctttggtcaatttggtcagaacgaaatcgtattatccatgagaataaagccaagccaactccagttcttacttcttttgtggttacatatttgtagaattttagagctgtaaaaattaaataccacccgacggtttgtgcaaccccaaatctctcccaactgatcgttgttcaagaaccatggaaaccgccaactgaaggtgatttcaagttgaacgtggatgctgctctcaatgttagccaaaaattcataagcattggggctattatttgggacacacatgaccaggttattactgctttctcaaggccattaattggaaccttggcatctcatgaaacagaggctaaaactattttttcatagtctaaattaggtccttcagatgcaactgccaattgcacaagtggaaattgacgcatcgatggtttcaaatgctttgagagcacctttgtctgcaatttcttcatttaaggatttaattgtagatatttttagttttttttatccttttttcctccagtgaatgtagctcatgtcaaacgttctgccaatatgattgcacatggtttggctaaatttaccttaggggtggatgaagcttacttttggttagaggatatacccctacctatttactgtaatgaccgctttagtaatttaaattagtgaaggcaattagcactaatttctgttatttttataattgtttatgaatttaattatttgtggaccccaatattagaaat

SEQ ID NO: 298637 - DNA, 3730 bp, Cannabis indica
agaaaaataaataaagatcaaaagcttctacaataatatctgtaaaagaagataatatagatgaaacaaatgagggatgatttattacctcaagctcgtctgattcatctaatgagtcaacttcaaaacaccaaaaaaggctccctctcaattgatgaatatcttctcaagatgaagaatcttgtagatggattacgtgctgctggaaatccaattacatatgatcaactgatactgtatgttcttactagtttgggtccagaatatgaagctatggtagtcaatttgacctctcgtgaaaatctcactttgcaagaagttcaattcttgctgcaaaatcatgagataagaattgaatctcatgttgctgctctatccctttatctcaatggttcttctacaaacatggctcaattcaagaagccaccatttcccaattccaatcaacaaaatcaaaacatgaatcaaggaaatagaggctcaggcactaatctgaacaatcgagatagaggaagctcaagaggttgagtccccaatcaaggtaatcgtccaatctctcaactatgcaacggagttggacatatagttcaaagatgctacaaacaatttgaccgcaactacaatggcccaaatgataatctaagccctgcttcaaacccacgacaagcctatgttgcttttccctctacctgtaaggactcaaattggtacctggacagtagagcctcaaaccctgtcaatgtagacaacgataacttgcaacaacaagcatccacaagggcaaagaaaagttggttgtcgataatggctcttaacttttaattaaaaatattggatcttgttacttagcagctagtaaatctcttcatcctataaatatactccatgttccctctattaccacgaacctaataagtatttccaaattcaccaaagataattatctcattgttaagtttaactccgcctatttttatgtcaaggacaatcaaaccaagacccctcttcttcatggaacaattaaagaaagtatgtacccattgtccacaacaaagcacactccaaaccagtctccctgtcactcacctcgaagacagtcttttcaatctttttcatgtactaagaatagcaaagatactaagaatgtatcccttgtaaatctgtggcatcaaaaattgggccacccttctaaacttgttttgaataaagttctcaattctttacatttacctacagctgatccttgcttttgcaatgcatgtcatatgggaaattacatcaatttactttcctttcttcacaacacagaaccacataaccatttgaaattgtccatacagacccatgtggaccatcaccctatcccaccaatgagggattcaaatattacaatgtgttcatagatgctttaactaaatacacatggatctttcctctacaattaaaattagatacaacctatgttttccaatactttaataattatgtagaaagacagtttgggtttaagattaaaagcttacaagctgactgaggagggtaatatagaccattaaaacctattctagcacaactaggagttgtctttagacatccctacccacacactcactaacaacaaggaagagctgaaagaaaacacaaacatgtcattgagattggactcacactattagaacaagccaaaatgtcactaaaatactggtgggactattttgtttcagccacatacttgatcaatagactgcctgtccaaagaaagcttgtccaaagaaacaaatacatttccccctttgaaactctgtttagtaaaaaatctgactacactttcctcaagaactttggttgtgcttgttttcctttcctaagactctacaatagacacaagtttgatttcaaaacttttatgtgtgtgtttcttgggtacaatccatatcacaagggatatagatgcctacatccctttcgtagagtgtatattgctagaagtgtcacctttgatgaaacaaagttcccatacatgcatttattcctatctcatccaccaccagtaccaaatgcttcccaacttgcagccttgcccatccccatacttcctatgccattcactgctccctgtcaaacacaagtcacccatgttgttccctaaactatccataatgtccccaacttcaggtccacaggacctcttgttaatctttacagaaccactgcttgttcctcagaagtacctcaatatgcaacatgcaccaccattgtcactcaaaaccaaccaactagtactacacctgtctcgtctaccatacagaccaataatccaccaatacaaacacccaacatctccaatcactgaatgcaaagagatccaagtctggtatacacaaacaaaaaatactagctgctacattaacaggattgaatcaaccctaccttgagcctaggtttgtgaaaaaggccctagctgatccaaagtggaactcagccatgacaatagaattttatgctcttgttagaaacaatacttagatttttgttccagacattgatggcatccaggtggttcaaaacaagtggttgttcagaaccaaacttaacagtgatggctcagttgagagattaaaggctagacttgtagcaaagtggtttcaaaaaatagaaggggttgactactttgatacatttagcctagttgtcaagccatccactcttagaatcatgttcactcttgtcgttactaacaattgggatatacaggtagtggatgtaaacaatgctttcttgaatggggagctcaaagaatatgtgtacatgcaacaacccaaggggtttgaagactgtgaacaccatacacatgtatgcaagttacaaaaaactaaatatggacttaagcaagcctcgatggcctgttatgagaaactcaaatctgctcttctctcatggggatatgtcaactttgtatctgatttttatctgttcatctcaaacaacaaaggtcatcctctgctggttcttgtatatgtcaatgacatactaattactggacatgatccagcagccatacaataagtcatatcagccctagacaacaaatttgccttaaagactttaggttttgtaagctacttttgaggtttccaagcacacaaaactggctccaaactgtattcaaatcagaataagcatgctcaagacatcctaaagaaagctaacatggaatactcttaaacttgtagtacaccaatgtgccctgtcaacaagctatttaccaacacagatgacttgtgtcatgatcctaaaatgtacagaagcatcataggctcccttccatatctcaccttaaccaagcctgacctatcctttgccatcaacaggctaagttagtatatccaaaaccccaccaacacacactggatgcctacaaaagggtgctgaggtacatcaaaggcaccactaatcttggtcttatctttaaacctgctatctctatgaccattgaagcctattaagatgtagattgggcctccaatttggatgacaagaagtctaccacaaggttcagtgtcatgctaggagagaatctcatcacgtggggttcaaggaaacaaactgctattgccagatcaagtacagaatctgaatacagggccctctctacaactgccactgaagttgtttggattgttgggttttgtgccttaaataaaacccattacaatgtgattagttatca

SEQ ID NO: 298638 - DNA, 5888 bp, Cannabis indica
aaatacggattggatcagatgaaaagcccttcaaataatcaataatcatagtacaacaacaaggcatcacgaaaatccaattactgaattgagttagattgatttggatgttggcttggacctatttagaaagaaccaaaattctaggcttgatatatgaaaaatcaaataaaaaaatgatttcaagaatcttctaagtaaaaaaggaaaaaaaaacaattaaaaaaaacaaattgacgtgtaataaattcattaaataataagaaaccatctttcaaaatggtgtcgtggtgtagttggttatcacgtcagtctaacacactgaaggtctccggttcgaacccgggcgacgccatttttcttttttatttttgctcactttctaatctgttacggtggtcgtcctactacttgattatagtttcagactttactgagaaatgcgaagcgaagtgaatctcatatgtaactaactagcaaagtcaatttactcatcatattctgctcaatcttcgactcacaacacttctctgtatttttcttaatctctttcccgggaaagtgacggaaagtaagcatggagccccaaagaaggccaaaattttcgagaaccaagcagaaggctgatctggaaggagttctccgaaagtcttggtaccatttgaggctgtcggtgaggcatccctccagggttcccacctgggatgctatcgttcttacagcagctagccccgagcaagctcagctctatgagtggcagctcaagcgtgccaagcgaatgggccgcattgcagcctccacggttactattgccgtccccgatccgcttggccagaggattggctccggtgccgctactcttaacgctgttcacgcactcgctaggcattatcagaagttgggtcttggctccgattcagaggtatcactacaatttgctacttactcgattttgttggaatgttgaaatatatgagtgttttaattgatagctgcattgatgtgattacaaatggagatttttgatagtgacatggttcaagtgacatggatggtggatttattttctattttcaagtgtttactttcgatattatatttttgtctgattcatcatttgttgagagaagagaactccatatctcccatttcataaaattttttacatgctgagtttgatttgctatttaacgaccaacaaatggaagtgaccaaaaatggcgtttctgcttcattttgtgcggcaggagagttccaaagatgaagtatttcacccatcaatggttagctttattgcaaaaaggcatgtgcttttgcttcacgctggaggtgactctaaaagagtcccgtgggcaaaccctatgggaaaagtgttcctgccacttccctatctagctgcagatgaccctgatgggccagttcctctgcttttagaacacatacttgcaattgcttcttgtgcaagacaagcttttaaaaatgaaggttatttgttccttcattcacactattgaaacttagcattgtgtttactttcttaattgctagttgagtgatttcatatgcgttaaaattcttaatctgagtttataatattgagatatagtgggaaaagtcaacaaatcggttaactaaatttgtgacaatgtgacagatctttgatcgagaatagtaatatatattataaatatatactaatgctttgacttgtcttgtactcgtttcactactttgtgccgtttatgaaattattttaggagctgtatttaagatgactactcatgatggcatagtcaccgtgatgctttaatgaaaaaatattcttcatttttaggtggaatatttatcatgactggagatgttctcccatgttttgatgcctccaccctgattcttccggaggacacatcctgtatcatcaccgttccaatcaccctggatattgcttctaaccatggtgttgttgtggcgtctaagagtgcaagtgtggaaaatagttatatgatcagcccagttgataatctcttacaaaaaccaagtttagaggaacttgtcaataatagcgcaatcttagatgatggtagaacacttcttgatactggagtaatagcagttagaggtaaagggtggttggagcttgttaagcttgcactgtcatgccagtcgttgattgaagagttgctgaagagcagaaaagaggtagattgccagttctggtttgaaatgtttttaaaattccttctcttcaaggccatctttaatttgcctaccatcattgagaaatggaactgtggagcttgaatcttattagtttaagtatttcatgggaaaaactaagagaaaagaaatgaaacgaaaagaaagtcacccgttaatgtagtttatcattatggctctatataagtgttttctcatcttcattattgtcttctatcctcaatcttctggtttttcttaaatttgtgtatagttataaactaattatatattaatatggatggattttatatcctttttccagtgaatatccttcgtaggcttctggtgtctgatttttcaaaacttcaatgacagcttaaatatctgcagtgacatttgtattttctgtagatgagtttgtatgaagatatggtagcagcttgggtacctgcaaaacatgagtggttgcaaccacgccctttgggtgaagaactggtcaacagattaggaaaacaacaaatgttcagctactgtgcttgtatgtgaaacattttgcaacttgttagcaacacaaattttgtttacattgttgttatcatatccaatttcttatatttattaatacatggacaaaatattcctctatttcactgcagacgatctgttgtttttacattatggaacctctagtgaagttttagatcacttaagtgggagtggttcaggactggtaggccgaagacacttatgttctatcccagcaaccaacgtatctgacattgcagcttctgctgttgttctttctagcaaaattgcacctggtgtctcaattggggaggactctcttgtttatgattcatccatttcaagtggaatacaaattggttctctgtccatagttgtcagtattaatgtcccaaaagtgaatgagacaactgaaaattcgtatcggttcatgcttcctgatcgccattgcctttgggaagttcccctattaggatgcactgaaagagtcatagtgtattgtggcctacatgataacccaaaagaatcaatatccaagggtggaacattctgcgggaaaccctggaacaaggtcttgcatgatttacaaattgaagaaagtgacctatggagctcaagtggcatcttggaaaagtgcttatggaatgcaaaaatattccctgtttgctcatattttgagatgcttgatctggcttcgtggttgatgggcttgagtgagaaaagcaatgaacattttcttgtattatggagaagttatcctcgtgttagtttggaggaattgcataaatcaattgattttccaaaaatgtgtctaggctccagtaatcatcaagcagagcttgcagctggtattgctaaagcttgtatcaactatggcatgcttggtcgcaacttgtctcaattgtgtgaagaaattcttcagaaagaagtttcaggagtggaaatatgcaaggacttcttagacttgtgtcctaagcttctggagcagaatactaagatacttccaaaaagccgagcataccaggtgcaggttgatcttcttcgtgcatgcagcgatgaatcaacggcatctaagttggagcacaaagtttgggattctgtcattgatgaaacagcgtcagcagtaagatatggttttaaaggtagattaattgttcatgaatttcatcttctgtcagcataatttaataaaaggtaataatgaaaagatatattatcttaatccaaaccaaatgaaaaaattatgcttgcttatgttatctatctagttaatccttacattcttttaatttatttagctactattattatgatgcgttttctggtgttatcttaggccttccttggcaatcttttaccttttttgtagatcatctattggaggcccccagtagcaactcttctcttgcattatgtgataataatggtaatgaggggagtcagtctttccacccaagaagtgtgaaggttgaactaccagttcgagttgattttgttgggggttggagtgatactcctccatggagtttggagcgtgctggctgtgtcctaaatatggcaataagtcttgaaggttctctaccaattggtgtcatcatagagactacaaaagtaactggtgtctttatcagtgatgatgctggaaatggattgcttattgaagatcttacctcaattactaccccattcagcatcaacgatcctttccgactggtcaaatcagcattgcttgtgactggtattatccatgaaagttgtcttgtatccacgggcttgcgaatcaggacatgggcaaatgtacctcgtggcagtggtttgggaacatctagcatcttagcagctgctgttattaaaggacttatccaaataactgatggagatgcaagtaatgaaaacgttgcaagacttgttttggtattagagcagcttatgggaacaggtggtggatggcaagaccaaattggaggtttataccctggtattaagtttactgcgagttttcctggagttcctctgcgtctacaagtcattcctctcttggcttccactgagttaattgtagaattgcagcaaagattactagttgtgttcactggtcaagtaagtgtggcaccataattgttttccacattgtaaacataattcttaaaaactttcccaaatttatactcgtaatgttatggaactcgtcaatttctaatgtgtgaacttcacaggttcgccttgcacatcaagtccttcaaaaggtagtaatccggtaccttcgccgagataaccttctggtatctagcattaagcgccttgttgaacttgcaaagattggaagggaagctctgatgaactgtgatttagatgaccttggggagataatgctagaggcttggaggttgcatcaggaacttgatccttactgcagtaatgaatttgttgatagactctttgaattcgctcacccatattgctgtggctataagctggtcggtgctggtggtggaggctttgccttgttacttgcaaaggatgctgagaatgcaacagaactcaaacgtttactagaacaagattcaaaatttgatgtcaaagtctaccaatggaatatcttcttagcttaattggtttgtgtagatgtccaaagaagggattattattctttaaatttattcttatacattcttcacaataatttactattgtacttaatgtgtcttaaaacccccattactgtaagtgatcaaaggatacttgagtgtacaaatttgtaacatatatatgataccagagagagcacaaaacgatccttaatatcgaaagtctcaaattgagactcattctcatgtttgattgcattatttcaatgtttagagaattgtactcatagttgagcctttgttgattagtggcacccagcagacaataatttttgtataattggctttttctttttggttaaaagattaaaaaagcctaacgtgtaaatggggcgaggaatccaaaacttcttatattctttttctctttagcacgccgtcactttcagaagcaatacgagagaaaatacgaccattatgcattggtgttcaattatttgctgtagataaataaaaaagtaaaattaaatgttgtagccgttatacaccatattacatctatctctactctatctc

SEQ ID NO: 298639 - DNA, 5800 bp, Cannabis indica
ttcatgtctctcactcttttctttccctacaaaaaagaaaaaaaaaaaaagtctttccttgagtctcagactcagaaactcagcctctacttctctaactctttcatacccagaaattcttttagcaaatatcaataaaaaaaaaacctctctctgtgtgtctttctttgacctcttctaatggctagcaagttagcctttactttaacttcaccaaggcgcccttttacaactattattcaaagaccctttgctccactctcttcgtctagcaccaccaaagttcaatcttttcacttcactggacgacagctttgccttcgtcgtaggctctcagtgattccctccaaggccactgctgaccaagaaggtttgatttgatttgatcagatcatgtggtgtttgagtttggttttcagttttccttttgagttttcataaattttcaattatgcgatgcctgcatttctcttctagtggattggtggtttaaaaacacttggcttcatattctattgggttatgtgactatttttgcaatgaaaaccacttaattagctgcaaagattgccggttttgaactgtgatagacacagttatttgaaactcacttaactctcttaaattctcaatgttagattaggaaattttggcatttagtttagtgtgtcagaaaatcagaccatgtttattaatacatagatgccacatactccaacagtgcttgatttgaaagaacaatagtgcttgattaaaagcctttaaacccccaaaatctaccttttttttagcatgatggtgtctagttatggttaagtagctatgaaaaatacttgtaatgacaccgattaataatcttgttccaggcaaggttgaagaagatggggttgttgatagcaagatcctgccttattgtagcatagacaagaaagagaagaagtctctgggagaacttgaacaagactttcttctagctttacaagtaaaatttcaatgttaaaatactttaaatattccttttacttaaagatttgataccattaatatatattttttctcttcttctctacagtcattctattatgagggaaaagcaataatgtcaaatgaagaatttgataatcttaaagaagaactaatgtgggaaggcagcagtgttgttatgctaagtatgataaacaaaagccctctttttttcttcatatatctttaacattgaataaaagtttgttcaacactcaaactttttgctactgatttttcatcaggtggtgatgagcagaggtttttggaggcttcaatggcttatgtatccggaaatccaattatgaacgatgaagactatgataaactgaaattaagactaaaggttattaagatgtgttataacacaattttgtagattttatttacatgtgttttctagctatatgcataaacaactttacttactgttttacatgctttgcagagtcaagggagtgacattgtagttgaaggccctcgttgcagtctccgtagtaaaaaggtaagtgtagtgttgctctatgttctaactttcacttcaagttggttccaaatataatccaaacaccagacagtttagctactagtaatagtaaagtactcatgaattttcattttttttttttttataatcttttgtaggtttacagtgatctttctgtggactatctcaagatgttcttattgaatgttccagcaactgttattgctctaggattgtaagtaacacttcttttcctaaattacattattcatataatatagaaaccaacctctgtaatgttctgctcttggatcatcacaaactcacctaaaacactaaaatggtcatattttcatactattttactatttcatttccaacttattgggcacaaagaattggttttataattgaaacaaagaatttgttagagacgactttaaacttttttttatatatattttaggaataccaagtgaagtttcagatgctagagtttatagttagttatgccgttgtttcttttcttttcttgaatgaacagtacagattattaaattttcattaggtgattcactccttactaagttgatggttaaatcacaggttttttttcctggatgatgtaactgggtttgaaattacttatcttctggaggtacatatctaaaactcaccactttcctccatgtttcaagctacaaattcttgataatactttgtcttgatgtactttaaattaaatttcatagctaaactttgagtaaagtgatgttgattctgcagctgccagagccatacagtttcattttcacatggtttgctgctgtaccactcatagtatggctagctcaaacgctgacgaatgcgattgtgaaggactttttgatcttaaaggttagaatatacctctgcttttcactttcatagtttcatgattggtgtgtagttatttgcagtattgatgatatgtatatattatataagattcttcatttttttgcgtagggcccttgccccaactgtggaacagagaatacttccttctttggaaccatattatcgatttccaacggtggtactagcaacacagtcaaatgctcaaagtaagtgtgaatcttctttaaataaaagaaaagtacaaggtgaattgtgtacctcaccaatcttggattgtctttttctattttagaactaatacgtcatatggaaaacggagaatgctaaaactataagaccaaaacttataccctccccattcactcaaccaccaacaaaagaagacattaattaaaatattattaaaaattgtcttatttttatttgggaggaaatgagaatatttttctttcaataaaaattacacttcatgcactgtagcacaatttggcaaaaaaatgtgccaaataaagtcttggaacaaatggttaatgattttacaaactttacacaatgtattggttctttttttttttttggccactatgtcacaaattaaaattaactttaataattgaacccacttatgttaccactattcattggggtttgaatttcaaacttttaccaaaattaactttttttttaataatttactaacgataagttttactcagctgttcaactgaaatggtatatgactcaaactcccgcctgattaccttgccagaaggaagcaatgcttgatttacaggtacatatttcagatgcatcgttcaacttctatttttcaggctagcaatacacacgagttttgctaattatacttgtaaaataagtgcagggtaatgcattttacgagatcaaaggcttttatcagtgtcactgtagccaatgatgtcacaagacctgtattcatcatcgttttagtggagaaggaaaatagtcttcatttttgtgcagttcagtgacatcaaatgtatggactgtgaatattgtacacgtgtatctatgcttctttacaataaccaaaagcctatttgtaagggtctaaaggtgtttaaaatggggagggaaagaattaaattatgaacataaaactaagcaggctccttaactgaaaaatagattatgcaatcagtgatggaatttcacatataataacatcacttgtaaaaatccctagctccggttccttttgttttttcacttacaagagcctttactccagtcccgctgaatgatatttctttaaaatagcctctgattcccttctctcagttttttttctgcttccaaattccccatgtaaaactaaaagactaacaatatcatatatagagttttttctttgatattatgaaaattttgatcacaaaatattcgaaacaaggtgaataagcatgcaggcaccatatgaaattaagtatagcttttaagcagtaaaagtacaagcacaattatagttcaactgtattaagcttaaatgttttaacatccttaaacctacaaatcagcacttgcaaggcactagagcataggaaaaaacatggcatataaacaacacctctgcacagccaaacaaccaaaaagctaacaaatcaaaggccccttcctaatcaaacctggaacactagcttagaaaattcgtccacgagttcatcctctataggatggcaacatccaagtaatctccaatctgcatcatcaaaacaatcgcaggtaaaaacatagtagaaatccacatggaaacagggtcttttttctttatggattacattgaacagggcacgtttcttgactcccccagcatattaccgcaatatatagcttagctatcactattatacaagtcaatttcgaaatagagctagtactcttctaatgctaaccaaccatctagtaaaacgggttgaaattgaaacatcagtcatgattaaacaaaaattgcttcctacctggaagtcaagttcacccaaggcctttccatcatctactcgtctcccatttccaaaggagtgtgtcattccaacctaaagaaaaaagccaataaaaaccacaacatcttagtaacaaaagaaataatggaaaaaccatattaagatataatagatttggacttctactcactagccactgaagtgtaaaaaacaacaaaagcttctaattcactataccagtttcaacacaaaacgaccacgtttatcggggtatacaaatgcaaaagacaattttgcgtttcttctccttgcagctggagctacttctttcacctggaaaacaactaggatcaatcagagaaccagcagtgtaacataaatttagtcacacaaacgtgaaaatgttacttcttggggtcaatggtttgaaccacatacaagatcagttagctcacgaagagttgcatctttccaagtgtaaatttgaacctcatctttaggttctttgcctcttactgcaaaatcttcttcactatggtgacctccaatctacaacacaagaaaagccccatgagactttaccaataaatatttacttatatctttcactgcccatttacgcaacaattatgttaagccactaaaccatctgaaatgccttttgctcatactaaagtttcttttcttttcagctccagttaagttaacaaatatacaacattacataaaaagaactaagattgctactgcattgtcaaaaattctaaaccctagaaaattcgattattgaaacgcttttaaaattaatttttttaacaaaaagattaataataatttccataccttagtgaaaacccgaagcaacaaagggcaagtctgcaagaaaaggaattaaaataattcagtaaaataaacaaatgaatagtcagaaaaaagagaggagaccgggcaagggaaaccttttcgcgatcgacgggttcggatctagggcgagggggtggaggtggcggagctctggactgaggaggcggaggagggcctggcctaccactgccggaaccggaaatttgcccggctcggctgtgggacggcggtccaccaatcttttcgtccctgcttctcttctccattgttaggtctctaaaacctctgtaattcagtttgatgtggaatgttattcgattagggctatacaagtcggtcttggtgaaatcgatggatatttggcccaacaaaatcaactgggcctctatttcggacaaattttgatgggctatttacaaaaatatggaaaaatgaatatatattttgatatatatggcataaaaacttaattaccctaaatatgacattttttaaaaaaaaacttacaaatatgggaaaaagtaatgagaaatgccataaaaaactt

SEQ ID NO: 298640 - DNA, 5784 bp, Cannabis indica
gggctagagatcttgaacggaaggagtcatactattacactgcaaccaatgtaaggttttcttaaacccttatgtgtttatttcattattttggagatttcatatttaggatgttaattcaacatacttgttagtaaatctagatactggtaaaatattcccaacacaaagttcttgttcctttctgtacttatactttttgtatttctcttcggcagttgcaatgatctcagtttgaagcctcttttcagtccctaagcattgggataggacaccttagataagttgaagtcctcaactgattgacagtcctagattagcttagccctgcggcagttggcaatggtcaccaagtcaccaacgttcgactcctcctttttatagctggcgaataccattgcatgatttagaaatattttggtaggggttgtcctgtgcaatggaggaatcctgacccaatttttcagaagatctagatgcttgaaagccttgaaccccgatgaaaagaacaacatgcgacggtattccttgacattcttttgagagttaaagggtaatggggtttcattggctggttgggcttgcaacttataaaaattgtcttcatacttgtcacccttcttggggatagagaaacgttcataaaaatacaaaaattttgcggggctgaggtcaacccaacccctggcaacgtagaaaataaaaggcctcaaagcaggcgataggcttgtgaaataagtttataaggggcaagtccgaaaaaaactaaaaaatctatgaagtaatcttgtagtggtaacatggctcctgacatgagatgggtctggctccacgctctgaaaccgttgtagttatggctgggtgtcttcttatatctaggtagacggtgctagactcctgaactagatggctcgatcccattcacgaccaaattcttctccaactgatgagcacacatcagggacgagggaaactcattagcctcccaaccgttggagcagtaagaatattttctataaggtaccagaccttgcataacatcctccaaggtggcaagctttttagtcgccttggtcgaagaaggattgacagtgagggtaacatcagatgacactttggagtttgacgtaggattttttgaatggagttccagaattcatggttgaatccaaagaaaccatgtttgtgaagatcctggagaaattcattcatctaaaagacaagaaacccaacagttagccccctcatcaaactttaagtcaaaaaggagaatggaggtcccctaactgttaagaagaggcccccttcggatgaaagtcaaaaagaatcttacgattctaatcatcaaacatctggtgcaaaacattcaagccacaacaaaagagccataaaaaatgagaggaaaatataaggagaaatagtatgattcttcacaagccataaacctcaaaatttctacaaaggtctgacagcaaagattctttcttttttcttaaaaacaaatataaaaatcaacgataaatgcaactttaagtgaaggttctaagggaaagtcaccattactacaaaaatatatataaatattttttccaaggacaaactaaaatctgttacaacgtgcttaacattccagaaaataaaactggaaggaaaaaatacttacatgacaaagaaatctcaagaagtgtcagaaccaccacacgacggtgataactcgcctgacagaggcgagtgaaaagtaaaagaaaatctagaaagtttggaattttactggaaggtttgaaaagtatggaaacaaataatgatgagtgagtagaaacctcagtagtaagtggtacgggcttttataggcttttcaagatgagtgctaatgccaatcgacggtcatctgacgctcagggttcgaaccatccaaattctagtaacctaatggtcaggatagctagggcagttgaaatgctcgagtacccctatgaatatgatattaatgaagggctcttttgaacaagtgggaattgaattcttacccgcaaaaaatgaggcagctaccaaaaatgaggcagaatgattataaataataaatagccgacacacatgcaaactattaattacatcactcccaaaggccaaaggcaagtctcaagtctcatttacaaagttgcaaaataagacttgggggtaaatgttaccctacttttgtcctaatatatgcgatagccttatgattgatcgcatggcaaataaatcttaagattaggaagtgtttaaggatgtcttcagtaaacttgtccagattaagtggacatgtacaagaggtccgttcgggagatacaagtgggttcgaagggagagacgtttttgttcttcttcaggagctaggtagagctttctagaccggacccaaggccgtggatatgaattatataaacgcattaaatgcggcatggaggaagcgtctgtggatgaatctgaaaagacatgtcagatgcattaaacacattcttcggcgattacaccttaactgaggcggttagtacgtcaatcatggaaggataaagatttgtctcacctaacacctagagaaaccctatgtaacctactatgcagacatgcatacactattgtttgaatctaggaacttgtgcaaactaaaagtgagcacttgcaacaatagtgacctttagctttcttcataaggctataaatacccccaaccacattctaagaaggggatcagaaaaaatggtgaaaaacattccctgcaaagaaacaccactatattaaatatcagtgactcatggaataaggctcattaatgccccaaccacataaaactacttgtattaactctcttctaatcatttacgcaattttcattaattagttgtcaaaaatctcgatcaacatctatatattaaatcaaaatctaaaaaatttgatattggaaatgacattccaaacataatgcaccagcactgtctaaatattatcccacaaatctatttcaataaagatatagaaaactcagatgacgacaatctgtcatcatcttgtagctaatctaatgattgagaaattgacgactaaagtagcaaagatgatgaagcaattcagtctcagttcataataattaaccatacaacaacaacctcaagagtagaaagagaacaaaacactaaccatatagagcccatcatagaagaagtgtctttagaagaaacacataccttcactaaacaatagtgttgatctcgcttttagtatgatgttgtctttaaagtgatgggatattagataataattaatataattaagcaataataataccataatttatagaggtttcatcccttgattacgataatagcctaccctctttttacctgtattactttgaagaattatcaagatcacaaggagttgtccaagtgagtctcccaataatccttaggaaaagcttacaattatttttacaacataatagctctcaagaacatatgatttcgatccccaaataatgaaatgattccactatttttaggaaaaaatacatgaattaagtttctaaaaacaattagaaagtaaaaagggaaactaggttagtttcctatgacctttctattaacgtgtgtcaatcccataaaaaaggaatcagattgagctaagaatgcgatatatttacgaaaaatatcttggaagatctttttcagtcgtggtatcctgctcagaggatttggcttcactagatggtgaagacctgctcagatagtcgcatacaggctctatccggataatacttgctgaaggtttaaacttaatcagattcacataaaactcttcggatagatcattgaaggaagagcacatgtgtaggctttggaaatgccatccacgtgtcaatcttatgaaatgccacatcaccctatgcagatattgggataacatttgcccccgaagtctacatgggaactattttttaatacgtggacttactcagccactgagttttcttggatgggtgacacattttggctctcgtactttaccttgatttaatgtattctaattgtaagatacgaatatctacctgtcccttcaagccttgggcatttaatgccctgccttgaaaaatggacatcggtaggcgcaataacgttattgggtaccgcgtgccagatgcttgcactcttcaatgagtaataattgtcattttttggggaaaaactaaaatttaaattaaagttaccgatctacccatcctgccatctcaaaagggggttttggtactctttgacacttttttcaccaatttcggttcttaaaataccaaagcaaaactaactcccttttcttcaaaatctcaaaggattcttgctaaaattctatcctactaaagccatttttagagacaaactcaaacatttctaaggaattcatcaatagtgagtaagttttttccatctttccatttattgcactttatttttgtttgaattttcttctccaaaaatctgggcacatgaaacttttattcaaaaatagaaattagggcttttaaattctagttcaaaaagacatgcacgactcgtaattcttggtttctaattgattccaaaccatttttgctaaaaaaattctcaaaaattcttctcaagtgtttttaggttcttctcgtgctcttggacctttgacttcaagaattttattagtaggatgaactttccctcttttaatctttatatccatctggtaagagcatcataaatgtttttcctttggaaaaatcaggctcatttgtctagttcttacgtgtctctctccttcttttgtagatgaacccaggtgatttctagggaagtaaacatcagatagataatgatctgctccaactgctctacatagaccagcctagactccgtccagctttgccattaccgagtgggagtttctcccctttgatcttggaccagtgggagtttctccacttcgagcttggatgagtgggaagttataagtgattttttgtagtctctagagcccgttgtgcaacacaaccattaccctattcagatttgtggaaaggggtaggaagatttatctgggaaatgaatagaggttggagacattacttgtccattttgtggacgttagggtccacgcagacattccaaacatgctttgagagggtcatctagagccttcaaaaagagtctttgtgctagtagagattatggttaacgttgcaaagcaaactatcaaacaggatactccgtccagacgtaggaaggtgacaaggactaaacaaacctataggaagatctcagccatggacccacactttgcccagctaatggtaatggccaatgtggagcaaccaaaaatcctaaagaagatgttgaaatacccatttgcaatgagaagctacaatagatagaagaccagggcgaggtccgtccagcttgtgccgaagaggaaaaggttgttgtcgtgattataccattaagagggtataacaaggccaagaacccgtctcaaagcttgaggacgtcctaagtgagggccaagactacattattgaagaacttgaacaggatgttcctgctggggtccaagagaaagttaaagctcaatgggtttatcctccgtccatcctcacactaagaggctaaggaacctaatgattatagtgttgtcagcacagtggaatataatcttaattatatgttcgaaagtttattccctgatttgtcagaacactggatttagattgacatggtataatca

SEQ ID NO: 298641 - DNA, 3390 bp, Cannabis indica
ataatatggagaaagtgttgagaatccacacaaggataaggtgtgtaatgaaaattctagtgaagaatatctctatacaatacagatttatataccccaaaatagtacgtatatatatatatgttattatacgtacgtatttccttgcttcaagttatgttttttcacaaggagaggcatctttaaatattggaccacaaacctatatttattttcacactaacgccattgaaaatggccatattcttctcgttgtgttttttctctttcgttatttggaaccgttggttcattcattttggaatcttctatagccaaagtggctttcactttaaattatatgtatgccactattccaatataataggtcaaaagtaagcaaaaggagcaacttggtttcttgtgacatatattatatactttgaataagactgattctttctgcttaaggaattgtttagtgctagataatcatcattggagatttattaatttattattataattagaagtattgggattggatgaaatctcttacctaatacttttgtctcccccttaatatctttgtttaaagattatattaagattagagagaatgaaaaataaagagcaaagcttgtattgtattttattcacatggactaagctgaaatttaaacactcacaagaaacaaggaatttacagagtgatggttgttgagaaagaccattggaaatctgagaggggaaagagttgcataataggacaatgttgcttaaaacaaagatgggagaatttacaagtcacagtgtggagtctgtgatggtaccaaaatatccaaatcatgcagtgtgtgtcaaattaacagctctgtttattctctcaagaattccactagctttcctcttggctctggatgtgccagtctgggcaagcttagataatgttccatacattttctcttcttccctcatttccttccacttggttcgatcgttgtaacagatagcgtggagaatcgcgattgaattctccttggtacggtcgcaagcgttttctctgattatgctaagcaagcaaggaacagctccaatctctcccatttcttccacagccttttgatgtgttgcaaacattgcaagcagtgtcaacaactcatctacatgtgttcgattcgttatcttctcaagaattaccccaaccacgccatcacgcaccactcttgtcctgttctcgtggatgatacacagattgaaaatcgcagaggcaacatctttcatagctaaaggattcccttcttcgaggagatcaacgagtggctttaaggccccggatttacctatgagcgctttattggaatcaatagcagacaaagtaaagagggctgcagctgcattgctccttgtctcgatggttcctgatttgagcgcgtccatcagaacaggaattaccataggtgtttccgcaacaagcttcttattgttgtcatggatagaaagattcaatagcgttgtgatcacatcttcttgaacctcaggatgaacaccagtctgagacttgccttccgagagtggacgaagcaattgaggaatggaatctaaagactctccaaatagtgcccgaaacgacggcatccttttagtcaacattctgagctcctttgcagccactttctgatctggtaatgataaagacatcttccccagcaatgaaagaaaatggtctcgatcggctgctgtgataccatcttcatttaaatagagatcagggtcagacaattcaatacctgtacacttacaccactgtgatatcatttcccgaatcaagtgattaggggtgagaattgtgtgtgaaaggacttgttgagtaagaggacatgtcctgctccctgccttaagccatttctggataaagggtctatcataagtctagcaaaagaaaacaaaaaaaaaacaatgaaaatcagaacagattatataatatgggcttcaaagtatcaatgcagttcttttctcaaagttgtcatttttatttttggttctgagtattaactaaagacaactcaaacacattaatcatcaagacttgtgtggttcagactagagctcatgaaaattatgacaattacatgcatgtcgatatatagggaaatgaaaaacttcagattcctgacccaattgaaaaattactgcttcaagtgcccattttaacaacagtacaaaactttggccagtactgtaaaacctatcacgacccagaattgaaattccaaaaatttgcaaacaaaacaaataataagcaaaaatttgttatcccctttttaaaaatccaagtagtttttaaaatgaatatatatatattttgatattttatcttagtagaaaatttccatacaaatcttggaccaagaacagaggataacgtatacaaaaacattatttttttaaaaaaataaaaaaaataataataaaaaaaaaagctatgttgagctgccgaaagttagagcagtcaatttaatatttcgataataatatttttctctatttatttttaatgaatataaaaaatacgaacatgaaagaaaattttaaccctccgtttgattaggaagaaagggtaggaaaattaagacaaaataaaagaaaaagacttgaataatattaactgcgttaatggtggaatccaacaaaaccagaaaaaatttaccaactagaacttgaatttcctctcttctcacttttcagaaaccaaacactgaacggagaaggaaaattggcactaacctgaccggaggcaacaacaacgggatctctcatcaactccttagagagtgggcatcgaaactcatgtggacacgaaattgtatctggactcttcaaagagtgggatcgctttctaagcttgaaatctcttatagcaataagagtattcttagcttgatcgatggtttcagtactgtaatcgtcatcttcaacgatggctttcaccaatctctgaagctcttttttcaattccgatgtgggtttggtcataaccgtcggatcagaatcgaaaacaccagtcttggccatatttgatcaccggatcaaaatcccaaatacaaaaacaaaaacaaaaccgaaaaagaaaggaaacccttcttaactggttgaaattcaagtgcaaccaaaaatggcgaaacagagaatgagaatgaagatgctctgtttcattgtggtttttgagtttcggggttcctttgtagtgccttgtttaatctctggttcttcttctattctcagtaaagtctatgaatgtgaatattaactacacaaaaactcataaaccacacacgcctctccctcttccacccacccaccactctctctctctcttctcactctctctctctctatctatatatatat

SEQ ID NO: 298642 - DNA, 926 bp, Cannabis indica
aaaaaaaaaaaagaaattcaatattaattgcactatgaataccctttagaatttctctataaattaagaccaaattcatcaacatatttaatatcctttggaaatagataaatttatgtccatttatttattatgatggtcaacatttttgaatgccttgaaagaaaaatgcacgttaatattggcctcttcaattgccagcattgattatcagttgagcccatattggacttcacctcttttttcaaatatacttaaaattttaaattcattttaaaaataccaacaaatcttagtaacaatacattttgtcacgtcactaaaaaatacaagaattgtaaattaaataattttattgattttagaaagaatttgaacttgggacattgtatttaccacaaattaggcctatgaccacaaattaaataattcttttaaaattatattaaggtattttatttaaattatcgagctatcatatttaatacataattatatatatttttgttaaaccataatacataaatatatttgaaaataaatataatacatattttatacatacaaattatttaagtatcttgattaattgagtaaaaaaaaatataattaacaatatacacttattattttattatttttttttttaaaaaaaacactttttatttattttttgattgaagctattaaatatacaatgcacaataacataactcactattggatatcaagaccctaacacacatgcaccttacatattgcctaagccttagttcactttttatttaataatataaaatacttctcatgcataataatataaattattcatctaaatatagaaatatctcactcgctgaaacaaccattacagtagaatctctatctaagaatacatttgggactaagtaaattatattctaatt

SEQ ID NO: 298643 - DNA, 1670 bp, Cannabis indica
ataaactactaaatttttttttagatgccgaaacagataaaaggtgtatcagtgtatttttttgtatggaatgcataaaagcacctaaagttattttatgctaaattaatgaaacccaaaatttataaatgaataccctcaaacaaaataaaaataatgaaaatttataaatgaaaaaaattcaaaatctttgacaaaataggcacaaaaaattaaaattaaaggttggaatggtgcaatttggtggttatataatattatatagcaaaaaagaataattagtggcatgcattatgattcttgagtacgtaaacatattacttattattagttattaattattattagttggtaattatttcattcaaaatagaatgttaattatttatttatcattcctataataaattatggttagcaaatatctttcggaattaatttaattgtcacgtgatgaaattttcgaaacagggacataatacagtgagacaacgtggtttcatggctgtctttgtttattgcgaagaagaatttttggtaggcagctattataatcgtcggcaagaaagagatgaaaaacgacgccgtgtgtatactctctaaagtaagccacttttgctattgtaagccttcgggtgcgcacttttgtgaaatcattaggtacagttgtcagagaagagggccgcaggggtaaccaactgaacagccgaacgctagttggcccaaatctcgctgtgggtcccaatcatgagcgtgtcgattctagaccacccacgatattttgaacgagaacttgcgatattatgtgcgtgtttattctttttcttttactcggcgaagcttctcccgttttacgtaaacaaaacttaattaataatttaatagcttgtcacagaaagaaaaaaagaaaaattaatggcctatttgactttgttgtcattttttttaactattgtatgaattactatacaaaaatctttctactaaattgtatattaatttttaacaaaaataaggtgccttaattaattattagggtgcaaatataatgtcccttaaaatagttaagaaaataattattgtgtccacaaaaaatgttagtttgaggtttaaatttgatagtattaaaagtagaagtaaaataatactcactttaccacataaaaggacaaataatactatgtcaaaagtcacaagataagataatattaatgaaaaaaaataagaaagctatctattagagccgtttggtatgcaagattggactggatttgactgaaaaggattggacttgactggacaagattggattatgtcgaaagtaatcttgtgtttggtttaagaatagattgaactattttataagaaaaacttaaattaaaacaagaatatataataataaataaataaaaatgaataatttgcaacaaaaaataaaaataaataaaattataaaataaaataatatatcatatacataattaattaagtatatatgataaatatataataaaatattttattatatttgttatttaataaataattaaaataataaaataaaaatacttaaataatataaaatatttatcttaaacactaattcaatataaaatattaatgttttaaaaatatttatataaattttttagtaatttaaaaataatata

SEQ ID NO: 298644 - DNA, 1535 bp, Cannabis indica
ttttaattcagcttgagtcaacttttcatcatcttattgattctcatagaccacaacccctttattcttcatacttgattgagcaatatcaggagaagatatacccataaatgtagtagatttattcttagcaaaatttgctccatgattattggtattcataataggccatgagttgtcaaaggccttgcctgaacggacatatggtgaattgacaaagttctaatggcatcgaggagtagctttcatccccaaagaatatggttttataatcatgcttgctggagtatcaaagagtcggggacagaacctttctgagtgacttataacactgcaaatgaaacaaaatactgggacattttcatacctgaatgtagcgtatatatagtcaccatcacgctttcaaaacttcattttccttttcaatggatgctcaagggataacgttactcgtactcgaagatattcccgcctaactcctacaatcctgcctaactcccacaaaaatgttagggtcagattcaagaaaagtggccacataattaccagcatcctttgtaactgtcacagtcataaaaccagattttaaatcatgtatttgaacctaaagatcaagagtattgagactcgaagttctaggattgtcaccatcctttaaacgtgttacaataattttcttttgatcataagtccatgggctacctgtaataacacgttaaatgtctatttcgtgataaaattagaataagaatcgattttgatcgagttgcttgacatacatatctctgttgggcttccataggtcaaccaacatattttgaaaaacttgaaaatcaaaaatattgctagtgagaagtcgacttactaggcaccatctggtgtcaatggacaactcttctttttcttctgcattttcctcgtaaaaggtctcttcagtctcttcttcatccaattgaatatctcttcatcgatcttctatgtccttagtattgatactattggatgccatagcccaccaatgcagagacactagcacaatacaaacaagatcaacaaacagagacaaagaaagcaaatgaaccaaacagggtatcgaaaatcacttgaacaagactctaaaaagacctaaaagacaaaacaagactcacaaaggaagcacagaacaaaacactctaaagggagcgacatcactgtggcaacaccataatcttgaaaactcatatcaaaatctatttgtgctttgtttattattattattttattttcatttatattataatattttgggctttatatatttaattttatttagtttcatttaatgccatatcaaaatctatttgtgatatgaatagaatttaacttcttgtcacgaaataagaataaagagtactttgaatttgctaacagagtagaagtttgaaaagatttgctagaaaggaaaaataaaataaaattaaaggtacgttgtgtaattattttttagtccgttttattttttaaattaaaaaagtaaaaatattttctaaaaatat

SEQ ID NO: 298645 - DNA, 4400 bp, Cannabis indica
ctaatcagattgtaatgagttttatttagggcataaaacccaacagccatatgatggtacgactgacctaaaataccatctaggagcttctaatgagctaatgaagttgaaaaaggtatcctgcaaggcaaggtgtcaatgctttgtagttacacttaaaggggccacatataagtagttcaagaggtttggacctgcaacaattacatcctagaaacaatttttggaggaatttcctacaacaacaccaagtagcgagtgattatattatgcatgtaacgcgtatcaccagtgtaaagtaaggagagaaagaaattaagcttaaaggggtacatccaatgctttaatgctgaagtcgcgaaagtaggaagaatgttcaatgatgaacataagttctccatagctgctgcaatacgccttgagagtagattttgggggaatatgttgaaaagtgaattggaggacattgaagacttctatgagagagcagaaagatatgtctcatcgagaaaggtaacagagtcttggaaacggacacaagcgaatgtacttcaggaacctcgccaaacccctacacggtctactaggaaataacccaaatgctcatacatccaagtaaagcctacgctatacaacccataaaaataaatatccaagatatcctcttaagtaatgttcccctatgcaagaagaagttcatagtgatagcaagttcgcttttagtgtgtcgcaataaatcaaagaaggcagtcaggtgggtcttagtgtcaaagtggatgatgtttgacacttggggggcacacaaaaaaaaaaagagagaaagggggatacttttcaaattgacaaggactagctaccctttgtcgataagagaaatgctcctacttctcccaacaaaagttacttagccacaagaggtcttgaaaggcactcatggcctaacgctgaaatgagagggatgcctttcaagagtaaacaaatgttttccaatcaagagggtaccgcgattaagtactataagctccctcgatcccatctgagtaaaaggataaagaaataataagaggttgagactgcttaaagagccatactccctcaaatggatgctcgcctaccatagcggaaaaatagcttggccatagagtgaccccaagagtcgctcggccaatgtcggttacaaaaatggcttggccaaactgtgaccccagagtcgctcggccaatgatagttatgaagatggcttggtcagagagggaccccagagtcgctcggccaacaccagttatgaagatggtttagcgagagagtgaccctagagtcgctcggccaattccggttacgaagatagcttggccagagagtgaccccaaagtcgctcggccaatgctgtttatgaagattgcttggccagagaatgaccctagagtcgcttggccagagaatgaccccaaagtcacttggccaatgcagattatgaagatggcttggctagagagtgaccctagagtcactcggccaatgccagttacgaaaaattgcttggttagagagtgaccccatagtcgctcggccaacacgagttacaaaaagggcttggccaaagagtggcctccaaattcactcagccaacgccaattacgaaagttattgggccaaagagccaccctcagagtcgttcagccaatgccaaataaaattgttgcttgacatattggcgcgaagtaaagttcaactgagggaagcccccactacaaagggggcaatatctctaagaaaaattagagggtctcacccctcggcaaggaagatcccccaacttattcagtcgacaagaacacttaaaagaattcttgtagactgggggcaagtgctaaccccaaaaatcgacagagttgattttagagattagtcaacaattagtcccagcggtcgagagaaatcaacgataggagtcgctcgaataatgattgagtcaatgcatgtggtctaaggatcattaatctcaaaaatctatgcttgcaagtctcggggcatatccatgcaacttggaggttaatcccgtaacaactcatgagtggagttaatcaacttactaagtttcatagtgatatgtttagaattagatcttgccataaacattagattcaaaggtctctttctcatctttccaacggatcttgaattgcccaattttaatatatcgagagagttatggctaaaatactaagagtgctaaattgttacaacttggtacgcgagcccataacaattgtgcgagcccatgggctgttgtgtgatcccatggctattgtgcgaccccatgggatgttggtcgagcccataggttgttgggtgaatcggggacatttgggtgagtcatggaatctttatgcaagtggtggagcatccgttcgacccgtggttgagcacccccgctattcgatgtttagtaccttagtgatccaatgacgagaacgcgagtgaaagaaggagaggctatacatgtatggatagacgtcatgtgcaggagagtgtcaaagcgaatgcatgggggctcgcttgcgaaccaacggggggctcgcatgcaagttgtgggtgagtggtgaagggtgagcttggcatggtgagagggggtagggggctcgcatgcgagccgtgtgtgcattatgtgtgcgtgtgttttgtgttgagggatgggaaggcttgcatgggaggcaggtgtgtgtatgtgtgtgtgcgcgtgtgttgtgtgtgtgcgcgtgtgttgtgtgtcgaatatggggcctcgcatgcgagccgttctgtgaattgtgtggatgtgctttgggggtgtgaagataagaagaggggtgatcaatgcatgacgacaagaatgacattgggagaggaatcaaaggacaagacgtgcaagggaagagcgtacaaccacaccttctgaagactaagagtaaggaggtacaaatagcggcgacaacgaatgtacccagacaccaccacgcatgtaacaagggactaccacacatgcaaccagggacctccacgtatgcaaccaaggaccatgcgcatgtacccggggaccaccctacatgtaatcagggaccacgtgcgtgtacctggagaccccacactgcaaccaccctcctgcaacctgcaactgaggacaacctgacacaaacaagggtgcgaggtgtcagagtacctccagaacctgcagcctgcagcaggaaagtgacattttgtccccatgggaccactttgtaaacaaggactatatagagagagcaataagaatttactccgctattctctccatttcaaggtagtaatctgagtttgtgtttcatcttcttctccattccatttctgaacttgaagctcaagttagttttttggccatatgttagttcacgagttctcaccgtcaacatcaacctagacaccggatctcagttttggcctttaggttgatctgtttctttggttaaaatacttgattcctcgttttggagggactcaaagaaaatgctcatgttacttcttcaatattgtggatggaagtaccccaggttgacaatgagcgctaggtgcatcaccagttggctcgggggtgtctgggtgctccaaatgataagtgttcagattccaattttaatggctctaacatatttgggaaaagtcttatttatgtttaagtagagagtttgaactatttgtactaagacggacctaaaacaatgcttaaatcacaataacccttgagaaattataatgtgattcagattacattgttcctcaaatgtttagtaagcaattcatataaaaattagtttcaaagggtggtggagtgatgatttagaaagaggaaattgtattgtatatatattttattttatctcttttaattttttacttttatttttatattctttaagatatacctacttttatagatggtgttcccattatacctcttatgttaacgtaaattaattatgtgctaaatttaagtagagggtttgggtatattgggtaactcactcacaaaagtgggtatattttaatgaaatataatatgggggtatttttgaataatggatacaaaaaaaagctattccttaacttatcttaattgttacaattttttgaaatgaaatcttaatagtgatatcaagtcctataagccactatcaaatgaaaaaggctcccacaattttggaaatacacattatccgaatgttcgttttttaaatctctggtgtgaagatagtttcaggaacaaatacaactagggacggacattttctctatggggatttatctcgcgattaggggcggggatgattctccccgctccagcggagacccatttaatattttattttatatttctaataatattt

SEQ ID NO: 298646 - DNA, 2785 bp, Cannabis indica
cctaagccattaccttgcttaccccttctagcataagtaaacttaataggaggcctcacattcgtatcatatcagagtcatatctctagcagccgcaaatgaaaataaggaggactattagacaatattgtcccacatgaatcaaatgtaaaaatattgagcaatatataaaaatatgggttactccaacaatattattttttttcatctaatctctttaattccaacaatttctttttataggaaagagcaaaagaggagaactaagtgttttcggaaaatctcttatggtacttgctccatgtcttcacatgctaccaaagcatgcttcagttcacagcagcaatgaagctgaatccaaggtataagaaaacaacaaagttatgttcttaatataagtttaatctaaatctctcaggcttactagtctttacagaggaatgaaaaaacaactcaagcatggaagccaggatctgcccgaaatccggatacttatgccttgaaagaccaggtagaaattttttgccttatacttaacatatttcatttgtagttgtcactaattttcatctcacagtaagttgtttcaatgataggaaactcgatatcgccagcgttacttggacctcatgttgaatccagagatccaacaagtgttcaaaacccgagccagaatcttatcttactacaggagattccttgacagccgcggatttgtggaggttccaaactttttatttttctacatgttgtacttgcaagatcacaatattcataatttgaataaaacagaacatgatcactttactatgctcactttcccatgctttcccggtagacaaacaaacagaacctcaccaatttctaccttcaattcccttagaacaatcaatacttaaacacctatttatactaactttaacttaacatcatggcacttgtctaatagttacccaactaactaactgtcaaggcaacagtaaaaaattgattcatataattgagttaagagtcagaaattaacaatagatagaataaatatgattttttgtaactattacccttgttgagttttacccctcaactttcttttgttgtgaaattttttttctaaactatacaaattgttacaaatatcatctctagttattttttctcattttttttaaacaatgcttatgtggctatgagttacaggtataattgcaatctaaagacctatttgacaattttaagttacctgaaattcagcttattggtattaaacgtacaaatattagcccttagacatataattcatcattaaattgctatttatgtatctattttttgtctgaactcttaaactgagctaaattaacatcatgttagtgtatatcaacaaattgtttaaagaaatgaaaaaaaatacaattacaggtctgtgaaaattcttacaatagagaaaagttcaggaaacaaaactctacaaatattgttgtagtttaagagacatattttgcactataaaaaatctgttaaacaaaacaattttcaaatatattatgttccacttcaagtgtagaaattatgatcacgcacacaaagacaaaggcacagaaaatgcttggctgggatttctagagaaaagtcctacattctctattacatgccactttcctgagctttctgtggaaacaaacaacctcacagttctgaatacataaatgagtaaaccatttgctgcaggtagaaactcctgtattgagcatggtacctggtggagctgcagccaagccatttgttacataccacaacgagttagaaacagaactctacatgcgcgtttcgccagagcttaatcttaaaaagctggttgttggtggattaaaccgagtttacgagattggaaaatcgtttaggaatgaaggaatggatctaactcacctccctgaattcaccatgtgtgaattttacatggcctatagtgactacaatgacttgatgaaaatcactgaggaattattatctggtgacaaaaacttcttaatattattattctattacaatttactgtcttataattagtaaaaatgtgtaatcaagcttatataaatgcttgtaggaatggtgaaagagcttactggaagctataaaatcaagtaccatggtgatggtttgagtaatgagcctatagagatagactttactcctcccttcaggtacaccattgtgtagattttaaagtatatttttaagtaaaaactactaaattaataattatgtttgccaaattatttttttgagctattataaagcaccaagtaacgattgtcacacttttgaattgagcatttgttattagatactagtgttgcttagtaccttttatagataacgctctacgattagttagcgatattctcttaaaattatttttttaagttatatagattcgatacttaattacactaatagcagtatgatacaaggagagagctaagtaccaataatacttttttagcaattctcttttgaattacacgaattttacatgtttttaaaatgccattaatttaataattattgtagaatatcgctaattatttgcaaaacgttatcctaagatagtctagactactctgtaaataaaattaggattcgtttagtacgccttatgttcaattttatactaaaatattatatgaaaaaccgtgtttttgcaaatgtcaattatatatagaaaatataaaaacagtatgcgtctgcagaagcagaaagtaatactgctacagcaaaacagaac

SEQ ID NO: 298647 - DNA, 5842 bp, Cannabis indica
tgcaagtttgtaattgtggaaagtaatactaaggtggtgatcaactctctcaatggagtggactctcgatgggagattgagaactattctactcattgtaaaagaatttcttccacttttgtgggtttattttctagtattgtaagaacttgtaactttatggcccataacgtggctaagtgggtttttacccacaatcctaatggttgcttagatgtttcttccatacctatgagcctttttagcaatgaccagggctaatttaatctaatctatgaacactttatttcaaaaaaaaaaaaaagaaattaatatcacctccacatgtccagcatgaaaaagatcaaatgcaccatctatataaactatgcgagcgtcctgtcctggcccctgcagcaacaacatagcatgagtttacaattaggtgttgtacagaaaaactgtgtttcaaatttcacaattaggaaaaaaacttgaatcaataaataaatattcaatctgtcagaaacaaagtaatacaaatgtttctacaagaagaacgacttctatacaatctaaacaggatagaaggatacttatcaagaatatttatccctatataattatttatttatatgtatatgtcatggatgtgtgtcggtccggcaccagtactgttctatccagaataatgtatagaaaaatgaatgcaatgttcttctcaaaatacttcagcattaagaaaaataacaaattacttcataatagtattgggaccggtgccggagcaacactacatcaaaacccttaaggtaagcatcaccatatgcctcggaagccttaatgggtgtgtgtacacctctcttgttgaagatgcagaactatatcctgctagagacacaaactgatgcttgacaatttaggcttgcacaccatctttatgtctgatttgcaatttaatcagaaacatacattattacagtacataggagcgcctctatgtgatttattagcccactttcataacaaaataattaagttattaaattactgactggaaatcattaagtctcttctatctcgtttcatgaattcttgctatcctcattgatttcaatcaagattcagaaggtccttctagaacactagtacaagagcaatttataaatgcataccttcccgttggagaactggacaattctacgagatgtaggtagaaaatgggatacacgagttccacttccagatccaccgtcatcaaatttttggccgtgaccatggctgaactgtctttgcagggaggaatggttatggctctcattgatggatctctctcttacacaaagaagcattcgtcctgcagacaaaatcacagcaaaaccatttgagtgataatacaatagctcatcacatccaatgaatctcaacataagattaaaaaacaaaacaaatggaaataaaataaaattcctaaaccgcacaaagactaaactgctttgcatcacatgcaaataaatgcctagacaagctcattatcactataaaagcatcattagcttctgcaaccctttcatggagataacaaccacttcatgagcacatgatgggagaaaatgaataaaaataaataataccagttcaaatttctacaagatacaacctgcaaatagtattgactgtaacagtcaatatataactccagtaccggtaatcaaactaagtatagataatttctaaacatggactatgataagtattatggaccctcagagtcgttatgaatgaatgaaataagtgttaaaaaaaagcaataaaaattactgtaaatatcacttaaaaatttacttagtaatcagacaatcgggaaaaggaatcaaaattgtcaggcgactcaaaatcaaaaataagagttgtagccaaaaaaaaaatgaaaatcatagagcaaacataataccctattcatttcccctcagaaaactgaccacacattactgagaatcagtaaactatttgcagagtttcagataattcagggaaaccccatcaagaataaacatcaaaaccaagaagaaacgagcacacaatttccttttcttttctatcttttaaatggttgggaacatcatcatatcataatgtgaaaaacgtaaatgctgaaaaaatatttcatctcaaacacatagaaaataatcatcaaaacatacgtcaaatgtaacaaataaggaaaggaaacaaattttaccaacgatgtcggtactagagactccttcagtgcgtttgatctgcttatatcgaccagcctttttagcaagagcataagcatcagtaccatcaggaagaacacaagggtcatctccatgaataatataatctatattatactcgtcgaacagcttcttcatgaaatcttcggttatggcataaggcgcatccggaataacctcatccacccacttcacggccttaaccatgatcatcctaaataacaaaaatattttctttcacaacgattgcaaatctaatctgtataccaaattccaaatacaccttctcttcccgcctaacgaagatgataaagcacacaaaatacaaattaaacgagaatgaaaagaagttgaaggcggacggacctttcatgtagaggagtaacaggggggcctttattgacaatgatttcggcatcgctgactacgccgacgactaattgatcgcctaaggcacgagcttgacgaagggcattgcaatggccgtagtgcatcatgtcaaagcagccatccatgtagacccgcacaggctttttcttcctcctgcggaagctaattccgaggggtagctgagaatcaccatggtagggtgaggaagaggaggcaagcaaagccgtggcccccaaagtgacgacgacgccgccgatcaagcaggtggcaacgaacttgccccagctccgtaagttgtccgaattgggcgaatcagggtccattctctcgccttgcctcagcacaaaacgacaccgttacaacacccgaaatgaatttatggacgaaatcgaatctggcatttacctttgttcgattccacactcttccagatacgcaccacttctctttctattctattcctctcttcgctacttctctccgctttcatatcatttcttaaactttatttttcctttatttatttactttttctttttaagaggactactcatcattttttttcataattaaaaatgataatttatttttactaaaataattatataggttagaatttggggatctcaaaatcaatatgtaataggagcactagctcattcacaatttatttccacacagtaataatgtgggactaactctaataatttataaaatgaaagtgattgcgggaagtgggttgaatagttatattcttaatttttttatatgatgttatatattgtatgttttttattgagttttttgaaaattataaatatttgaagatttaatgttaataaaaataaataaataaaattattgacttcacttttaactaactgagttaataaaagtgattaaaaataatataatttaaaaataagaacacaaatttgttatagagtttcagtctcgtgatggtggtaatagcctactccccttttacttatattaacttgtgaggaaagaaacaagaagtttttgatctctctcgaaagcttataattttacagcataagaactctcttaaattattgaattttggatccctgaatagtgaaatagctttactattaatagggaataatcacattcatttggtttcccagaagaaataatgataaaaaggaataatagttacttttctaaattacattatttacgtgtaaaaatctcatgaaaatggggatttaattgacaaataaaggaggaaaatatatgtaaggctttctctgtcgcatttaccctagacgggatacgcgaatggccatgaaattgacgttggtcggatgtactatttaccatgtgtggtacttttactttattcttcaaataagtagtatttgatggataatcctctctggatggcataccaacgaaggttccctccgtccaggtcttaaaatgctccatgtttcacccaaataagtgttatgtcaccctgtgtagattttgggataacatttacctcaagtccgcatgaaaacttttttttggtatgtggacttcatcggcccacgtgctaagtaaattgggtgacactgctcgaactgcgaggtaggtgaacaaaaatgtcttttcaaatctgtgagaatcacgtcctaggaacatgtgatgacggttgtactccccaagagtactgattctacatatttttgggaaaaaatccaaattttgaaatgttgaattatgaaaacacccctccagaaacctataaaaggtgtcatagaactcatttatactcttttacctgtttcaaaacttgaaaatatcagagcaaaattattttctctcccaagtattcaaactttcttcaaagcttcaaatattcacaggttaccaataaattccatctcaagtttcttctcaacaaactctacagtgagtaagtttctcgacttttatgcaatttcttttttatctcgtgcattctcttttagaagtgtctcctacaaaaattagggtttataacttgaattttcttcatttctgaaattagaatttagattttgatgttgaatatatgcgcacaaactataattgtaaaattcttgtaaattcccatgtttttcttgaaaattttcttcaaatatgctttgcgcggtgcctctggtgaattctaggcttatcccaagttcttgaacacccttgaattgagatcctcgtcattaggacgaagtttccttccttcgatctttaaaatatgcctggtcagagtattgaagttgttttcctttaaaagaaacaatggcgttgtccagttcttaccttcctttccttttgtagatgaacccgggcgacttctagggaggtaagaaccatgtggacggcgaaattcttcggttactctacgaggatcagcctaggcttcgtgcagcctcttcatcgtcaagcaaaaattcaacgtccaacttcaacgaatgggaagtgacaagtgacaaattaaagcctttcaaaccttccgtggaacaccactactacccaaatcgtattggtggtgatgtgtacgggcgattcctttggaattaaatcgaggacttaggcaatacttgcctccttggatgtacatggtctgagcaggctttctgaacactttgcttgagggtgatccggagccttcaaagaggcatgtcgtggaagcagaaatagtagtcaacgtcgttcattacccttcatctaggcactcgcctaggaagaagaaagtggcgcggactaaacagaagtaccgacaaattgaccctgacgattaagaatttgctcagctaatggcgttagtccatgccctgtacatcgaagggtcaaacgaggaggacacactgtgcacgttggtaatgtcaaggtgaacgaagttggggatcaaggtgaggtccgctttgatcaagataatgaagaagaggttgttgtgttgggattttatgccctaaataaaacctatttcaatataatctgatttattatcaatagaagattagaagacatttacgtttacatgtagttttcatggttatggtttaatgtatacaatttctattaagtccagaacatatagttattcacaattacagtgatgtcaacacagtggaaggtaattgtgattatatgcttcaaaagataatgtctcatgattcatcagtgcactggatttacatgttggaaatttattttac

SEQ ID NO: 298648 - DNA, 3225 bp, Cannabis indica
atatatacatatttatatatttagctataacactaaacatatgacacttgtttttcactcaccttgtacctgagatagtgaaagatgagatgaggtgacctcattggacttggttcagtgaggcttctcaattagaacagaaagaaaagtactttcatcaccgtccaaacacatggctcagcaggtatcttttgtcttctatcccattcatttggattttcttttctggttttctcaccaagttttttgtttttcattctgggatttcaaaggtgggtctaatgtatgtggtttttttcctataatttatctgggaagtgggtctggctttacctcattagtcaatagtcactacattacgttgttcttgtttctttatagctaatagtatgaaccctgtttgaatttttgtccatgtaaatgtaatcaagtgtattataattattgatattatcactaattacaggaggaagggtggccacttggtctgcagccacttaatgcaagagttggtttagctagaaacagagatttttcaggatcaatatcattcaacactttaattactggttctccaacatgttctacagattcttcctcagatttagatactgaggttagtaaatgttacactggtttgtgctagctacaagctagtacatatcttaacaataataatagtagtaaaaaagagtgtacttttctcatcattttgtttcttactagtttgttcttttcttacatataatatgcatcttgcaagatgaaaatgaaaatagtagaagaaaaatacaaaaacaatgcttgatgatttcgaagcttaacttggaaactgtagctttgtcctcttatatagtgacatataattaaaaaatgtagataatcaagccttatccaaattgagattaacaatgataggactggagtccaccatttcctacgctccatgtgaccagaataatgcatataaggtgtgtgtgggcgtgtgtattcatatacagtcatttattaatataagcaagttgtgatcacaccatagtattgtattagattttgtgtcttgttaagctatgttcagtaatcaaagctatcacatactgactttttcagtgttgcgcaccatgtgtctgacatgatgttttagaggcatgtgaaagataccttacgttaaatttggcaataggaacctttttcttctttcattaacctcttctttttgtgttgtcagaaatttgttatgcatggtaattgtataagatgcccaaacaatgctgtgatattactggtaaaataaagtagagaatgtgcaccctgatcagattagcatgtgcagggatgaaaaattttctgctctaaataattcacttttagaaagaaaaagaagctaaataatgaaaagtacataataagttcatgacttactaattaatccagagttttccttttaccaaaacttggataaagaatgaatgaactctgtccaaattgatacttagtactgaaaacaagggatttggttgatttttcagtccactggttctttcttccatgacaagagtatcacacttgggagtcttattggagttaatagcattctagagctgtccagaagatcaatcagaggaagaaaaagtgagccatctaaggaaaataagagcagcaacaccaggaccaggaggatatggtgtttttctatatgttcatcaagtgacacttctgatattgctgagaattccaatgatgctgcaccaccatctctaggccattttcttgcagttgagagaaaaactgcgaacgaatgtaggagtgaccaaaggcaaactagtttttatggaccagacgagcttgccatggctcagtcaacagctgaaacaaacacacttttcattgatggctgcatagctcctcctcggtcaagtccatgttcaggtacagagatgaacatgagaagaagcagaggactagatcattgcttggggtgtggattttcattactgtgtccatgcatgtctggacagccttcccactaaaagacattgcccttttgttttggtttttttttgtttgcgacttaagtttagcgattgaattatatgttttatgatgagaaataagtgcttattctgccacttaagtgatgtatttggtgtgtttttgaaggtcagattatcatgtcagactcataggcaattattatcataattgagcaaatttgaatattcataaacatctgttatagcacgataaaaaaaattggcagtctgcataagaattggcatgcgtgtatattctggtgagttttgtcaggcataatattgtatgtggattcactgtagaagaattttggaatatgaacctctctttcctgatgattttattatatgatgatgccttgaatctcataataaatttcgtactccggaggctccatgggccattatcagagcttgaaatagtgtaaataactggtgtgagctgggaccaaggagttgaatcatggagcattatatacaaactggattcatatcattcatgaataaatgggagacaatgaccttgtgtggttattgggccatgaacaactgcatgtatttggtacaaaatttgtcatacttttttgaactggaatctaaactatcattagtagctttactattaagacggtatcctaagttttggttactgctatctttgctatctttgactgattcctacatatagtatctctaaaatgaagatagttcataacttatatattttgtaatattataattagtaattatattaattataactgttttttattcttaattaattgatttaatattctatggtcatcattatcataatcattaaatttattactcaatttaatttacttaataattgtcaaaaatattttgataattaattgtggcagaaattttaataaaatgtctcacctatataaatatagagtattggtctcaagctcactactagagatggacattgggcgattaatgtacggggaatgcaattcccgcccccatccccgctacctatttatacccccatccctgccccatcaccgtctaataaccaacagattcggggtaggggaatacccatcggttatggagaacccatcgggtatccattaaggcaaaatgaaaaaaaaaaattaaattaaaccaatattctcacaaatttttattatgcattcataatctatagaagataaaa

SEQ ID NO: 298649 - DNA, 5930 bp, Cannabis indica
aacattaaatgttatttctgatctatattaataagtaaatcatattatattgaaatgagttttatttagggcataaaacacaacaaactcatcctaatgtggctgatgtccccactaccagcaactgctcaagtaaattcacacaaaatgaagactcgtgccaagtttggtataagaaagcttaaagtatatttggcttttaaagagccaacaagtgtgaaacaagccttgcaaagtgctcattggaatcgtgccatgtctgacgaaatggttgctttaaagaaaaaaaaacttggacatatgttgtcttaccagaaggaagagaaaccattggttgtaatgggtttatagaaagaaagagaaccctgatggaaagatgtcaaagtttaaagctcgacttgttgcaaaaggatttcatcaacaacctggatttgacttcagtgaaacctttagtctagtgggcaaactagtcaccattagagttgatctctctttagccatatcaaggggttgggacgtaaagcaattggatgtgaacaatgcatttcttgatggtgatttacaagaggaagtatatatgcaacaaccccatgcttttgtccttccctcagcccctcatctagtgtgtaagctacacaaagttttatatggcctcaaacaggcccctcgggcctggtttaataagttgcacaccagcctcattgcacttggatattctattcatcaaaatctgatagatctctgttcattctacacatatcttcatccactacacttatcttggtctatgtagataatataatcatcacatgaagtgattctaaattcattgccaacattattaaaacactaaattcttatttttctctcaaggatcttggggacttaggatattttcttggcattgaagttcagtctactccacatggggcttcatctattttagtcatagtacgtcagagatcttctcctcaaagctcaaatggaagatgctaaacctcttccaactcccatggcgagtggcttaaagctgtctactcatggccatgaaccatttgacaattctcaactttacagattgattgtgggagccttacaatatctgttaatcactctgcctgagcttgctttcagtgtcaacaaggtttgtcagttcatgaaaatctccttacaaccacaccggaaggctgttaaacagattctttgatacctcagtggcactatagactatggcttaaacattcacaaatcaccctcaactgagcttgttgctttttgtgatgctgattgggcttttaatcccgatgacaagcgctctacctcaggctttgccatcttcttaggtggaaacttaatcacttggcaatgtaaaaagcaacaaaccattagttgatcgagtacagaagcagaatatcgaagcttagctaatgtggtatctgaagtcacctggcttcactctttatttactgaacttcaaattcctcagtctaagcctcctattgtttggtgtgacaaccttagcactctgcttctcgctgctaatcttttcttacacgctcaaacaaaacatattgagcttgatctttattctgttcgtgaaaagtttctttgtcaacaggtgcaagtcaagcatgttcctgccactgatcagcttgtagatggtctcaccaaacctgtctcaagccatagttttcctctgtttcgatccaagctcacaattgcaagtcctttcaattatgagtttgtgggaaggtattaggggctccttgttcagagttagttaaagtggataaaaggttgttgtgagttagttcgtgtgtgactctcttactgttattctatttctctctgttttgtcctgattcttgtactctttacattgtaacaaacataataatagaacaataaatttctttctctttctcttctccttcttctctttgctttcctccattgttgcatctaattttcttgcaattatgaatagaaggattaacaatcctaataagaattaatcctaattttaagttgcggcatgtcatctttcaagagaaaaaaaataaggttgccgcatgtcttgaaggcataataaatcaccacaccatggaggactatctcatagtcactttttgaacacaagggacgtagacaaatacaaccaagcatgctaataattacactagctcacttctaagattttcttaattttgtctctgtcatatcattccatgagtgaatatttgtgggggtgtaatatgacatttagttaattattagtttgttaaatttattactctaatccaatttgaacttaatattcctagccctcaaattaatccatatttatattgtacgatcctcataaattgcgatctatacatgaatattgttctccattttaactatagtgaaatagttcacttaaatgatggtgagcattaatcctatatatatatatataactatgtacatatataaattatatgttttgagagtaacgatgccttccattaatgaagattgattacaaagtcataaggaaaggatcatcagctaaccaggttacaacaccatctagcccaatatatagcatattttcgccaggttatatatgtgctgcaacgttagcacttctgaatatatgctccagcaaaacattggggaattgagagacaatgtccgattaaggtgatcaacataagctcctaagggagagatatattactatggctactcttcaataactggattaaatgtaagcagtctgactccattaaattaatatacttgtatgactgttatagtttttattgtcattagggtatgcttaaatgctatatatcagagtacttctggatattataaaaccgtaacattctgaaattaccctgtaatccaaactcatcattaggacgcagcataagtcaacatacacatgcgcacacatgcacttatgctatatatagatatgatgtgaatacacatagctagagagagagaaagagaaaaaggaaaaagcgggtatatataatacataaatacatgaatataaatatatattttttatgtataatgtaatcataagatatattgaatataactttaaatctcaaagacgtcactgttttattaaccaagaagaggagacggccaaacaaactttccgggcagattataatatatagtttttatttactatatcttctttatatatttatatataagtactactacgtaatccaacccaaccgttatgattattctccagccgctttagtcaacaatatcctaacagctagctgctaccttttttcacctctactttttccaagatcatatcctcctacatctctccaaaaaaattacacaaaaatacaccaattctattttcgtacgcacactaaagtaataataataataataattaaaatcgtgattaataaagataataataaacatatcgacttcaaatttaataataataataataatataataataatggtcacatgactattttgtaataatataagtactaattaattacttgtcattaattaatgaatgttaattacttatcactaattacctgatcatgatcatcagaatgattaaaccccgtagtagtgttataaaataaggtttctccattaattaagctgctgccaacgcggccgaagacaccgtagcttattggtggagctgtggtaataagggagccatatggggcttgaacagcagtagtattaatggtagtagtgccccaattaatattattaggggagcttaaacatggctgagttggtgtagtagtactatcattagtattgttattatgagtagaagtactggaattagtttgcaccagttcctgtcgttgaaggtcatggtcatcacttgcttggagaagacggatttgcctctttaagaacttgacgtagcgaatggcctcgtcgagcatggtggcggtgtccatcttggtgccgccggggacgaggcgctggaggattcggatcctctcgcttatcctctctcggcggtggcgtgccgccacgctctggggatcgtcgcttatccggacgttccgccgcttaggttttcgaattgtggccggatcgatgtccacaggctgcatcgcagcaatcttgtacatcatttccttcatggctccaagctcctcttcctcttctccttcctcctgatcatgatcatcatcaccgtgctcatactgatcgtttgcctgattttgaatattattatcctctgcttcatgatgatgatggtgattgtgattatggttagtactgatcatgttcaaaagagatgatggtgtttgataagggaaaaagctgagagaagaagtattatgatgatgatgatgatgagcagaagtggtggtgggagtttgatgagtatgattattatgggaagaaaggatattgtggtgatgatgttccatggcggccgtctgtagatcccaatgaggtggtgaggaagagttatttgaagtagtaataaacagcttattatcattataagctggagtgtggttattcatgtccatcgcatatatgcctcgggctttgagctttttgtttttctcacttatagtacagaaaatgaggagagagagagaattattaaaggggttgcttgaagttgttataatatataagatatattttataatttttttcttttatctacaaattttataattaccgaaaaaaaaaaaaatatctaattatctatgactaattatgatttttgttgcctaaattttaacatgtattaaattatgatttttaaacttttttgtctgttaaaaattttctctgaaatattgagattgttaaatttaaagatttttgtgtattttgattcaattttactattttagcgattgtttatgtatgaaaacatactttccagacattgatatcaacaaatcaaaatcatgccccttaaatttttatctacgttagactttttttttattattaaaattggacaaaaatccttaaattcaacaatctcaatagttcagatgcatttttaacgactttaaaagttcaaagagcatgatttgatacatgtcaaagttcgagagacaaaattaacactcattagtcattatctatttatgtgatgatacacatagtttattgattctacactttctcttcttataattagagaagggttcaaattaaaatcctctaccctgatgtaaaaaaaaaaaaacaaaaaacttgtcctacttctctttaacaactgaaaacacaataaaagtgtagcacttaaaaaaaaatcacatgcttattagcattactattgggcacaagtagtgtttaacaccttctagacgtgtcgtcttatacttgactaacaatacttcttaaaaattattacattaagttatatatggaacccgataattaattagacaaatagcaatattgatacttaagaaggtactaaacatcactagtactatttctctattttatatgtgcagcattaaacaagctttaaatattaaatttattttgggtttagacgcgtaaataggtaattagaagctcactattttgccagaaagcctggtgtatatccgtactggtacaggtagtatttatacgttaatcttaaaatgtttatctatttatttatttttgtgtgtgtttttcatgatagtgtttattgtagtaaaagtaagtctccagtatatatttgaaaaattgtgaatatttaatagtaagttctaattaaagcttgttgtatttgtgctcttttatgtgttttgtttttcatacgtatacgtatgtgcaaaaaacattcaaactctatttttgttattctttaaatatttaaaatattttattataaaaaacaattacttttagtgataaatttttagtcacgaaatt

SEQ ID NO: 298650 - DNA, 3660 bp, Cannabis indica
ttaaaaaatttaaaatttattattctttaatttaaaattaaaaatattttgacattttaatttttattatatatataacaaattctatatagataaatgtatataaattttctaatagaacctataatttatcatttttctcaacaactctggtttcaatcatagcaaaagaggttaaagtgggttaacatgaacacgacacgatgttttacgggtcgagttagggttgaaaaaattagacacgagtcaaaaaatgggtcaacatgcatgacacgaaatatcgaaacgggtcacataaaatatgacacgaacacgacacgatgagacattttgccagtaccccttatatatgcactaaattgtgcttccaaacttttaaaacagttaaaaattaccccgaactagatatgttgggttcaaggacattttttcaattttactaacgaaaaccatatgtagatgaaattttagtggagacgatttggtgtatgttgaagttcagatggtacgatttgatacatattaaagttcgaggacacaatctggtacatgtaccacattaactagtaaattgaatgaaattgaataaaaatctttaaattcaacaatagaactaaattttttaatggcctaaatatatagtttgcatgatacaattcagtacataacaaagttcagagtgtaaaaattctaaataatttttctatattaatatatatatagagtactagattaaccactttgaatgacctaggaggtgcctaactaaattaattagcagtcacaattaattgtaacataaaaatatgacttcttactgataaataattggtatataatcctaactaataattatagattcataattgaaaaaaccttcatttctagataatatcgagtcgtgtatatataccatgcaattaattgacgagaaagtcttccatatatataagattgattacttattattattagtagctttcaaaatgttaggtatgacaattctatcatctaaatagcatttttctttttctcctatatataatttatatatatagagagatagctagatatagatatatagatatcttaccacaaataaactagacagaccccaaaactcaaaacaaaacttttccccaaaacatttccttattattatatataagaaacatgttgaagcctcctcatcaagtagttcaaaatttgaaatatgagaaaaccctagttcttttgaacaagccattcatccatggctacaacggggctattatcggtatcaactctcggctatttccagtaaaacctaaaccaaaagacgagtcgcttcatcatcatcatcatcatctaccggaaccaaaaatattattaaagcttctttatttctccaatggagaaaagaatacagctagggttcggttagtgtggcggtacaacgtgtgactcctaaagttttggagatttgaattgtctgagaaaatccaagatggacttgataggcttgatgatcttctagggctaaactctttaagtattgagctagttagtgctcaaaaagatccaggtaagtttgttgagctagaattacttttattcgtatatatatcgatcttattagggatgttttatatttttggtacctagcttagttacgttgaatattgtagttataccagacatttgttaatttcgaaactttaaaatgtttatattgtcaaatttaaaattcaaaatagttaatcaaaacacgtataaaaatttactaaattacgcattatttaaatattattttcagcactgtaaattatttaaaattttcatatcaactataataattatatacgttgttacatataattaaaattaagttgtaaggtaggaaacacccctacaataaaagtgaaagtgatgctgcaatgtttctatgtatataataatcttttttttttttttttaattttagcatattaaatgatgtgttaattatgattgatgatgatgatatacatcttaattatgaactttaattagaaatatgaagataatatatacatgaaattgacttgtgaatttataactgacacgcattttaagtttttttaaaaaataaatagggacagtaaaaaaaaaaatgaaattgacaggacctgaaactagtgaatttgattcggataaggaagcaaatagtacttaatttaaagattgtggttggaattaatataggaaatttaaggaaatcaaaataaaattaaataaatattattaattactataaaaaaaactactagttttagtgacaattttttagtcacaacataattttttgtgactattaatgtgacttttagtcatatcataaagttactaatgactaaaacatagtaattagttacaagctatcactaattgagttttagtcacaataaatattgtgatcgactaaaaacatatttaatcacaataaattataatttttgtgactaatacttttagctatagactttttagttacaacataataatttataattagctacaactttttttatctttagtcacaaattttgttgtgattaaaagtaaaaaaaattgtagtaaataattatgaatgataacatatatttgatgtgagacatatatcaaatataatataatataatatgtttatttataaaacatattatttactatatatgttaattctaaccacaaatacaagcattttcattgtgattttttttttcacatttagatttgaatttaggattgtataaactatctcttatctttataatcccaaattttgttatgattatttaaataatattccacttattatatatatatatttatattttgtattttttttcatgattagtaacggggaaagaacgaacggttaaaggttttccaaaaagacccgactttaacatattttcatcagatgatgtaaaatacgaagcaaaatttgacataccgaaagattttggagaagtgggtgctataatcgtcgaaaatgatttcgaaagagaaatatctttaaagaatattttactcgaagacttgccctccgaaccaagcacccttgaattctcttgcaactcgtgggttcagtccaaacatgatgtccctactgatcaacacaagagagtcttcttctctaataaggtatgtagtgattcatttcaatctctacaatgactatgaataatgtcatcagtatagtccaaaaaattgtcaataaaagttgtactgacaattaatcatattaaatttatataataattcacactacaacaaaaactgtcatcaggagcaatttatgtagtaattcatattccagaagattatttggcgtgactaatcattcttgatcgtgcctgaaaatcgatatcaataacaaaatataacaacgtgccaaataatatcctcagtacaatctagaaaattatcaataaaaactgtactgacaattaatcataggaatgagttttggtatgactttgtccatagaagttaacctctacggacaaagcgatattctcattcctacaaggagagtatgtcatccttgtagatttagatgtaacgtccccgcttcaagcctccattgggtccttacacccacggaatgtatggctcttatacacgagtacgtca

SEQ ID NO: 298651 - DNA, 589 bp, Cannabis indica
tctagatttattaattgtcttcttcgatatgggcttttcttttaatgcactgaactttgcacttcaattggttccggttctttgacctaattttagcaatgtaagctaggtccacaacaatcgcacctcacgaactccacgccagcaccactacttccaccaccaccaaccgccatggaatttgttgtttccttcttcataagcctcgctaccattattctatcaactcaaataatgaaataaataaaaacctaacgaaaattaaaatcaagaattcaccaaagaaattatatataaatatatatggattgaagatataaatgataatatcctttatcatcaaagacataagagagagagagagagagagagagagagattgaaagcaaaagtctccattgctttcctaagtcgtgtcaaatcagaattgatataaataaactgagttagatcagatccgatcttaaaaatttgtctagtagggtagggcaagacagatcatcatctagtctggatcaagttggatcatatccaacctgatcagtggcggacccaagatttaactttaggttggacgtagttatacatt

SEQ ID NO: 298652 - DNA, 3129 bp, Cannabis indica
tttaaaaacaatattgaccaaaagcgaattggtttttaacacagaaaacaacattttgttattttcaaaattcttgtttttgtaactttgttttctgaaaactgtttttaaaaaacaatgccaaacaagccaaattttttttaaaaacaattttctgtttttaaaaacaaaaaccaattttttagttttgatgtcaaacatgcactaattttttttttatttcaaccattacaccaaatttcatatttttgttattttattaatataataacaatattttaatactaaatatatatagttatttactttttcttctttgaagtattatttaattattaaaaattcttttttaaaaaatagtgtggtctacagtgttccactaaatttggtagaacagtgtttacaaagtcatttatgaggataagtttagtgtcccattgaaataaattaatatagtgtgaaactacaatgtatttgatgttttagtgtcccattagagatggccttagtatatatagacaaggatattttatattattttatgggtctaacttaatttttaaaaaagtattgttattagtggtgtttcacatcttctacatatatcgtcttggtattagctagcgatatttgacccaataattaattaaactataacaatattgatacgtaaaaaattactaagcactgataatcacaactgatgtcgtttaccatttctctttccaaaatgcatctgtatgaaaagagctaaatttctttctcaacttgcaaaataaacaaacaaaaatttgaacaactggcacacctcttcgaaaggacctaccaagcaaaatataataaataaactaatatttaaaaaaaaaactacaaaattagctttttcccagcactatataatagcttccttaattgatagttatgaaaaagcaaaatttccacaagcaaactgtgatttctcttgatatatacaaagacgtatatataagcatagacctagataattaattttaacaagtaagcttgttctttattagagtgtatatatttcttccttcttttccttcaattttttataaaagagagaaataatgttaccagaagactgtgtttcgacgattttgtcattcacttctcctttagacgtgtgccgatcctctgcggtgtcgtccacgtttagttctgctgcagaatctgatgtggtttgggagagatttctaccctctgattatcaccaactgctcttaagattggtcaaaactactactaattctgatttttacacaaagaaagagctttactttcatctctgtaatcctcttctcctagatggaggcacaaaggtaataacatataaataataattataaacccacatgacatttccaattcctttaattatttttttttgtaaggcaattccttaatatttaaatttttcatcatgttccaattttattatcagagcttcaaaatagagaaatcatctggcaaaaagtcttatctactctctgcaagagagctactcataacatggggtgatgaaccaatgtattggagctggaaacatgtaaaagaatcaaggtttgttggtactatattttgaatttctctatataaatatatttgataaaaattctattaataatggataaggtgttttatttttgtttttttgttcagatttgctgaggtggttgagctcagaacaatctcgtggcttgagattcatgggaagattagaaccaaaatgctgtctagtaacacaacctactcagcttatctagtgattaacatttccaaccgtgcgtatggactcgacacggcaccgtttgagatatctgttaatgtaggaaaccgacaagtgtcttatggcacagtttgtgtcagtggatatgacaagaataagatgcaagaaaaaatcatgaagcagacattgaagacgacaccgtttgtggaggagaaaagaacgtgattattagtgaaagaacgacggttgggtggagattaaactaggagagttcttcacaggtgaaaatgatgatgaggaagtgaagatgagtctaactgagacaaagggttatcatttgaaagcagggctagttattgaaggtattgaagttaggcccaatattaagcattaacaaaagatattgttgttgattatttcttcttttgatattgattctttcattgtttttttattgtaatgtttcaaaataagatgtaattaaataaatatatatacgtacctcgaagaagattttcttgaaataaataccatgttgtttgtttggttgcttgatcttatgttcaaattcaaggttcactaattaattaattggaacagatattcctcttaatttcttcacattatttccatttttagaaagtttttcatcaattatatatgtgctcattttttcactttatggcgtcattcataccagacattggaaaagttcatcatatcgtagcgcggtgggtgggtgggtgggaaaatcaaccatattgctattacattaggatttactagggtactgctaattttttggctgtacgtatatccaactttttagtttgacatttggcagtggaacattatgcacactgggaagaggaggttggctaagcattaggtgcacatcgggtgggttttccatgttatcgagttttcgggtttaggtttttcgagttcggattttgaaatcttgggacagaacctacatgtatgaagaccgggttttcgagtttcgagtcctggtgggttaggttcaggtgggttgggtcgggttttgagttaggctagtttttttttaagaaaaagaaaacaatttgttaccaagaaattagaattgagtgtattttttaaagagttttttatggctaaatcttcccaagtgttcttttacttacatttaaccctccaagaattttagcggtaaaaccctccaaattactgaactagtagtaaatttaaggtgtcattcagttaactgtcattatgagctgtttatgtgtacactcttgtacacatgatacgtttatattggtgcaactaatattattatttaaaaattattttcaaaatttattttaaaattagataaaattataaaaataaaataa

SEQ ID NO: 298653 - DNA, 1434 bp, Cannabis indica
ggttggttgtagtgaaaataatggtatcatccgcgaacatgaggtgagatatttcaggagcttcccgagccactttgatgccgtgaaaaaagcccttgctttgctcaagataaagcaaccgagagaacactttattgcacatgaggaacaaataaggtgacatgggatcgccctgtcgaattcccctagctggattaaacttctttagcggagtgccattcaaaaggatggaataaaaaactgtcgtaacacaacacattatcatcttgataaaatgagggcaaaaaccacacttctccgacacaatcttcaagaatccccactcaagcttgtcgtaggccttgttcatatctatttaatagccataagactcctttcccttttttcttttttattacatccatgatctcctgagtaagaatggaggactcagcaatccatctccccggtaagaaggccgactgaataggagcaataaaatgatcaagaactccccttaacctttgagcaataatgcgggcgataactttatagacaaagttacataaagcaataggcctggaacgatcaacgctatccggattaatgcctttcggaataagacaaatgtaagaatggtttaaacccggctccaagacacccgtggcaaaaaacctctgaatacatagcaccacgtcatctccaacaagattccagcacttgcgataaaaacaaccggaaaaaccatcgggccccggagctttaaggggatgcatctgaaaaacatgggagtggatctcctccttttccgggatagtagtaagcatgtaattctcaacagaagagacagacggactaatcaattcttcgagtccttcataggaaacattcccgtttgaggagaaaagattaataaaataatccctaaggataaaaccaatttccttttcattagaaacaagcagcccactaggattcttgagattccaaatatgattccttttccgacgaactaatgtggaagcatggaagaaagaagtattcatatctcccttagaaagccaaagctctctcgaacgttatttccacattgattctttcaaactccacagattagacaggttcttcaaaatggcctcctcactcactggatcagagtcacgaacttctttggattgaagagtttggagctcgacttcgagatctttaattcttttgtcacattctccgaaaacgttcttgctccaccaacgaagagcatgctgagttcgattaattttctttcccaaacaccctgcctcctcgttgggaaggcgacgtgtccaggcctccttaatcacatcccaactgacccgtcttcaaaccaggcttcgaaaaaccgaaaaggcgaaagcctttagctttggacactgccgaatcaaaagattataggcccatgatcagaattagtaataa

SEQ ID NO: 298654 - DNA, 5289 bp, Cannabis indica
aaaaaaaaaagtctttaactatcactaaagttagaaataaggttatttactcacacttttgtatgaggatttggtgagaattgaccattttaaagtattcaccatcatatcaatatagcaagttccgagttagcagtttttaatttctataatttttatcaaatcgaaatattggtgagaattgatattaaattacaccaatctagccatatactatttcttatggtgcctaacacattgtttgcagcagcttataagaaattgcacctctccttaaactattttctaactcactgaattatatatagttatatacaatactgtatatatatatatatatgatatatcaaatatatctacctacgtacggttgtacgagtttgtatacgcatacacgtagtagggatttgatatttaacagaatataagcatgtggcaatttggaagacaaaaaacattaatgttttttttattttttgaaataaaaaataacaatgttaagagtagtatatatatatatatagcttcctagctaatataataggcgtgtatatatatatatgacaaatgaaccatcaagagagacttgtcgtgtgggtactaactccacagaacttgctctaccaaagacccactcatcacatgcgttggtctccctaagttccattaatttacaatacacacatcactacgtactcagagtaagaatcatgctctaggattgctctttctctctctctcctctcttgttatttatttatttgagaaaattaatataaaatatttgcaatatatgctgtccaaacttatcccttgcatgggatcatgcctataaatagaataagccacaagctaataaaattcacaattacacattccatcgaaaaacaaaacaccccaacacacatagctaaaaagacttcagctcttctctatatacacatcataaattattttcactaccaaataatggcgaagcttaaaaagatgaacagggccaacctcaaaaccgtggccgaaaagcttcaaaagatgagaataatgtcaactttaggtggccgtaccaaatccaactcagtgccccaagatgtgaaggaaggtcacttcgcggtggtggcagtggcggccggaggagatgaaccgaacaagaggttcatagtcccattgggttgtcttacacaccctagtttccaaaggctacttgagcaagcagcagaggagtatggatttgaccacaacggcgcactcacggttccttgccggccaagcgagctggaaggaattttggccgagcagtggcaccagacggacgaaggaatgtcttcttcatcatcagtttcttcttcctcatcaacaacatcttctaataataataataataataataataataataatgaaaatggcaggattaactggacctcttttaaaaccatggtgcacagctactagtttttagtatgtatataaaatgagtcttatatcaaattttatttgattaattagtaacttatttatttattttgtaatattagagagttgctatcagttattcaagtgtttattttctctctgatgatttggaggatatgttatatgttcttttcctatggctcttctatatgcactttagtctgtatctctaacattatcctccaatgcaaaatataaacccaaatttgtatgtatatacaaataatttactaatatttacacttcaaggactaatatatttacaaagaatttttaaacaatttttttaattaattatagtctatttgtatattctctcgttaatattttggatcaacaacttgaactgagacttggccccagccccagtgagctctacccattttttctcacctcaatttctcattcatttttatatatataaaataaaaataaaaaataaatagtacataatactaatacttgtatttttttattttatatttttaaaattaagaaaataaaagtaaaaaatataaaataaaaagaaaatttacataatacttttattttatatttttaaaattaagaaaataaaagtaattgtagaacattcttttttataaaaacaaaagtgttattaaactcactcgcactttttcataaatttgtatgaatttacagtactgatatcttcatctatatcaacattttttttttcttggtttggaccctcctatttaaatttttctcacaattgacccttctattttcttgctctagttctacctaaaaaaaaaaaaaatatttattcacgctttaaattaatataatctcaccattaatgaaactaatatattacatatataattcaattaaatgttatttttgtgacttcaaaaaattaaaagttatttataaaatgtctctatgaaataacaaagaatataagagatttatgccaaaaataaaaaataaataatgatatcatcaacctccttttacaacctctcagtcaatattcgtgtctgaaaacatatgtcgtaatatttttttattaaattatttttacagtgacgttcattatacttacaacatcatctttataaatttttaaaatattttaatagtttacattaccgaaaacagattttaaattttttgaacacacgtgatccataaactggaatattcagaactttgtttatggtactgtaaactattcaaaaaaatttaaaatttacagggatgatattgtaactataacgaatactggtatgaaaaaaaaaattaaaatatattcttgtatgtgattttaggtatggagattgactaagagccagtttagcacaactctgctacgggaaaaagtaattgtagcagtgctgtgagaaaaaacagttgtatcagaactgtggaaaaaagctgagttgcgtgtttggtaaataagtgttgtaaatttttaagattctactataataatgagaatgttataatctagtttattataatcataaatctatataaaaaattatgttatacaaaatttttatttttgatatatttttaattattttctcacaaataaaaataatttataataatttaaattatttttttataacttgtcgtttatagaaaactgctgatgtggtttgctaataataaaaataaaacatataaatattaaataatttttgaaacaaaataaaaaataagaaatttaaatattatttattttcaatattttttcttttaaaaaagatatttttattttttaatatataataaataattaaatatgtttttagtaataaataattattagtcttttaagcaaaataactttttctaaaagtgagttgtaccaattttaatttttagttgtagcttcttcataaattcttcaataagctattttttaattgcttactaaatatttttttatcaaagcttttttaaaaagtaatttttagcttttttaaaaatatacgaaactcgacttaagatattatattaggagattgtaattagcattcatttacaaaatattacaagtacaatttttatcacttaaaataacttttttcttattttattaaagtatttattacacttattaatatattttagctttttttatttgtcttttgggataaagatagggaaaaaaaatgagccctcccaaaaagaaataattagtgagagaatagaaagtgcacaattgtaatagtttaatagtattttcgttcttaagaaacagtaaaaatgttataatcaccataccacagtatttttttttttttgtaaaaattgtgtcaattttagtacttagtgtaaaatcttcaataaaaaactcactagttggataaactcaaaaaagaaaaattaattaatatttttacactatcatattattcccctaatatatgtaaccaataacttttatttatagaaatttaattttttgttaggttataaattattttgtccccataactttgataactaccaagggagatacattacttttcttctcaatttggcttgatgacatggacatcgattttgacacacggtacgaaggaaaaaattgtgggacccacatcccaagtgggccagtttcatctacaaaatgggggcgcctaggcttagatctcactaagtcgtttttaagcttcatcgccctacaaacagctcaaacaactataacaaagtacttgaaagacatcccacaatcaagtcttgagccccgataccgattttgtgacacaactatacctgggggcgaccaagtaggagttaacacctagactgacatcatgttgtcatggacacacgacaactagggtttaggttttccaaaacttctttagaacctaattcctcatgtctattaaggaatgatgtgtatacctaagtttttacaatcagtgcctaagagagctacaagccaatatcagtgcctaggtgcctaggtcacttgagtgacatctctaagcatctttaatttttccgaaacttgatttgtgagtgcatattccaccaaaaagatcattggacatcaaaaagatagaatcgagagaattttaacctagacctaatgcccaggttaacatgtagttaacttggggcacatacatgtattttatagagatgtttcccgaacatctccttcagtttcatcaaataagaaaaaataatggctttcaaacttcaaatcaaaccatttggaggtagaaacaactgaggacgcacccagattgcctctcccccaatttactagtgcccgagtttccttttaggggcacacctgggctcaatcaagctttttgatgattccgcgtgagtaaacctcaatgaaatctcgttccaagagtgcctatttgttatgtcatcccaaacccatcacaagctgcaggttgcctattgccctgcacctaggtcatgcacattgtaacgccctagtagttaatgcacgttacagtatttccttaattattgtgctaacctttactataatcaaagggtttaaaaataaaaagtacatttaataaaattttaatgataattaaaactttactaagcataattttttgtttataaaatatatacaatcagcgatctcaaaatctagttacaaaaaatatataatatgccgtatcaaaattttttgtctatttacataaccaaaaaggtgttagtggtgtctcgaagatcacaaccctttaggcttagacaattggatatgtataatcctcaccaagcccatcactcactgttgtttagccttgtctttgtctttacctgcacatagctattggaaattattttacc

SEQ ID NO: 298655 - DNA, 3616 bp, Cannabis indica
atttaaattttgaattcaatttatatatatttatcttatcatcaaaattaactaaaatataataattaaatgtaaaaaaaatattagttgtcgatttagacgggttatatatgaacatatgagcttgctaaatttttgtgatgtttaattactaaattataattagaatatataaatcagttaaagaaattaattaaattatagaatattaatgaaaatcattattattatatattatgctaactgtttactaaacataaattaaaattattttattttgtttgtatcattcaaaaaattattgaattactttaatttaattaaattttcttttttagaaaaaataaataaactttaatttattatgtaagatactttttaaaaaaaaaaaataggtttatcccttatattttaaactactacaaatctatgctagcttttactttaatttttacaccagaaataattaaaaaaaaattgtagtaaaagctattacatagattttacttcgttttgagtattatggcctaaaaagaagagctaatgctttggtttatcataaacggagtcaaaagataaattgggggcattttagtagggttttttttcaatattatacttaaaattgattttatttgtaaaaatacttttaaaaaaattatttgtacaaaaccgttatgccacatcagcatatatatcgaaattcaaaacaaataccgaaaataaaaaaaattagaaaaatctcgtttccaaaaattttcgtttttttggagttttgaaaaaaagtaactatttaattgttttttatgtgaataagatatcaattggatacgtttccattaaaaaattattttagaattttacacatatataaataataaaataatcattttaatatgtgagaaacatatatttttctctccaaaaaagaccactaatgttaaaagaaacttttttgtttcttttttatatttttaagctatattatattattttattgtttaagataccttgagatggtcttagtacctcataaaattggttgataaattaaattttgtttaagttaaactttgattatttttgttaactaaatacatagaaaagaaatttaaaagttacttttttgggtcatttgtttctgtagtagcaaaaagatatatgcttttcatatattaaaatgatcatcataaaaaatagattgcaatagtacaatttttgagtcaaaataataaatagtgtggctgaaaatttttttacacttttagaaaaaaaaaaaacgtaataaggctgctaaataattattggtgttagaaaaaaatttttttttaaaacttataaaatgtaaatagagagtattttttaatatttaatattaaaaatatataggtgtaaaaaaaaaaaaacttaaaaggaatagtgacacatagtcacttcactcgaataaataaataattgtatctttttatataaaaaaagaaaaaacaaaataaaaatctaaaaaagatgatcagtaaatttagtatttaagaaaaactaattaaaataactaaagaaacaaaaataaaaaataatgttgtcaaagaatattatattaataacactagcagtattattattcaaagcagaggtattttaaacaataaaataccagagcatatttatgtaattattttcaaatacacgtattcctatgcaaataattctttttattaatttttttttttattaaatcattgagttatattgcacaaacaaaatttttacacccaattcgcaccccataaaagtcgagatctatatacaacatgatcaatctatacaatcaattacatttttgtattataatgcagaaaaccaaactcgatcactacttttgattttgcgagagcatgaaactctcaatccgaaccttagtagaccactttgtttcttcaacaactctaaccggactgaccactattttttgccaaatagagtcattcctagctttccaaaggttgtaaaccagacctgctgtagcagcagctagaacacttttcctgaattttgacactttggctctcccgatctatctgatcaaatgatggagactactagcaacaaaattaaaacttgaccatactaaacaagatccttttgaacctttgggttagctaaacttttggctaagaaccgaaattgaaacaatttgagtttcttgattaagttagtatgcattatttgttggattaaaatctctaatgtgggctcatatgtatttgtgtgtattgctatatgaagtttgatctaaataaagtgatcatcttagtaattgtggatcattaggtattaaagtgtcatgggctaaatgtgtagataccttaagtgatatttctaatttattgaggggctaaattagaaatacttaaaattaataacctagttataggttataaattggtagtgcccccaagaaacaagagtcaatttctattctcatcttccccatcaagagagaaaattagaaagccctaagtcttatttttttggaagatcattgcccaaaattatcacaaagattatctctacaagatggattaagatcatcactatctatagattaaggtatgcttccgctatttgagttcttctctttgaatcaacaaaggtattctttatatctattgttatacactcataattatatgtaatatgtttatcttgttattgcatatcttatgagtgataaagatttttaacattattttcttgaaacccttcacataatttctctttgtatcgttttctttcttttatttccaacatttgctcttaatcatctttacctccacttttaagtatctcattttgatagttctcttattgaatataggctcgatctctttcagctaacaagttatataaatatagagagagagagagagaaagtgagtattgtaagttatcaaaatatatttataatgagttacgtaaagatattttattatttgtgaataataactaataaacatttgtatttttcaatttattagttagttgttaagagtagtttttgtatattagttttgccacttgctctctctttaacatgttggtaaattttgttacaagatataataacagccaagactttttgtactcatcactatataaatacattttttagctcaagaactagtaaacttttgcaattcattgagatccattctctgaattatgtctagataagaaatgtatagataagttgttctcacatggtattaggaagtctttgactaacgtcgatctgggatcctaaaaactcagaacgtactgcatcaacccaaccgctaccaaccgctgattagattttggtaatcactctgatgcagcaatggaaaccttttcagaattaattgaattcttctctcacagttcgccccgattgaacaaattaccttgcatggaaatctcaagtgattcccactgtcatcagccatgtcctcgatgatattctacttaccaacattgctcatgttgggatttatgtcctaaaagtaagtatttattgttagacatttatatgtataatataaaatatatgtatgtgtatataacatgcggaataaacaaa

SEQ ID NO: 298656 - DNA, 1260 bp, Cannabis indica
atatatatatataaatatgaaaaatctataatacagataagggattatgatagagttaattaggtaagtaccatcaagatggcctggcaaattgcaatgactattactccttggcttcctgctaagtggagtcctgggatgccaaggtagtctagtgtatctccctggagaaagaaattaaagcacagattagagaaattatattacattagattggattagattaaagggttggtagtagaaagagtttttagcataataaacacaccttaatttcttcattattttgataatttagttaatgaattctaaaaaacagtagttaatatttttcacaatttgataagaaaatgacaatcaagtatctgattgaattctgtagagagtaccaaattagttatttttttttacattttccctacttttttttctttctccaccaaaatctaacttccaaacataaccttaataaaaagaagaaaactgaaccttgagtttggaatatccaactcgccaccatacaggttctgcaaagtgaaaggctccagtgagatttaatatttcaggaatcaaagcaccaagggctgccagcatagcccaacgagcatgcaatatttcaaagctgcaatgtaattcatgtaatgacagaattagtagtaagttactttggtagtactaataacattagtattagttgtagtgagttagtagttggtaatactataccacccaccccaattagctgcaatgacagtattagtagtaataagatacttagcagtattactgagttaagaaagaaaaggtaataatgtggtggtagtgagttagataccactagaattggctgaaatgacttaactcaattatgggcttacttgaaatacttttgaaaagccaacggatctttactgagtccagcaatgtcaaaaccataatccccaggaagctctcctgtgagataatgaggataatcgtagggaataggaccaagccacctcggacgctcttctccataccacaagctttatcaaataatcatacataaataggatagaaaatacagcaaaataaataataattatgttacacaattaatttgtgtcgctgctaataaagaaattaacaaataacagtcataaattcaagtgtctgtatcgggtaagttcacgagttggagataagtaaactcaaaccgctgacatccgccataaggtaaactactgcctcacaagcccccgactgattctaccatagagg

SEQ ID NO: 298657 - DNA, 3714 bp, Cannabis indica
tcacaaactagacatagtctaattctagaattataattgataaatcataaatcaattattgagtcttacaagcagtatggtctcaactggaatggggaccatggacctatattactgagcctctaataagctgaaccgaatttactaagtaaattccctaacttattaattccttgttgaatccactcttagaacttggaattgcactctcagatatatagagcgctctatatgttccacgatatagatacgctatcacatttaaccatcgttataatcttaatttgatcaaagatcctctatatagatgatttacaccgagaagggataaatttaccgcttcacccctcaatgtatttggccccatataatgcctctccaaacattagagcaccaagaaccatgtcttgcctccaagaattcagaattcggaaaataaagggcctttaacacttgggcaaacaaactatctggatttgtaacaagtttctaaccttgtttcgccaaaagagcttggttgaagtcttccaagtccctaaaccccatggccccagtccatttatctttgcataacttctcctagttacccccaatgaatttgatgcttcgctgttgtagaaccccacctgaaacgagctataaggtcttgaatctcacgaatcaaaccctttgttaatctaaaacagctcatgatataaaccaggatagcttggataactgattttatcaatacttctagaccagcctgggagaaaagacccatcttccatccttgaagtttatcccaaaccttgttacgaatcagaccaaaagcttctgtcttatttcttcctacaaaggcagggagactaagttactttgtatggttttctataaaagtaacccccatagaagcatcaagtctctggccctctgtccttgtaatcttccgagcaacacataagttagatttactaaaattaatgcactgacccgacaaggaagaatatacctaaagcacctctgaaatagctttcccctcctcaactgaagcattcataaagatcagactatcatcagcaaataagagatgtgtcaacctactctcaaggtgaccaaactggagcccatgaattttgttggctcggctagctttattaatcagacaagacagcccctccaagcaaataagaaacaagaacggagatagagggtccccttgcctcaaacctctctccggaatgatgtgacccctagcctctccatttagtagaacagagaaagtaaccgtcttcacacaacccataatcttagtaatccatcgttcatcatagcccaagcacttcatcatctcctcaagaaaaccccactcaactcggtcatatgctttagacatgtccagtttaagagccatcttcctaccattcccaaaccgacccttcttcatacaatggagactttcaaaaccgagaatggcattatcttgaatctgtctccccttaatgatgcactctgatttttagagattaccttatccatgcttcgtttcatcctatttgcaaggcatttagagatcaccttatagactacattacatagacttaagggcctgtagtctcccaccatagtcggatcctttactttgggaataagacataataaagtgtcgtttagacagccacaatccatattgttatttaagacctccaagcaagtagcaataacctcatgtcccacatcctcccaatgattatggtaaaataaccccgagaggccatctttccccagagctttgagaggatgaatttgatcaatagcatctttaacttcttccttcgagaactcttccaggagtataatgttgtcgtgataagatagccagttaggaacacaccatttaggatgtcagccatattaatattagaccctgaagaagaaaaaagattcgagtaaaagcgaaccatgatgtcctcaatctcgctgtccgaattgcaccacctcatttgttcatcatataatccgttaattgtgcttttcttcgtccgttgggaggccttgtgatggaagtacttagtattacgatccccgtgagcgagccatagagcccgacttctttgtttccataaaatctcctccttagcctcaacaacattaagatctctttcaatccttcttcggttcttccaatccgtttctccaacagaagaagagagattttttagttcctcttttagtttcttagttctagcccccaagtcagccttttatctttattccattcatgaaggatctctccacattgattaattctccccctcagcccttgaggagagccccaattggaaccatcaagccaaaccgactccactatcttaccacaatcctcttccccagcccaagcttgttcataatgaaacctagatctccattttggagccttggttgaaagcttcttattcttgctagagctaagaagcaagggacggtggtccgagttccaccaaggaaggagggtgacttttgacatacaaaatcttctaaaccaatccgggttagccaacaccctatccaacttctcaaaaaccagattgttgtgacgcccattacaccacgtaaactcgccaccttccatcctaattaccttgaagttgcaataagaaatggcctttttgaagtccagcatctgagagtcttgtttcaaaaacccccatcttttttcgtttaccttaattatctcgttatagtctcctccacaaatccacgctccctgaatcaaatctcgaagtctctccagcagttgccaggagtttttcctaccacccggatcaggatttccatagaacccagtaaatctccaagcaaaacccagaccattctccacaatagcatcaatgtgagaaatagtaaacgatttcacactaacctcaaagggctccttccacaagagggccaacccaccacttttacccttggcagccaccacaaaacagctatcaaaccccagaacaattctaattctttccatcgcaagttcattaagtctagttttgaacaagaaaatcatcccgggatgatgatctttcacatgggagcaaagggtcttcaatgtccaggggttcccaagcccctaaacattccaaaacaagatattcatggctctcagcgacccagttccactaggtgcgccgcttccaagttcacttcagagaccaaattagaaaagttagaaaagccccctagtaccatcacctccccagttctctctttgccttctgccgagacctcttttgttgccaaagattgagggtttgtcttagtggcattctttttattcttctgggccactactttctttctcctttcaccattcaggcctgagatgtcacccccaacttcatttttgaatgtgattggaatctcaatccactcacccccaacttcaggaatacccaacttcggattcttttgaaaaccaggaccttccctattaattctcttccccaaattctgctccatgtcaacatccttattcaggaaaaccccacagtccgcccttctctttgaacccgagcctccatttccctcaaaatcacattcaatccggtggtcatcaatcctatccatcagattcacacactcataagacaaaagagagttagaaaccggtaccttcatttttcagagaattctggttggtgattcttggcaaaagatcgtgttggaaatattttacca

SEQ ID NO: 298658 - DNA, 3391 bp, Cannabis indica
tcaattcaacttgagctgcaatagaacctggtaagacagaccattgttgagaatccatgactgatcactgccagccccaataatctgagagttatctcagatcacacagatactcattctttgtcgaaaccacttgataccagtatgttttgataaaaggcacatattatttcaaatcaaagccctttctttctcatttcagagtacaaacccgaaacagcagcttcattttcctccttaagatagcctcgtatcagaatatcatagacagccttgtcgggagagattctgcgttttaacatatcatcaaaaacctgtttggcttcaatcattagccccttatttgctaaaccaaaaattattgaactataagttaacaaatcaggttcaacaccttcctggaccattttactcttaagcataaaagcttcaactaattttccctgtttgcaaagcccagcaatccaagaagtatacacatacttgtctggaacaaaccctgcatccaacatctccctggcaaccatttcaacttccccgaacaacccttctttgcacatcccatcaataagcacagtatatgagatttcattggctttttccctgcaaaaatgccctctagcatcctcaagatgcccatgcttgcataacccgtccattaacgttgaaagagttacaatgtccggttcaaaacccctgaccaataagtctcggtacacctccaaagcagcttttaaattcccagctttaaagtgcgcatccataatggtcgttaacatgatcttatccggagacaatccactctcaaccatagttctaagaacctcagatactttatctaacatactgttcttacaaaatccccatactatcacctcataggtggtgatatcaagcctaattcgttgatcccgcattttagttatatactcaatggcgaaatcagtgttcccagctgtaaaatacccatctatcaatgaagtgtaaacagctgaatgaggcttaaccccatcttccaacatcttagaaaacatacctctgctttttccaactctcctcgtttacaaagcccatcaatcagtgcagtgtaagtaacaacattaggcgaaaccgaaaaactcttcatttccccaaacaacttaagaccaacatcaacctttccacccttacaatacccatcaatcaaagaagtaaaaacaacaaaattaggtgaaaccccaacactaatcatttcatcaaacactttagagcccatacacaaatccccttttttacaatacatatcaacccaagtactataagtaaccacattaggcaaacaacacttccacatcaaacccatatacacaaaaaactctctctccattttcatcttagaaaatgtattaaacattatattaaaagtaaccaaatcaggtctacactttcctaataaacacatcttattattcacaatgaaacaagcttgttcaatatcagaattcttacaatacccatcaatcaatgtattgtaagtgacaacatcaggcaaagacccgaatctgggcattgaatttatgagactttgagcgaaattaaagtgacccaagttgcagagaacagagagaacggaattgaatgaagatgggtgaggaacataccctttggagaggaagttggagaggattttaagagagagttgaccacagttggagatggtgaggcggtggagaagcttgttgaaggtgaatggagttggaaactttgaggcccttcgcaggtgagcgaagtagtggagggtttctctcaccatgcatttacaaagggagttgctcaagaaaggtgttttaagggtttaagcctcttaagttcttaacccctttacaaccaaaaaaaaaaaaccatttgattgattttggacattaatttctatttttttaagagtaatttagagcatgaatgaatattttagttacaaataaatttaatttatgagagtaataatatataaataatatttttagaattttgattgattttgaattacctcatatactgttttttaacttttttttttcaaatttacggtttgagtttttaaagtggttgcagcgctacttgcaatagaggtttctatacgattttttgttgcgatttaggttgcagcactagttgcaataagagtttctatacagaattccataaaaatacaaaaaaaaaaatatatttaaaagtgcaaaaatgaaaaagaccttaaaaataacacatattgacttgacacttataaaataactataattaaatttaaatatttacgctgcaaattatttttttaactaaaatatatcttcaccatattatttataattatttatattttttttaagttcaccatatttttgtataagacaaatatatgtatttttcttaaaataaaaataaaatcctaattttacgataaaattgtctaaaatcttgcattaagtggacaagatagatgacattgtagtcataaaatcgacaaaaactcaacaaaaaatgcaaaattgaaaaaataccataaatttaacaacacagccaacccgaactaattcgatcaatccaattaaatattttttttataatatttattatatatatatatataatttatatacatattttttaaaaatatatgtaattaaaattgtattatttacaagatttaaacttttgattgaaactatatttattttattatcataattaattaaaataataaaattaaattgaaaaaattaaaagtcaatttggacgagttaattcaaccaacccaactatttcgttgaagggtttactatttcttttttggatttaaattactaatctaatttagtgtctcaacttagtgtctaatcaattataaaatgaaacatatcaactaacttttaaatttactaaaaaaaaacgacaaatgtacatttcttaagaaaaacaatttgtagctaaagtattacttccgatttttatttatttaggtggcttttggtaacatttttttttaaaaaataaaaataaaattttgtttttattttttaaaaaaaataaaaatgccttctataactattttgattttttaattttaaaacaaaaaatataaatatgttctataaatttcattttttgattttatttaagtcagatctaggtcggatctgggtccgagttcaaggttcggggtctggggctggcaccgaggccaggtttggagtttgggtctgaagtcgggactgggttttggtctagggccacgatccgggtttggggtccgagtttgagtctaggcttgatctgagtcttaaaatattaactaagaaaaaaaattatttaaaaaaatagttgaaagtcacttttttattttcaaaattttgat

SEQ ID NO: 298659 - DNA, 3657 bp, Cannabis indica
tatccactaatccattaatcctcatatgttttcatttatgttttatgcactaccgcatatgtgctcggagtcaatgctattttcttgttttaatggtttccttattactgttgtagggtcacatatccttccccttgattttggatcttttctcattcatgaccagtggagtggcaataaaggctcaaaaagcaatttttcaaagagggaaaatgcaaccacatcataaacgaccaagttttcatactggaaattttaacatacgatatgatacaagaaatcttagtattaacgaaaaaacaaacgaaagtttcaattctgaagatacacaagacttacacataaaggagtcgaatattgatcaaatcggatgctgtttagaaaccatgcatatggaaaaagagacacattcagacaaccaggtagtttgtaaattttcaaatattgttacgttttggctttatagactcttgtgtctgggattttttttttgtttgtgattttgtgtaacattagttgaaattgaactgattgtgttgatgaaggtctcattgattgaccagtcggttccaccaagcagttcgtatcgtttagtttcagtggtggagcactttggaggggctggcagtggtcattacactatttacagaagcgtgagagctgacccctgtataaaagaatttgacgaaccacaagagcctgattctttttgctggttctctatttcagattctaatgtgtgtagggtctctgaaaaagaggttcttgcagctgaggctagcttgctgttttatgagaaaatatatgaaggttgactgatgtgccttctatatatggctggttaatgttatataacattgttttgctttatgtagagttataagaactcttcctaaaaaaaaaaggaagaattattatttttttttgggtaatttgcattaactaatgtggagatacctctactaccactagatataccaaatcacaggaaaatagatgaaaactgaagaatgttagaatgaacttcattgatttattatggtggcaatacaaacacttgagcttcagtgcttcacacatgaacccgaagtctggttacaagttacaactatattatctactgtgtctatatatgtataatgaggcaaaagttttcaaaaaatttactttgcaaataagtttttgtcatttcttttattaaagattaaaaaattttatatataaaagaaaataaaaaaattacaaacttttaccatttgtcaccaccaagaggtggtggaggcttattgctgactagtaccatccattcatttacaccttctttctcgtcccatcccactatctcagaaaatcaattaagcaaaagaaaaaaagaagagatgtgatcgtaatcgggattggaatcttagagagagagatgaaactttttttttctttaagtttctaggaaaccgaaagatatggatggagtatgcagtagaaaaagagagatatggacagtggtaaatgatgggttttggtggccaattcttcgacctcaacttttctcgttcaaagtttacttagacattttttactttttttttctttagagcgccccccttgctaatagaaattagagagttttagttgaacagaacggggttgggcaagttggactgggggtgaatgagaagaagaagaagaaagataaaaaaattaaaaaagataaagttaattaaaggaaagtcttgtcttgtgacatgggtagagtcttttctctagtttgttaaggtgtgtattgtttgtttgtttgtattctcctaatggcgtccagtagttactcggtcaaagatttggaagatgattatgcgagtattcagattgacgatgaagaggtaactgaattggcttttgatcttgatgaaaacatctcacaaggaacggatgatcggctatgcattgttgggagatttctaacgggcagagccatagattttgatgcgatgcgacatgtaatggcctctctttggcaaccaggcaaagggatgtacgtaaaagaattggaacctaatagatatctgttccaattctaccatgaacttgatctgaaaagggttgttgatggaagtccatggacttttaatagagttcaatttgtgtttgaaaggatgaaaccgggagttgatcctagacttgtggtgattaacagtttggacatctgggtccaaattcatggtcttcaatatggttcgaaaaacggaacaggttgtgaagagggtaggagattatattggttcatttgtagaatcggacccaaagaattttcgagggatatggcgtgactatttacgagtacgggtgactttggatatcactaaacctttgaaacgacgtatgcgacttcgtcgtgttggggaagaagctttctgggcaacgttcaaatacgagtatatcccgactttttgcttcatctgtggagtcattggtcatgctgaaaggttctgcccaaaacattttgatacgccccctaatcaaatcgtgaagccttatggcataggcatgaaggcccaaccacggaggagaaaccatttaattggtgctcaatggcttagaaccggagaagaggatgacaaccaatttccagaccaaccagctgccacccagaatgtgccgacgacaactgtatctcagcaggcggtaattgggggaactatcagcggagatcgtgggaaggtgatactaggaaagttgccaaataaatccatgcagaagtcaaaggcaattatggggaaagaggtaaatgtgggcattatggatactgattccacaatccacgttgatcatggtcataatgggctggatatggaggagttatctgaagtcagtattattgactccaaacgacgccgcacagcaaatggattatttggtgggccttatgaggggaatcttttgttaaaagacaacccagttagtaatgggccgattttagaagggatgtctgaggaagataatacatgtgattttggagtagaggaggctaattccaatccaaaaaatggagtttcggtgggccctggtttccaggcccaccactcattatgagtattataagctggaattgccgtgggcttgggaacccatgggtctttcaattcctggtggacattgtggtccaaaagaaacccaattatgtttttctttgtgagacgtttagtcgtagtgatactttggaaagacttcgggtggtgttaggctttgaaggtatgtactctgtcgatgcaaggggtcataaggggggcattgcgatgttgtggcgtaatagtaatgaggcccagcttatcaatttctcctccaaccatattgatcttcacatttctgagttaacttcccctccttggagattaacaggcttgtatggggagcccaaccgaaacttgagatataaaacttgggatttcctgcgtgttctcaaggatgaatcgactttgccgtggtgtattattggagatgttaacaacgttactagccatttggataaacgtggtggtaatcggtacccacaatctctagtggatggttttaatcaggccctccaggactgtaatttgattgatttggagctttctgggtacccgtttacttgggaacggggtaggggaaccgatgcgtgga

SEQ ID NO: 298660 - DNA, 2209 bp, Cannabis indica
ggctaaatgtgtagataccctaaacaatatttctaatttatcgagaggctaaattagaaatacttaaaattaataacctagctatgaagttataaattggtagtggtccccaagaaacaagagctaatttctattctcatcttcccccatcaagagagaaaattagaaaacctaagtattgttttcttgaaagatcattatccaaaatcaccacaaagattatctctacaacatggattaagatcatcactatctatagattaaggtacgcttctgctatttgagttcttatcttgaaattaacaaatgtattctttagatctatagttatatacttatgattatatgtaatatatttatctataaaattgaatactgttattgcatattttatgagtaataaaaatttatttcaatttgctataatctagttagagatgctaaatctttattgtcccttttaagtgatgttaaggtttagaaatgataatactattgctattggtaagaagtactacgggtagacaatgaaatagtgttcggaatatggtaataattttccatcttgcatttttttttttagatatcaatcacactaatccaaattttgtaactaaattaggatcttaaattttgtaagtaagttaatggatgagatgcatacacgtgtatacataaagtaaatagagaatcatcgtatgaaagaaagaagaggggatagagagagaaaatccagcctcacccagtggtaaccaatcagaatccagcattgtatttcagctgttgattcccccttctttacttcctatcttatctctctcactctcttaaatgttaacttaagagtaacaacaaacatcatctcctctcttcactcctctctctcttctcttttcttctcatggcaacgaatacagctctccagtactccataccacccaacaaccactctcttctcaagcacacccctcctcctcaccctccttcatctcttaccttcctcaaacccaccaccaccaacaccactgcaacaacaccactttcactctctctctcctccacctcatcatcatcgtcatcgtccacaattacattctctctctctccaaacaccaccgcatcaacaacaaccaccactgcaacctccacatcctcttcctcttcctcctccttcgatgacctccggcgctacctcgccgcggctgattttcgtcaagcagacgaggagacacggcggcttctgatcgtactagcaggcgaagcggctcagaagcgagggtatgtgttcttctcagaggttcaattcatatcgaaatcggacatgaaaaccatagacgagctttggagaagtcacagcaacgagagattcgggtacagtgtgcagaggaaaattttcaagaaggtgaacagagatttcactcgattcttcatcaaactcggatggatgaagaagcttgacacggaggtagttcagtacaattacagagcttttccagacgaattcatttgggaactgaaggacgatactcccgaggggcatttgccattgacgaatgctctgagaggtactcagttgcttaacagtattctcactcatccggctttcgtggaggatgatgatgaagagagtgagggagaagaagaagaagaaagcggcggaagagtggggggtttgttgaatggaattgggaaatccaaaccctcttctgctacttctagtgcaggttttaaaccagattacagcttttgatttttatatttataccacacaaaattggtgatttggttctgtatttaagtataattaattacattgattattgtgctttttccatatatattattattattattatttctatttcacagaatggttttctatttctttctttttggtttatgcctttgtaatgtcataattatgtatataatataaattgatacaaatggggacaaatattaaaaaacatggaagactgtgtccagtagggacacaaaaatgcatagccgttttctactttttgtttcgagagggagaatcttcttcaataagaataagtcttgctttggtttttaaagcctttttgtaatttttgtttttttttgttgtgtttttttgggaattttatttgcactccataaaattataaatacaccttattattaaaaaaaatataaatttaaataatttttaaaaattactcttgat

SEQ ID NO: 298661 - DNA, 1570 bp, Cannabis indica
tgagcggtttgagcggtttgatgtacacccctattatacagtattatttatttttataaccttttttatgtttaatctttcaaatttaaagcctgttttattaactatcatttcttcttctatttcctttgtcctgaagaaaatggtggaccactttttcacatttgcctccttaaatcaagcatgtttattttgagtgtgtaatcctttacagcttctataattttgtttccaaatttgttactgattactattttaatagtcattaacacatgttacaaactatttctctcactattattatagaggttaactacttaaggctaattcaagtagccataaaagagtgcgtgtgtgttggagtttttgggttcgagttccaaattatacatgattgtaatatataaacgcttaaataaaaaaaaaacaacattattgtaaaggtttaacctcttgaactcatgtactaaattgttaaaattattagataatatacccaaaataatcatatatattaaacggaatgtaaatagacaaaaagaatatttacctctcaaaatctatatcaaatagtgataataaaactcacacgtcatctttcaaacattctactacatacaagaactagtatggtatggactaaaccaaacaattcttttcttggtcttcctagttggtaggttgaataatcaagtattggaatagtttcgcccatatgattcttgaaatgttgattagggataacattggtgtgcttaaccatattttatctcttcgttgttcaatacgactcttcctatttatgagtcattaattatttctcacaagtgtcacacatacctgctcgaaaaacaaatatagtagcttagttggaaagaggagatgcaatgaatgagtgagctagtgaatacactaaggctcaggatgaattgttatagatatactgattgtgtacaaatgtgttacaactaaaattagttacaaactaaaggaaaacaataaatgttaacaaactagttgtaactaactataactaaccaaaacaaattatatacattcactaacacccactcaagctatactttgaatgttttaagtgtagcttgttacaaagaaattaaaaccgtgaggaagataatggttttgtaaatatatcagcggtttgatcagcagtaggaatgtaacacatttcaactttgccaattgcaatttgatctcgaatgtagtggacatcaagctcgatatgcttggtgtagactgaaagactagattctgagcaagggcttgagcactttgattgccacaccacaacataagtagctgtttatgtaaattaattcgaagttctttaagcaaataactaatccatactaactctgttgcaactaaagcgagtgctatatactcagattcagtgcttgaacgagccattcccctttgttttctcaagctccaattgttagggccagtttggcacagctgtgctgtggggaaaagcagctgtagctgtgctgtgggaaaaagcagctgtagcagaactgtggaaaaaaactgagctgagtgtttggta

SEQ ID NO: 298662 - DNA, 4606 bp, Cannabis indica
agcgatactccctaaaaattattatattaaattatatgggacccgatacttagttgtaccaatagcgatattgacacataggaaggtgctagacaccactggtgccctttagcatttctcttaattcattgatgccaacattccattagctaaaaattaattaattgtgatgtttgatgtgtgatgtgtgagaatccaaatatatttatggtaacatttattattctattttcttttttcaagaaaacctccaaaaatagagaacttttagggtcactttggttaagcttttaatttattaagcaaaaaaaagtatatgataaaatacaaaattattgtatttatttttaaatccatacctaaatttaaagttatagcccaaaatagctttttccaattcaccatgaatcttctctttaggttttagggaaaacttttaaattagattagtagtaaagtttatggttaatagaattatggtaaggtactaaaagtaaaccaaaaaaaaaaacctaggcttattattaaacatctttatagctaatgtaataacttataatttggcgaaatttacaatagggttagataatatcaggatcgactcaagagtgagggagcatgggcccacgcccaaggccccccacccaggaccaaaaaaccctttaataaaaggctccaaatttattttttaaaatactatttctatatttttattattatttattaaataatataactattttttaagaaaaaatacttcatttatttgtaagatacttattttttaaaagaaaaatgattaattatattttcaaaatactatattttaaatttttactactacatatacaaaaaaatatacaattttttctataaaaattccaatttaattttttggcccaaaacttccaattaacttaaggcaaagctaaataatattaataattggagagataaatgatgagtcgtttaaaagttattactttgaattaatgaaaagaatcattttctctctaaaaagaaaaattattgtatttactacaatgggaatggtaaaaaaaaaaagttaagtttgttaccatggtactcattttttatttgaaaaatagagaaaataaataatagttgtctcttgctttttctagtaacaactatttattttcattaatttaaagttgttggatgcattaaagagtgggacttatccaagagtttgtccccttcattttcacttcatcttttccatgcataccaaacacaaaaacaaacaaatataaaaacactctttataaacatccaatgatagtttttttgttgttacactctttcaccatcatatattctcaccccaaattcaagccaagggaaacaaaacaaacaaagaaaatatataaacttagaaaattttagaagtttcaagaaccgaaatagggtagaatcaattttgcgatggcaaatctaagtttgttgtggatgtgtagtcgagcaagtttttcggtttttgcagttgtcattatgtgaaatggaattatcaaaatttgaaacgttattctcagtatggttgaatgtattctgatcatgtttattcccttgaatttttttcaagtttgtgggataagaaactactcgaatttcccacggtctagcagccacccaacgctcaacccaactccatccccaatcttctttccctagaccgaaagaaacttgtccaagatattgacttgaattagcccgccactacaaaaagaagaaaaaaaaccatatatgtagtagggtaagattttattgcactcaaaaatagtaaaaatcaatttaatcagtaattagattgatcgaacgattaaaaaaacctgatgaagaaatgcatatgccatggctctttccctcttgatagcagcctcttctctttgttgaattctgcttaagatttcctccatagtttcagacccaccacaccattcaacctactcataatttcaatagtgttactaagccaaaatgagaaatataaaacatatttttcaatatctttttttagtcactaaaatctaacatacaaaatcaaaaggttttacattcattatattgcattgtgttgccaaaaatttatttttctacaaaatgataaaggaatattgcacttctcttatagcaaatcacgtgactaaatatcttcatttgagtaagtcacacgataatatataagagattgttgtatggtgttaaagacatttcatatagatatcattatgtcatttctttcgtgaataagataatttttttctaattattccctaaggtacctaatcttatgttgattcactaccaaaacttaggtttatgaaagctcaagataatcttgtttccactcatttggaaaaacacaacccaattttgtttgtggacaaaaatcattttcttagttaattttgtcatgtttatagtaaatgtaacatgaaatatgttttttaattttcgttttataaaattttttcatataagagaaattgatactaattagttactactacattaattaattattagtgtcgaattaattatttaaaaatttaatgcagtggtaatagttacaatcttatcatatatttacttcaaaaaatctcataaaaaaggcttatttgtggtgaaacattcttatgctttgattttatacatttaattcttttattctttttgtttgtgacaaaactcccttaaataaatttgaggtatgagctgaatattactgtattgattttgaagttttacttttatgtatacacaagtgtacacagtagttatctagttggtatttaacagtgatatttaattgatgcctcaaatttacaaaaaaaataaatttttttcacaaaagaaaaaagatataggagttaagtgtataaaaattaaaatataagagaattttgctgccaattactctaaaaaaagaatttaattctactattattttatgtctatattttataaaagctaagtttgaacttcttatagttttgtaattttttcatatattgagcatatttcatttttttaggctaattagaattttcatcttttaaactttgatatttattaaattgtgtccctaaactttttaggttattaaaatttcttctaaactattagattttagatttaagaactttcgtctaatttaataataaaatggtaccactttcaatttttattatgataattttctaaatatgacatttttttagttcattatttatatgttataattatttaagatcatttataaattttttaaaaaattcaataatttaccatatgaaaaataaggtttaaatatttttttaaatgcatgactaattatcacaatcaaatgaaaaatataattatatatatataactataacataaaaatatgtttataaatattatagctttaaaatttgtaatgtaggtctttttattagttaagagttaagaatatccttgacttgcatccaaaactaatttatctaaatttctatttatatatataaaaaaatctccatatttttcttatctattaaagtaataaatgagactatttattaaaaaaaaaaaaaaagtcttgatggagagaacattcccatactcctttccaaaaatacctactttggcattttgtttaagtaggtcttatccaagaagaataaaatatatatgacaaaaaaaatatataaaaaagataccaattaataatagtgggaataataagtcatgctattcataaaaactttgcataaacttacacttacataagagattatgtcacactagaatcatatgaagaaatcttatgtccctttttaaaattaaaaaaataaatggatatataccttattgtctaaccttgggaagcaaatttaagaaggtgacaccatttaaaaagaaataaaaaaaatatttttccagcaaaaataataaattattttacattttaattataattatcttatttttttaattattttatagtttatttataattaatttatagttgtcgtgaggttgatttcttgttgtttttaattattttcttaactttttactaaaaaatatgtattttgtaatttaaaatttaaaaaaaaacattttataaataaaacataaacaatttgtattttaaaaaatttcctaaaaataaaagaaaaaaaaataaaatgtagtaaaactaaataaaagtaacaataattaagttactaatactagctagaaattaatacctcaagttggtgaatttttgcttcaagttttatctgattctccaatttcttttgtttaattcgagcttctttcaccatacaaagcctccgagccctaatttggtcttgtattcgactccatgaatgtatgtgattcaatgcagacattgtttgatctttaactgtgtgaactccaacaaaatcgcgaatttggacagttccctttacgccacttgtcgttgtagacatggattcatcgttaatcgtctgatcttgatcaaactcctcttgagtttcttttgccttgctttttagattgtgcaatactttttttgcctacaaatacaactctcttgtgtgtaatcact

SEQ ID NO: 298663 - DNA, 2522 bp, Cannabis indica
ctaggattgagtccaacttgtttgttttctgttgaaaaatgctgatgtggatatttgtatgtaaagggactggttataagtggattttactcaacaataactttagccacgatccttttagtcacaacatacgaataataatttataattagtcacaattttttcacttttagtcacaagtattgttaaagtaagattttttgtagtgggcctcgagtgttaattccctttggtgccaaacttttttggctaagtatggtcgaaactctttctccttctggtctatcaagattcgggggacattatcatttggtgctcgaggcattagggctacttaaaatgttttaagaaatgaatcttgtttcattatgagaagtggtagagttattgatatttggaacactctgtcaatcccatggcttaagtagaataattatcgagcttccttcgatcctattattgaaatcctctcttctttttgttattccttgtctaattaaggcaaatggtgactaggactcggacaaccttctttaatagtttgtgtaaaagtaatttggttgagttgattctctcagttatgaggctaccatcctcttatcaagatggacacatatgaaatgatgctaagcatggtggtttctccacagaatgggcatataatgccttaatcaaacatcggtggagtcttagatctttggaagtttctggtccatgagcgtctcaaactatttttatggaagctcagtagagatgtccttccttttggatgtcggcttggtagaatctttggaagtaacatggtgtgttcaatttgtcatgaaaattatgaaatttgttcttgctcttgctgttgtaaaatgttggatattacatcaacttgatgttactaatacatttttgcatggtgacttatatgaagatgtgtttatgactattcctcaagggtatagtcctaagggggagttgccacctaatgtagtatgcaagttaaacaagtcattatatgacttgaaacaagcttctcgccaatggtttaagaaattttctacaactttggaacatgaaggttttaaccattcaactactgattattctttgttcatcaagcctttcgatgatagcttcattctactccttatttatgtggatgatgttattttggtaagcaatcatacacaagagttagaagttgtgaaggttaaactaaacaccaagttcaagctaaaagaccttggtgagctaaaatacttccttggattgaaattagcgagatctacacaaggtatttttgtgtctcaaaaaggatatgcccttcaactccttgtagatcctgactatatagagagtaaaccagtaagcacccttatggaggccaacctcaaattgtctcaagacaataaagaaggattggctaactctacactatacaggaaaatggttggtaagctttaatacctaaccataactagacccgacatatctttttctataaataagcttagtcaatttttagttatttctaaagtaagtcacatgacagcagctcaaagagtgttgtagtgtgtcaaggctattccaagatagggtatcatgctttcatcaacatctaaaatcaagctagaagcttatgcagattctgattgggcggtatgccctgatacttgaaggtctactagtggtttttgtgtttttcttggaaattctatagtgtcttggaaaagaaaaaaatagcataccatatcaaggtcttctgctaaggcagaataccgacccatggcaaataccatatgtgaaatagtgtgacttttatccatcttaaaggagcacaaaattgatcataagaggtcaacagttctacaatgtgacaataaggctggacaacatattgcagcaaatccaatgtaccatgagtggacgaaacatattgaaattgattgtcacattgtgcgtgaaaagattcaagaaggaattataaaaactgtacatgtttctaccaaagaccagattgtagacgtactaacaaaatcattgtttctagctcagttcaaactattcaaagacaagatgggactcttagacattcatgctccatcttgagggagagtatcaaaattataaaacaaagttatttagaattgtgagctatattagttagttagaatctgttatgtacatttgctaatttaacaattttgtgttactaacatctaatcaactcagttgatatataaagtatagttcttttattttgaattaatgagaaaactctattctcttctttttctctctgttttttattcattttgctaatactaattgtcacatcaagttaagctttagtgtcatttttttttttcaaacttatgaagctagctagctgaccaaaaaaatatatcttcctcgacaacttctcatatttaagttgtgtaggatttatgagattcaatttattgtaagatatatttcaattagttaaaactttctaatataagaatatcattgcgagtctaaaaaaaaaa

SEQ ID NO: 298664 - DNA, 2743 bp, Cannabis indica
tgtttgagttcttgaaaaagcacatgcttggatcatgtattcaagacctggctagccaagagtggtcaccatggggtctgattggccaagggtagtaccctatggattggctggcctatgcttggtattgaagttggctaggcagagacacctgaggtcgaccagggggtcgagagttctgactctaaatctgaagtggaggaggctacatctgttacgagaagttcttacaaaacttgttctgtcctccctaatagccctcttggtggataagatgctaacggggagccgttgaataggcttggttagccttcagtgatgggtctagaccatgtcttgatccaatctttagagccttagattttggatgctagatcacagggagacaggtgggtctctcccatatctgtcctctctattgatacttttgatgagatactagccagtagtctggtgagggcattcattgtgagatacccactagagatcagagggtgcatcgacttgcccttggttggatggcatggttagagcgtcatatacagcagggggcagtgttgccgctccacccttactttagagacatcactgcttatttcgggatgtgtccaacacaaatcaccccaaaaagtacttacgaaagttgtcctcagtagctacgcttgatatgttcttctcctttgctaggatttggagtatttggcgaaccctctttctaagcctcagtgtctaggtaggacggatgaatggtccaacatgacagaaggagatctgtttggctaatacatccctagtgataaaatagtccttcaagtacactacaatgtttggacttcagatcatagaaaaaattgatctcgtgacttgaaggctccaaccagccttgttgcgcatacaagatgtacaacacagataattacttaaacaccttcagaccaatctatgtaagtgatttgttgtaataataagcaaccctcctaatgtaaggatgaaaggaaagtatggccccctgcttggcatgtggttgtgactaagcataaaagtcgagaacatgatcattggccaactgtctagtacctacacagaagatggttgcattttgaaaaaggccactgacacgaatgttttccattctcttatctgtgagtgtagacatgtaatactctaacccctagggacgcaacatgcgtgttttataaactattttatgaaaataaactagtagtttagataaaaatgagtaattaaattcttgcaaactaatccgaaatataaaatcatggcataataaattttactattgggaatccccttattaaaatattacatgacatgtcattatagtaatgttacaaaatatataattaagtttagaacaattaaaaatatacaacacaacaccacttgtcggttaagattatatgaacattagcttgagatgatcactaactcctaattgtccaaatgtttctacttaatacctacaccacatagcacacatgcgtcacaaagacttagtgagaaaagtagtaatacaacttacaagtcatcactcaagtatcaacaataaaactcaaaagaagattaaaatgctcacacattgcccatataattaaataaaaattaatgtaaatggctagtcataaataaacatcaatagaaccatatttagaaatatacaattacatgttaaatagtacaatccatacccaatacttcttaaagaaaccaattttcattattatctaacaaggcgaccttgatgccttatcgggcatccaatatctctattgttgtctaataagacagctttgatacctatcaccactatccaaatatctctgttgttgtctaataagacaaccctgatacctaacatcggtatcaaaacatcatcctcattgtgtaataagacaaccctaatacctatcattgatatccatacatcatcattttccaataagacaatcctaatacttatttcctgtatccaaatattatcatcattatcaaataagacaaccctaatacctggccaccagtatccttgatatgagaaaactaacaacagtttcggtttataatcacgatttttaatcattgcctaataagacaacctttttttaatcattgcataataagataattttttcatcattttctattaaaacaatatttttcatcatataacggtaatcaccgatcttagtttggataacgatagattcacaaatgatattaatcgtatccaaacaaaaaattctatgtattactgaagtacttatgttacttttaatttcattttaatgcatgccagtcaacccagatggagaaaagcttgacgatcctagccctaaccacatgacctataccattttagatcttttcataaccaaaagtttccctataaatagatagcatgaaaatactctaaatatcgagaaacttgaaaagtgtgggtcccgaacaatacccaaaacggtagaccgttttatgaatgttcttgcccaaaaaaattgttgaccggtttttcaaaaacattctgctatttttctgtagaaaatgaactccaagtttttattgaatcctacacccagcaaacctaacaaaattagctcaaatttcatagttttgggtcagtagtatgagctgttgggttttgtgccctaaataaaactcatttcaatataatcagatttgcttattaataaagatcagaaataaaattttatgttgcatggtt

SEQ ID NO: 298665 - DNA, 6836 bp, Cannabis indica
aaaaaatacacatgcaattataataataagaacaaaaaagaaagaatatggaggatttgatcctttctagctagtagctatatccataaatccagaccattatcatcttcctacaccttgaagtaccctgcaacttattgggcaaatattattattatccttgcctaaattaaattttatttgcttggtacttgtagctagcaagatgtattgaggttggactcccagcattgataatagtggttgttctatctcaggtcatttttcttatctccattcttttagttattgcattatttctattccagtcatcttcttggagttaaaggggactctggaattgttatttcacgagctttacttcatctgtttgggcatgatgtacaatgatgcctactgaaattcactttttaaccttgtgttctatatgcatattacaaagatttgtggggggaatacataatgtgtgaaaatgagcttacttcatttttactttgtttgaagatatcttatatatatatataaagctgcttgtgtttattgactacgcctaatgtttttctttaaccaattgaattgcagtatcttccccactttacaaaatccaaaagaatggtttttgatcgatttgctgtcctcttgtcagtctcaattgtatggtcatatgcagaaatattgactattgctggtgcatatgataacagatctccaaatactcaatttagttgccgtaccgatcgttctgggcttgttagtgcagccccttggtgagcttatttctatcagtttctaacaatccttagctccacaagaataaagaatttcaaggaatgttttctccgattttttttttttttttttattgtttttttctagtcaaatcagtgtagagagagatgttattagatcaggcttcctaaactaattattacctttgtctcttcaaagtacaagtgtagaatagaagctattccaaatttctgagtcatgttttataattccattgaagttacttcatcttccatcgtatcatatgttgtcattatgaggttagttttgagccttcagaactgagaaaaataaaggttattaatgatgggagttgaactagtatataattgtattttagttttggtgaaacatattcattaactgatttacaagacatttcacagtatttgtctttccaagaattttggaaaccaacagtttgaatatattccttttcttcaggataagggtgccatatccatttcaatggggtcgtccttcttttaatgctggggatgcttttgcaatggtggctgcttcttttgttgcttttattgaggtttggtcttataacttagttatttgtttacagtactaattggcagtaaagatcgttgctacttgctagtacttaaatatgaagttcgtgaggtcacacatgactcttgagcttaacaaatgtatttgtttggagcagtcgattggtacatacattgcagcctctagatatgcaagtgccacaattccaccgccttctgttctcagtcgaggtgttggctggcaggtaccattgtgatctgaaattacttatcattttatcattaagcataataagcataatatcagacatacatacctgtcgtagttcagtttgatactaaactagtagatatgcctaaatgacagggaataggcactttactgaatgggttattcgggactgggagtacctgctcagcatcagtgtaatttttagattcactctctgtagtatttcttgttgaatgagaatgtttgctactcatattttgcttaactcaatttgacacaaccatcatttgacataatttcaatgcctaatgaaattttataatctttactggtcatcactttcaatcatcgagagaaatgacaagtgtacaagttgttgttcgaggtttgagactgtacagtcatgttgccaaaaagccagaatgaggctgccttaattgtggctttcttttaaaatgtgtgaacttgtatagctgtattctaatgtatgttgtttttacagtgaaaatgcaggacttttgggattgacacgtgttggaagtaggagagtcgttcagatatcagcagtatttgtgatattcttctccctattaggtaatcagagagacaacagtcttaaattctctgtattaaagaataaaatgactacatggtttgatggtgtccttatgaattgtaactaacagggaaatttggagctgttcttgcttctataccattgcctattatggctgctttgtactgtgttctctttgcttatgtgggtaagtatttttcgtaggaaacattctgtctgatctaacttttgtgaaatataggttataaacttatgtttagtcttagaatctaaatctatggaagtggtctacaataaactctaaagagtctaaactaactatgatttgtaacatacataccctttggtgagtagcttccgcaggtattactttcctccagttctgcaacttaaacagtttcaggacaaagtttatcataggattttctctcttcatgggactttctgtgcctcagtacttcaatcagtatcttctcacttctgggcatggtccagttaatactggtttgacagcagtgagtataagctgaaatcattttgtggtaatgttttggtgaacaattgattataatatgataataaatttcattgttttggcagttcaacaatgtgatgcaagtgatattctcatctgcagccacagtggccatcctcattgctttcactttggattctactcatggttaccgagacggggtaactcgcatagacagtggcagacattggtgggtaaagttcaggttctttagttcagacacaaggagtgaagagttctactcactgccctataatctcaataggtttttcccatcattctaactctttgcttgcactttcaacaccaatgaaaaggcaaaacaaagaggagttcaattgaaattgaagagatcacaaagaccacctacattttccctcatagatttatataaagggtatatacatatcatagatatattaatgaacagttaacatgtaatcaccagacttgggaatagtacaaaaattaaagcaattgtcatacgagtgtgatgtatcgtcaaactattgcactaaatctagttctcaaaaattcatctcacaaatcacaattatgtgagtgttttcaaaatcacaagggcatttttgtcacttttgaacttccaggagggtatcaaaatttcaaaactagttgaatgtctaatctatccacatttggaaagatttaagataaagacaaattaaatataccaaatactaaatttatcatttttaaaaaaataacatatacttacactaaaaaaagatattatgataattttaaattttaataactaactttctctatatccttttaattgtacttttaatactaaacaatatagatgagaattattgatgtctccatcaatcttagactctctatctattctactcttcgttcttcctactaaacatagcctaaaagctctacccaaaaatttgggatagtttagttatgtaattttcaattcattttagctctcgtttaataattcgaaaaaaaaaatatccaaataaaatttatgttggcaatttaagtactttccatgcataataagcacagacattggtttacaccttaaaattagttctaacctcacaataactagtttttattatgctgatctaattgggcattcgaccctaataataggaagttaacatctgggttttgtgttttttctaggcccaaacattatctcctggtcttgaaagaagcaagaacaatttccagttttagtacaaaagcggagtaactcagccttagtcaatacacaattgaaataagtggatttagtcacttttttttttaggttggtatcaaaatccaacaaccttcaaccatatggtatgacaaccaaatcatggttttcatgtctcatcaaccaaatacattgagctggatttatattttgtttcaaaaacgaatccttaacaagcaattgcttagaaaacacactccaacatatggccaactcgcagacttcctaaccaaagcactctctagtactagatttgtattcttatgggacaaacttaagtcctattaactttttttttttctcttgttattgtctaaactctaaataataatttttatccatttcaaaagggaaatttcactatcaatacttaataaaatacttcttatcaaactctctctctctctctctctctctctctctctctctctctctctctccacttcgtcttccccaaccccccacctacctccgagaaaccccatcgacgttcaacctctctctttccacttcgtcttcccgaactcaacctccataaacccagacattcccgaagtcaaccaccattccctcgcgttctctcgccacaatcaacctccgagaaacccaccacggtgaacccaccgaagttcgtctgaatccactctcgaaacaaccaccacgaaacccaggcgtccgcagtcgacacccacctccgccgacgttctcagtcaaacaccaccaccaaaccgagtaaaaagaggtaccattttttttaaaaaaaaacaattgattttaaattgtttaattttgctagatttttgtggattacttgattacttatgatttgtcattgttcatgtatattatgtggcttgtttctgttgaaattatatatgtacagggttatcgatggtttatcgatgaaatatcgatatgatattgatatgtttctcattgtttatgtaaacggtttaaatggtattttttacattgttgttgatatgatattgatacgatatcgatagaatatcaataggatatcgaccataaataggaatggtagtttattgttttaacttgctagttttttcaatttttaactgtatatcgatagtatgtgtcgatatatttttaattgtgtatcaacattttgattagttatctgatttattagtgatttgatttattatgttggcaaatgtcgatgggttgtcgatattttgtcgacaattctatggttttttgttattttttaaatgtgattatatcgacatgatgtcgacaattatatcacatgttattttttaattgtgattatattgacataatatcgacatgatatcgataattgtattataagttgttattttttaagtgtgaatatatcatcagaatgttgacatgatatcagacttatcgggccctatatcggatctatcgggcaacaataaaacttaaaattataagaaccatcagacccactagtggaccctatatcggatctatcgggctatcttcttcaaccttcaacccaatattaacctaccattggatcctatatcgggcttacatcgaaactgcatcaggccagacaaaaatgataaattcccccaaaaacacatatatatacacacatataaatacatacatttatatatatatatctatacatgcacatatacatatatcatacatacatacatacacacatatatatacatacatacatacatacattctatacatatttatatacatatatatatacatagacatatatgcacaaaaatacacaaacattcatatatacacaaataaatatacatataaattctaactatacacaaaaataaacacaaatcactatacataaaatttaacccaaatctaaataaataaaattaataaaacccaaatttatatacacaaattaaaattaaaataaatattaaaaatgtaacactaaaatcgaaagctcaggcagcggtcgccagagatgcggtggatcaatttttttttttattttgcaaaaaaaaaaagatgaaatggatgagagagagagagatgatggtgtggtgattatgatggtaaaaatggtggtgagggtggtgaaaatagtggtgggcggtggtgatttagggtggtgggcgatggtgaatcgtagagagaacaaagaagaaagagaaagagaaagagaaaaaatggggaggaggttcggggttcaattatattctgcctcaacttttgtcggtgcattttgatccgctggcaaaagttaaatctgacaaaaacttttgtcagcgcacttaattgtgccgtcaaaagtattacaaataaaccttaaaatgaagcgcatcgttttattaattgtgaaaacttttgccggtgcaatatagtgcgccgataaaagttttcacctaatttttacttactttttcgcacacattttcactgagcgggaaatgaaccgccaaaattttcactacttttgctagcgcatttactcaccagcaaaagtgaaattaaaccgccaaaaattaattcacttttgccggcacactttccttcgccagcaaaagtgaaattgaacagccaaaagttctcacattttagcgtttggttgaccaccttttgccggcaagataagaataatttgctagtaaaagctacttttactggcgcattaacttaccgtcataaggtgaatctgatggaataattttggtatctttttccggcgaagtgttttaactccgccggcaaaagtgctttattctggtagtgtgtgatgctttaggtgttggcttaggaggtatcctcatgcaaaatggcaaggtggttgcctaagcttctcgacaattgaaaccacatgagaagaactaccctacgcatgacctagaacttatcacggtaatctttgtcttgaaaatctagagatgttatttgtatggtgt

SEQ ID NO: 298666 - DNA, 6121 bp, Cannabis indica
ttgactaatgtaagtgtttggtttttttttttatttttttgaattgcagtcggagtttcttgtgctagcggagttaataactctggtactgaagcgaaatcaaatcataatatcatcaaggatgaagccttatctacctgttcatttaattctgataaaccatctaacaatgtcgatggagttatggaggatgggttaactcgatcacaggatataacacaacagacagagaaactaaaggagagcgctgctgttcgcccaaggccgactattacaactagttctaaaagtactgtctgtcaaaaatgtaaagaaatcggccattctgcagagtcttgcacaggtggaagttcacaggcctctggtattgattcttctggtgctagaagttctagggaggagacacaaaagggcagtagattgaaagatgcaattcaagctgctttgcttagaaagcctgcaatacatagaaggaaaagagttgacgagcttttgacaccaaactcagatttgaattcagaaatatccagtcaagaccaaacattgtctctaaataagccaaaaaatattattcctcctgaaggaacatatgaaatgcggcaagcagttccagtgagtaccgcctgtgattctatccatacaactgcgagcaagatgatgcatcatactgtgcctacaccagattctaaattctcttgtaaagtagaggattcggaagtagttgtcccctctgttgtaaaacctatggtgaaggattttataagttatgcactggcaacgtcgcctcaacttctgaagacgccagccattccagaatatgaatacatctggcagtaggactctctttattgccatttatttgtgtttttcatatgcagagtttatttatttctccttccgttcttttttcatttttttcaattcttgttatttttcacgtacaggggttgttttgagatcaatagaagtggcagctctctcgatttatgtggtggaatccaagcacatttatcaacttgtgcatcccccagggtacttgaagtagcaagcaaatttccacagaaactcttactgagtgaagttcctcgcctgagtgcatggccagcacagttttatgatggcggtgctaaagatgacaacattgctctctacttctttgccaaagatctcgagaggttaatatttatattctctagtcttgatcggttctgatcacacattttaacttttattccttagtttgaagttttgtatgattgctaccttgcagctatgagagaaattacaagggcttgttggatggtatgatcaagaatgatttagctcttaaaggaaatcttgagggtgttgaaattctaatattcccctcgaatcatctcccagagaattcacaacgtaagaatatttttgaagatatgtttttcactacatgctttataaacaattgttttgatttgattgctggccgttcaatttcgttacactcaaaacacagaatataaataggatagtatagcatgtttttatgtggctactgcaagttttaacaggaaaggatatgaatcactgtgtttgccaactatctacatttactactctttgtggcacgagcacacagatgagatttttgtgcaactcaacttttatacattagatgcaaaaatataataatatttaaacactccattgtggatttatatggacagaaagatgtatttttatgtatatatgggtatggacctgtagttgaatataacagccaaccatttttttattttcgtgttgcggtgtaatcatgcctctcgttattgatgtgccttttgatttaggttaaacactaattaatttgagtttcccaacttgttctactattgccaggttggaatatgttattcttcttatggggtgtgttcagggcaaggaggccacgttccgctgattcatccaagttacatctccccaattatagtacgatgtccatggacaaatatgcacctaaagctgtcatgacagtgtcggatacactctgtttacccaagtgtatagatgaagaatcttcagcaagtggcagatattgtagtccggtcttagcttctagtgtaagtgatcaggcatgtgctggaattagcggagattgcaacaaccaaaaagtttctgaaccactgtgttcgggattaaaagctaactcaattcttgaagatagtatagttgacttaaaatacataggcaatgtggccactccaagcggaaaggtgagacacttgacctttctttcggaatatattttaaaagaaaaaaatgtttccttcatagttctctacatcatgtttggcattataatctgctcttcttgttagtatgtttgctttttatattccgggtagatttgtcttatttaaaagaccctttctgtgagaagacttttatatgtaaagtcaggattgtgtttgacattttcttatcttggtggaaacatttttaagcaaacacgtgttgcaggcttgactaatctgattttcacgtggaagattgaacttttgtaatgttcttttttgtcatcctcagtttttgaaattatttattttccaataggtattttaataattgatttgtctttcaacatgtttcgatcatttagaatatacatgcattttcttttgttaagcttatcgtgtttttggccttgtttctgcagcaagaaataagtcctctagagaacaggccgaccacagagccgaaaccttttgttgctatcaccaaagcaaacagctctaacataggtgaggaaacgaaaatgcattgcgatatcaaggatacctcatcttcaacaccgaagattcttccatctttaaatgacgatgtagaacttacagaaacagattgcgaggaaaaaagtttacatggaagagttggtgccactgccagtactgtcggtgattgtagggcttcagatggaactaatagaagtggtggagcgcagggagataatgatgggtttgtgaataagaaaacagcgttagtaacggatttgaacagcatagaagttgagtgttcgtcggacagcataggagttgagtgttcttctatggaaaggaaacggcctcacatagatctttcagaggcccctcaagcttcaaatgttacaagtcagaacagtactccttggaatggagttaataatctgctgttagatgaagaaattttcgtgaagaggcgaaaaactgttccaactgacgtgtacggttgtggtagtcatagttgtagtagagattctcttggatcaaataggaagaattcgagtccctacttatctacaacagaggagaagagatgtgtcgaagcttgtgatgagaaagtcatccccgaggacttaggaacgaccgaaaggcgcttctttcccgtggattcacgtcaaggaaacagctctgcaggttggaagaatatggtgttgggcggaaacgatgatgggtttccgaatttggagctcgcgttaggagcagagacaaaaccgccgctacagagtaacaaagctatgccattctttgtgggtttggttgataagaaaaacaaacaggagaagcctcctccagataaaccgatagaggttaaagaggaagacgattcttcatcccttaaattgtctctttcgttcccattcccggataaagaagaagctgttccagttaaagcagtagcgaaatcggaacaaccgggggacaacagacatcatcataataaccatcctcctcctgtgaatacctcattgctcctgtttgggggtttcccagaaaaatagaatgtacattatattattacttagtattattattattattataatatagttattattattattatgattaataataataatacttaagagaaagagagagaaagagagagagttcacttcacaatccaaataccagcacagcagagggctttggtggttggggccttggggggcattttaggaatttgttcatatcccattacacaacaacaacaacaacaagaagttactaataatttttctttttaccttttagtcatcagtcaactttggtctctctttcttttctttttttaatatttttagtgtttaattttgggtgggtaaaagggtttgatcatatcttggtttttgactgtttttttgtatataaagagaatgtgatagccgccggcataatttggagacaataggaaatgaaatggcaacaaaggaaaatggacatcttcttgttcttttgagtatctttcttttttgggtttaaaatttgttttacctttcattattgattacttaagctactatgatgtgttgtgggggttgttgattgctttaagattttgtgtttttggagcaatgaatgatatgatattgagggggccataatttgggttatgatatgttagtttgacacaaattcaacatgagatttgtaggtttgatgcaagacaaatttatggagtctgtgttttatcaattttttgtgatgcaatgtctttgtgtcagtgaaattaagtaggtttgacacgacacaattcatgtgagttgtgtgttttataaatattttgtgtcacatgttgtgttagaattggtaagattttagtaaattcaagattttaacataacacgttaacacttgcttctagggttaacatttgggtcggatttggcccaaacttggcttgcgaaaagatttgatcattgaagaaaattcatataaaataggcgggttgagttgaactcgttactaatgaacgggcgaatactcgctcaccttccctctctctttctcttggactttaacctttgttctcccccaaccttcagggaagactcgaaactcatgagctgatgaaacacgtggccttcacgagcgagtataggtgtaatttttttccttaaaacccatgaatctgaaatttgtaaaatctactcgatgttcaaccatacttttttttttgaaagaaatattcaaccctacttctttgaaaaatattgaacattgctattaagtactagtggtgtcgaatatgtgatacacttaattacacgaaatgacaacttgtagtggtgcttgaacaccactaatcactagtggtaatggtagcacatgaatgtgctaatgaggactagtgattagtggtgttcaaggtgctaatgggcacgcagcttagcgatatttcttaaatattatattcttaataatatatatgagattcgttacttaattacaccaataacgatatgacatgaacgagggtactaagcactaatgatgccctttagtaattctctttttcaaatattatctacacctacgtggcataaaaattagggtaaatagtattttggattcgtgtgttttgcaaaagttaccaattgaactatctcttttgttaaatgacgaaataaatcttatattttccaaaataataaaaatatgatcctgagctcaattaaacaaaaacattaccatatacattttcatgtgctaccatatataatttacaaacaaaatcattttccttttttctctgaaaaaaaaaatcagtccttttccataattttttaattaataatatattattggagtgatctcgtcaatctacttttataatcttttagtcaatgttcgtgtccgaaaatacatgccaatatgtatcttttaattttttttatgccggtgttcgttatacttacaacattatccctataaatagttataaaaaaaatatcaccatataaatttataatttttttaatagtttacaatgttaaaatatcaaaaacgtttatttttgatactgtaaattactcgaaattttttaaaatcttaccgagatgatattttaactacaataaatatctctataaaaaaattgaaaaaaaaaaaagatttctacatttgatttcatgaaaattgactaataaattataattaacactttatttttttcattttaaatcctcatataaataaaataaaaattctattacaaaataagtttgaaaaataatgaaaaaaaatgggcggattaatcgatactccattcattttatttcattctttaaattaaaaaataaaatatatatttttccaaaaaa

SEQ ID NO: 298667 - DNA, 2382 bp, Cannabis indica
tatgccgctatttaccctatatttaaattatattattataattattaaatcataggattttttaatatttcgtgtcgtgctttttaagttttttgtgtgtcgtgtttttcgggctagtctatttgtgcttacgtgtcgtgttatttgtgcttctcgtaccgtgtcatgcttaatcacatatttttagttttctgttgtgccaatttatagtattatatcgtattctgtctaaattcatatttttttttgtgtttgatcatattcgtgtcctccaaactcgtcttaatttcgagccgtgtcaaaaaaaactcgacctatgtttacattactgtcactgggtatggagatgatgcactacctaaaactaaacaaatggcataaaattaacacataaacaaaggtgtcatgaaagcagaaagagatagtgtcattttgaatcatgtaaaaactcatttcatttacacacatatacatatatatgacgtggctatatatgacagtgacacatatgaatgtaatgtgacacttgtataaaacgtgttgaaggacaagaagagtaatagtaatatagtaattaaataaattggctgagaatatagtaatttagtagtgctaccattgatgagtgaggagagagagagatgattcactatttagatgaaagagaaagttgcccaggttgcataattaacaatctcaaacaatccaattctggcattcctttcaaacatttcttctatgtttttcttcttgcccttattacaggtaatttctctgtttaagaaaataaaatcttgtcctgtattttctaaataaaatgtaatatatgggatgatttcctatatctattactacatttaaagcaataaacatttgcttcatttttttaaagttaatatgctttttcttaattttgttgttaaaattttgcagctttgccaatgtcatctttgttccctttcctatatttcatggtaattacttactatgtttgttggtgaaacttgttctatagtataatataacttacatattaatttataaggtaaagtgtagatcatatttgaaaaataagattagattggattgaattaaaaatatatgtaaaatatttagtaaattatgaaaaacaagttggatgcaaaattatagtatctttcttatcactgaaatacatgaagagattaatttatctcaatttttgtaaagactaatgccaaatgcatacttaaattagtgtgtcgtaatcattactcattctaaattgatcttttcagataaaagattttaatattgcaaaaagagaagaggatataggttactatgttggtgttgtgggtgagcctatttttcattacctatgattatttatatcaatacaagattttggtttttatgatgtcttttaatatatattcattccttaattaaaggatctgcattcatgtttggaagatttcttacttccattatttggggaatgatagctgatgaatatggtcgaaaaccagttatgatttttggcacaattgcagtgtaagtactttctaattaattacttaattaatagcttaattaagctttatcatttctgtcaaggtctcattcttttctctccaatattgttttaacaattttttttgcgacaggataattttcaacacattgtttggacttagtacaaacttttggatggcagtttcaacaaggtttctccttggaagtttgtgtggaatacttggaccaatgagggtaatactcattctgttttattgtggatttgaacattattatttaagtttgccaccatttttagctaactagtaagctagcatagcacaaaatgagcattattgaaaacagattgtgtcaaacaaatggaatacattaacattaacatataatttaagagcataataatattattaagctatgatcatatttttcaggcatatgtttcagaaatttgtcatacaaaatatgaagccttgggaatgtgtatagtaagaacaagcatgccctttcttgtttatttgaaataccaaaatagaatgatataatatataagagaaagagtaatttttacagacaagcacagcatggggggatcggattagtgattggtccgtactcttggaggtttcctttcccaggtattactttgaacaattattttagttttacctatgtaacaatttcgacaataaaagtagtcgattttgttaaactcaactattattctttttaccgttaaataattttaagtacttaatattttttaatcaagtttttgtctttgaaattagaaagtaagtgcatatttggcatcataactaaaaaattattttttatttttaaaaacagaaaattgttttttgaaaa

SEQ ID NO: 298668 - DNA, 5942 bp, Cannabis indica
caatccgcacaagtgcggatatccgcactttgcggattggattggattggatcgtgcggattggattggatcggctattttatgaacactcctagttttagggttgagttaaggctctttatataggagagcttaaactctaattagcagataaaataagatatatttatatattaaattaataagaacaaatgaccgaatttccccttaaagtagatgttttcgtagcatcttagtgggctgccaaggcccaatttgtagcttggcttactgtccacggatgaaggttgcacatcaatgtcttgcaagggaaaagttggcagggcatacacctgcaagatgcaggttggctggccatacaaggtttgtaggttgagctctggccgaccatgctcttgccagcatttggcagatcatgttcctgccagctttgtcaagagttggcctagtctttgcatgtgctggctagccttggcgatggtcagcctctatagatggaggctagtccttagaggtggaggccaacttttagagatggaggccagccaatggaagaggcaaggatctctgttacttatatttgactgaacaacctaaaaaataatttaactttacctaaaattaaaagagtaacatgcttcacttactgtatttttcgaaacacatatatagtcttaaatttctaagagaaaacctaataactccttcattttctcttaaatggttttcaatatcaattactttttatgattttcttcatatcttttaaatttatataagaaacttaatgcgtaattgaattggactttgactaattagatgagatcaaatgataattttttttaaatctaattattaattaaattgaatcgaatgaaaaaaaaaatattaatttagattggatgtgtaaccctaaaaattaccaacaaaaataccagactccaaaaaaagaaagtaaaaataccctaacaattgtcgtttctagtttacgatcaaacgacatgattacagatgccttttattgtcgttttaccatgcgagcaaagcaaactcgtcgtggttgtcttgtcttgttttgtttctatctgtttttgaaagaaattaattatgaaattcgttttcgtttcaccaaaataaataaataaataattaaattcagaggacaattcagttcagttgggtaatattgcttagctacttcttcttcttcttcttcttctactgctacttctaaaggcatcagattcaccgccataagaaaaatatatacagagagttattagtattgaaacaggttttcaattcttcttcttcttcttctttgtttgggttggtaaattcggtgtttgggattgggaggaggttggagaagaaccatctccatctcccatcccactgaagacatgataactcgttctaaactcgtggagcaactcagagaataccagatccgatcccagcaaaaattctcacctctaactgtcttctcctccaaacccaatcccacttcaaggtaatctttttaataattcattcgtttgtattcaaattctatttcctagtaatgcaattcagtgttccaacttattaatcttgatttggtttctcatttcttgcttctattgtacaagtattattgttaagttacgaccccatttcaagaaattggggctgctatatttgcatatttttgtctttattcgattttgattttttgtttaaatcgtgtatgatagcacttgttaagataacctggaatttgcaaatttggggttttagggttttttgcaaaccctattgattatgttttgactataaccatcttggaagatttcaactttactcaactgtggtttgacgctttctttcttattggatggagagtttcaatagttgactatatggtattttccaagtaaacaaaaagatcccccaggcttattgtatgatggcttatggttagttaattataacattttgtaaagactgaagatttactttcattccctaaaattaaccattgaaaacattggtagttgtacaaaatcaagtgctaccatgccataaatgtttaggaatggttgcagctttgattggtatccacacatcatcctcgccagttccacttacattactgaggtttaaggttcatttgataatcttataaaaatgtatgatcattcatttgattataaccatcaattgaatattgaaaatctcttgatggggtaacacttagtttgagctcttagtttatagcagtaatttctgttgggctcaatgagtaacattatatgcttatctgtttctgtggcttatagggtgactatctttacataatgctcctaacatacaaacttgatggggctgaatttgattgaatggttgcattatcatgttctgaaacaatggctttgaaattgtttgtcttaaattttgatttgagagtttgtaccatatcatcggtacattaagtgagtgaaacactgatgatgtgtattggtcatgctaatatacgcaggtatgacgttgctgtggctatcatttgggccttagtattcaccatgcttgttgtatcgtcctatctggccctgcatttcaagcactttcggctttctgtattcatcttttgcttgggcgtctttcttcttttaaggctgagaatatctaggcatacactggctagaaggagtagagagaggaaaatgttattacccttgtccatgtgaccaatgagagcattaaatttgcagctatatacttggagaaagtggattaaccgcagccctcaattcatgttcaatttaataatttgatgttacgggagcctgtggcactcaatcctggtcaacattgtctgtcctcaatagatggtacagttcttttccatctctttcacggcccattatatacagtgagaattttcaaagggtttcattttcttcatgtgtaaacataacccataaaccaagaggctactgctaactgtcaaattttctctcattagcttgtaagtacaagtaaagaaagttatacttaaaaagaactatagattgagttgttgagaattttcatgacaaggttgataacaagaggcattaccaacttataagttgattataaaattcaggacgtaaacaaaattaaacccaatgacatttcagttctagttgtcaaatatctctgcagatcttgaaatgttttccctaatgcatttacatcataacaacattttattttcattatgattattatgataacagatttatctactcagcacatagtcagagacaaaggtaaattagtttatttcaacagttggagtgaaatttagtttgattagctaaatgtatattagtgtgctgattacttgattatgcaactaaatagctattatgctttcggtatgaagctataggagtcttagtttttctgatttgaatgcgtttgtcgaaaatgttgaagttgttctttccttttgcaattattttgctcctataaactcacactccttcatggtgcataattgcatataatgtttggcaactactttataccatatgttattgtgtatctcttatctctaccacttgaataaacttactttaccctatatggtatttatttttgataaagaaggtaggaaatgttagtagagtgaacacattctttgcttgttttgtcatggtcccccacgggaccattttgttcttttctcctcaaacatgactggatgccatgatcaatggaagaaaaaggagaaaaaacaacatgaaatagaatgagaaaactgacggttgtgagtggcatacaagtgacataattgctcttatataatgagtatatatggccccccatgtcttcaaagtcatacaagggacctttttctttttgcttcttcctaatggatgagaagatgtgtacgaataatttctatatcattggtgcataacactgtttaattgtttaacattagacagaatggtatacatcccagatgctccatcattcttggcatatatttttttagctaattcccctatgattctccaaatctcttacattaatttattaatgcccttgtaactttatttgattagattcccaattgttccttcttctgcttacagatgccttatctaagtaagtagattaggggtcataggataggatgtttgtgattaagttcttgtgttttttggcatagaaaagagactttgattatgtgcgaaaaaaaaagatgaagatagtggctttttaaagcacctttatggaacatgttatccacaagaaacagatttaattagcactatataaaaacattactcagtgctttggttttttaatctttcattttcctcttcttggaattttgtttgtgtgaaggtgctaatttcacttcattctaatataacattgagacagagctatataatttaggttgcttttggtaatgaaatggaatggaatagaaatgaatcatcttattttattcttttgttggttgtattttaaagtattgggaatgtcattctaatggaatgatttttctatcattttattagaatgattattccattttgaaatagaaaaaaaaaaaaaaaacccattccaatgtaaggtgatttttttttatatcaattttttttatgcattttaaattttgtctatttctatttttattcttgtgttttaattactttcaaccaaataaaaccttaggtggtttggtggggggaatgaaaaatataagaatgagaattagaataagaatagaaatggaatcaaatttaaaatgcataaaaaaaattgataaaaaaattattaaaatttttctcatcttgtatttgaatgatcattcctttcatttcaaaatgaaatagtcattctaccaaaaaatggaaaagttattttattgaaataacatttcaatactttaaaatgtaataaaacaaagaaatgaaataaaaattatttcttttcctttccttttcattctatttaattaccaccaaccaaatgtcacccatgaactaaaaaacattcacacttacttaagacatggatcccatacaattttgtttgtagttaaacaaaaactaggcctaaactaaacctgtagatttataaaataggctacctagaagagcaatgcttataataatatgtgtttgtatgattcaaaagaaacatttctcataaaactttgtgaccatcctgtctcatctctctttttcattttaaagaagattattattatataaagggttaataataaagtatatagtacttgtttaaaaagtattggattctctttctctctaatttgcagctcttaaaaattattggttggtctagttgtcataagacaattaaactagtcttcttcatatttagatgacaagacaaggcaatatactcattagatcaaagcacaaaaaggccgaaattatcggccaattgacactttattagcactaagcttaaactaactaatgtaacatttgtttacatatattataatgctaagatattgattggtgtagcaaagtgggttggtaatgttgggttagcctataacacactcatactaatcttaatgcatgaatcctaaccatcaaataattggtgggttggggaccctatcatgttctgtgcaacattgcggaaagcacaagaaaaataacataaaacttggcttagcttcatccttttgtctcctcgacacaattctttttttcccctcttctttatacgtttactttctttcattttttctttgatcaagttttagagattgaaagaccacaaatagagaggttaaatatatatacagtagaacctttatccaagaatacacttgggactaagtaaattatattctaattgggaggttataattaaatagagttacactagaaaaaaaaattaaaaaacaaaaa

SEQ ID NO: 298669 - DNA, 4735 bp, Cannabis indica
caatattatcagcatcaccattctctcacggcaatcaaacatcaaacgaaataaatcggttgctttctttgggaaggttgattattatttagtaaagggatgcagacaaaaaaaataaatcctaatgtattcaagctcccaaggaaccgttaagtgatttactcatattagttagattagcccaggcagcgatttgaaccccagacctcttgcactacacaccaattcaaccattagagtgttgcgcagatgtagtaatcaatgatttgaccattcattattacattcacattgcaagaagaccaaggttcgggtctccacagttggaaagaagccaaacaatatatgaatgataagcaaaaagacatctaagttcttgtgggctgcaatgaaattttcgatggctatacgtttattatttttttttttctaaaagtaaaagaatggtcaactttttcaaactgattccgaaatgagcagatatgctaaattgtctagtatttcattgattgtgcagggagtgagtaattgattttaataagcacctgaattagttgttgagccaactgaacttgtgttgaggtgcctttgatttccacagtgatttcatcaggaagccccatactctcttgcacagttagaatggctccactggtacgccgaatgtatgcaatattagatccttcaatgccaataatgtcttccgcataagcaagtggaatttgcatagtttgtgcaatctgattggaagaaaaggaacatgttatcatgacttctaaccaaaagtaagaacgtgaaacagaggatgagaataaaaaatactaatgctggtctcttagtcatagggggacttaagaagatgatacatgtaccaagggtcttgtgcaatttcaaagcattgcaccttgttttaaatccaatcaaaaatgaaatctgattctctttcaccataatcacatattcacctccctttttttttaaatctcttttcttcatttctttcctttttttttcacttaaaacgaaaagtggaccttgcttcagaaagtacgaaattgtaagcttataggatttaaatgaggaatcaaaatggacaaaattggccactgcccacttcaacatactataaaattggaacaacagaccagatatttccaaataaacataattgaatggaaatagtaagtagcattgtgcaaactataacctattatcatttacacacaccaacctgagtaacaatgggagcaccagtacgaccgagacttgaagaaccgagacctgaagaaccgagtcctgaagaaccgagacctgaggaaccgagacctaaggaaccgagacctgaggaaccgagacctgaagaaccgagacctgaggaaccgagacctgaagaaccgagacctgaggaaccgagacctgaggaactaagacttgaagaaccgaggcctgaggatccaaggcctgaagaacgaattccaggaagtgacggatcttgtccatatagagaaattcgagctgatggaatctgtgattccaattgattttcacgatcaagaaacaaagattccctcgttgctgatagaggataattagctgcaagtccagtttgagaagcaccgtgagctaatggcttgtctgcccaggtctctacatgttgttcttgtgaggatggcacattgtactaaaatgttatattccaattatcagcacacaacatgacaaaacaataaaatgtaaagggatacataaatgaaaattaatcttacagttttcttctcaaaaagtggaagaacactatgatcaactaaaaatttcctcagatgtgcaattactgcttccagagctttgagaaccttcaacccttcaccctgcaactcaacaattctttcatctgcaacagcatagtatggcacctcatctgctagcacaaaatttagcatgattaattttttaaaaaagggcagtcattaaatttagcatagaaagaagagctaacccacacaaaatttgacatcagaaacatgtggccaggtgaatataaattttttatacaaaatatctcaaaacccaacaatctttcaaatataggaaatttttaaatatttctaagtagatcccatgataaatccataggagcaaaccatgggtctagtcaaactttacatagctttatatcattaagcaaagaaaacaaaagtgtcaaaagacattcaaactcacaaatagtaagagattacatgcacaacaaaagcttagtttctaactaaagccgcctaaggttttaagaaagaccttaaaccacatatcgaaaaatagtacaaaccacattcaaagagttgtctatagtgttttacatatacatgatattggtgtactcagaatgacaatcataagttctcctgacaagaaacacaacttctattccgaaaataaatcgacggcccttccaactaaaataaaatagcaataaaaataatgaaaagaaatactatctcttaaataacgttgtattatgtatgccttaaaagaataattatttccttttcaattatatcggtagaaatttccaaagaaaacaaaggaagatctccacaaaatcatggcacttaaacttcaacccaaagtccattagattctcaaggaacaaatatagtttcatctcaaatagatcaaagataacaatacaagcagcagacaccaaactatattgctcctatttttgcctatatgtatcaccgcttcaagataattaaatcactggcatgttatagttagtgtataaccaaacaaactcatatgcaaattgtattcgttatagaaaccacaataaatgcgaaaattgctatcttcaaatcctgcactactcaagtcatgatacaaatagaaggctactatccatatggcttggaggaaaaaaaacgactaaactaaagaatcttttctctctaaatagatttgtctcttcactagatgaaaatactagcggttcttatcaaaataataaatgataagtaattggcctatggaaatgataagtagtggccaatcatatatatcttattaaaatgagataagatattatgaacattaaacgcatacctcctgacaatactctgacagatgcacccgaattctcctgtatggatttaatcaatgaaccttgttttccaattaaatttatcgcttgtgtggatgcaaccaacaatcgaattgaaaagaatgcagctccagcagctccaggcactttgccatcaacctcactctcagataatcccgagacacgtttaaacacccttataacagcatccattgctggcgaaagtgtaatatctggctcttcctttcccgatatcaacacctaaaagaattcacattaaaaaaagacctaaccgaagaaggtaaatttgtaaccattggcctgtgaggaaaatcctcttccatataaattgccattttggcttgtgggttctcaactatagaatttgacacaatcatctaagaagccacaaaaattttatttaaacaaccacacttgcaaacagcaatgaacattggagaatcttgaaggaaagtaatagcaatagtagaaccaaaccaacccaaaagataaattagcccctactgattcaatgaactcccttttctggtgaaactaggtcaaccgcaactcttgggatgcgaaaacaagaaattctggtgactaccatagcaaaacctctctacaatgtccatagaaagatcccatttttattggtaccctaatatattctcaacatccaacactaaactaacgcatttacccaaattaacaaataaataaataagcagattccaatcagggagggagagatatgtaaagaagactcacgattcgatcaggagtgcctacggcgccatcaagaactcgaattcgtgcacgcgtctcttcgcacatcttcttgataagctcccccttacgaccaatgatgctacctaccttgaccaccggaacaatgagcctgaacacgcaatctcccggccaaccaggccatctcttgtcagcggcggtaatggtagctgacgggggagctgaggcggactctagttgggactcagtagagggtgccaccgctgtttcggcctcagaggcggaggtagtagtcgcccccgtttcggttaccgtattggtgggaacaagagattgcaagaccgattccggcgcctttgcgacgccgttcacggcgggttcgttagtcgccatgggagaaggagaacgcaaaagaagttagggtatgtaaagtaaaggggtttagagagaaagaagaagaacagaaagaaagggccaatttttacagatgagtttttagggttattagtcaaatagaagtggatattccttcctagtctctactctctacccacaattacacagtttggttcactctttgcttttatgaaacaaagtccaattattttttatttttatttttttttcgaaaatcaactacttttaaatgtttctaaaatgattgcagcgctagttgcaataggagtttttatacgattttttgttacaatttaggttgcaacattatttgttatatgcattacttatgaagggatactgaattccttactgcttataatgtgcatctgaataaacagaagacatatctctcattcttttcaagaatgaaatagagataacagtagaattttcttcagttgaataactttctggtaattttgaatttac

SEQ ID NO: 298670 - DNA, 1370 bp, Cannabis indica
ttttattttaataaaaaattagtatattgtaccatactattttaaaaaatacatggttaaatttattatttaataaaataaaaagtctaaccggtaacttttacgaatcgtagaatctaaaaatattatttatcctaaaaattataattgtttgaataaaccacttattactaatcggagtactgagtgaatgagttatatgtagattggacaataaagtgaaaataaaataaaattatattaaataattttttctgactgaaagcgatacaaaaaaagatcaattgtaaatgggagcaggactagtcatacgaattacaggtcttttaagccttcaactcaattaaaaacaacaaaaagtcaattagccaatataaaatgatggccaatatcatatctttatattaaattaataatttttattgataccattaaataaacaggtatcaattagtactataaactggattttggttaacttagtttttttatgtcaaaatacctcattaggttaacttatttgaaaagaatgtacgtgtgatattaatttggaataataataataactaaaactttaataataatgcaaccaaaaaagtataaaataatcattcttttaacctctctcatatttgcttcttttctttttctttatatagaaggatgaaggacaataatacataaaaaaaaatagacaatatcatcacaaattggagataaaataaaaggaaatgagacttcgattggctttggttgttagacggttaggttttgagagaaaaggaagcataaacctagtttgagacacgataatatggtgcgttttagcttgcaactaggtcacaaagcacgagatagggacatggatgtctaacaagtttgtcctttctttttcatcaaatttaactaattaaatttgttgatttcttctgattgagatgtggatttaaaaaacctagatgatacataaaatatagtttttcttgattttgattttgattctttgttgttggatggttggatagaaagagttatataggtccaaatagagaagataaggtagttgagaatatgtgttcataaccaaataagtaaaaatagaaatccacttgtacttataccctatcttttaaataagttaaatagagtaattaattaagaaacatataataatttaatttttttttaccttctatcatttgtaccaaactatagctatagattatatatattaggactaaataatttatattttaatagagagatttgtaacgccccgatattttgccttattttacaaaaatactatcttcatgcataatttgaaaagataaaaaaaaataatttaaatacaacagtggattttaaaa

SEQ ID NO: 298671 - DNA, 569 bp, Cannabis indica
gtaaaatatattccaacaaaaatgttcactctttgcacatgaaaaataagggtatttataagcacatgtatggatgagaacatacccttcaccgacctagggtttcatattcaacgggtaacaatggctgataactcaacctggcgatccaactgttggttgataaggtgtctcctcatcgtgtggtgtgtggctactgcaatcaaattcgtggggcgaaagacacgtgtagcccaaaggttttaccttgcaaagttgataatttggtgtctatacaagctgttggacaaaagagagttgcagaagcacgtacacgcactaccaaggtctaacgtaggtgacaaaatctgatttggtgtcaagaaggaatgcaaccgtcgccttgagttccggataagacacccgaataagttccaagaacatctagccagagctttcccgaaccagactaacctgctaacctcctggaacacccataacttttgatccttctcaataatagtttattaatgagaatctcagagttctttctgcctttgctgacagggagagcctccgaataacttctg

SEQ ID NO: 298672 - DNA, 587 bp, Cannabis indica
attttaaatattttaaattatttaagtggatcaataaaatttcgcaaaaacatttacccgaccaaatgaatgggaagaagtgctgaccaaagtgattgtagaagttaaggactttagccataatttttccattttggaggttaattgtacaaaacttaaaagttcagtgaatttggccgcaaattacttgcaagactatattaacaattcaattttttttttactaaattgcttcaattaagctctgaaaccatggacactcggtagtagagcaagaacctatacaaatgcagaaagtgtcaattggcaatggcaatagtttcccttttcctttacaggaagtttcattttcaaaagtaaagattaaccattatattaagctggagataaagagagttgactgagataattaaatatttacactaaatcatatcaatttataaaaatagtatgagcttgcaaaaaaatacaacataattcaagcaaaatactgacttgaaaaattaattaaaggcttgttgaaaattatgggattccatctcaaaaccaattagcaatgaatggagtagcccatattcttatatatg

SEQ ID NO: 298673 - DNA, 7853 bp, Cannabis indica
aaataacaaataacaaattaaaagaaagaaaaaaaattgaatgtataaaaaaatatttaattttattttaaattatatgtaaaagaaaattatatataaaaatgaaatatatatttgatatattaaattttgaaatataattgtattgtgtgtattggacttttaaattattattttctttacattaaaatgttaattgtatatataattttttataaatatttatggattggatataatcggttacttttacatgtcaactaacatccaatccgcaaaagtgcgaattttaaattttcccatccaagccaatccgcacaagtgcggatatccacactttgcggattgtattagatcgtgcagattggattggatcatttattttacttgtatcttttcacgacattggagcctaaaatcgaccctaaaaaattgcattaaaaatcgacccaagaaaatcacacccatccctttctctctctgtctaagaacccaccaaagcccaacagagtccacgatctctcctctttctccctctttgtctattcgcccaaaacctttgagaatccacaatgggagcccaagagccatgttgcccataacgtcgatcgccccaagttcttctccaagctaaggttaaattttttcttaataaaaaacgaagaaaaagaaaactatcgaaatgtatgcattatttatgagattgttttgtgttatttctattcaaatgaggattgtttcgatttgtcagatttgttttgggtgtttcatttttgtctgccaatttttctccttttttttcgttcaagtttgatagtctcgatatggtcacaatgccaactcgatgattgtattcgatgtcctcgatgtgggctcaacaatggttcaataatgctgtaaaaaataaaaacttataggctgagttcgatgccctcgacgacggttcaatagtagcttaatatcttcaaattttcagtttatttgtgatgggcggcgatgatggatccaaattatatctttcttgcctttttcctttcttgcaattttatgggctgaggtggtggaggttgtgcggtggcggatccaaatgcaagtggaggagcttcaatattagagtgtttgggagagaatgaagaaattatgaaaggatattttggaaacacttgaaatattagcataattttataatagggtccaatagtaagttattttgatttattggacttattttaagcatacaaactaaaattttccaatgtaccaaaaatatatactagtttaaatataaatagtagtgcataatatatatttatatatttatttctataatcagttagacaattaacatatatttttagaaataataaacaatatcaacccctgtattactaatacaaattaaggctatgtttggtgggtgggaggaagagtacgatagatggagaggttagagaggatgatgagtaagagagatagagagtattgttaatctcctttgtattgtttgatattaggtgtgaggtaagaaggatggagacaaaattgattagtaaaattataaaattgtccttttaaaaataaaattttattattttttaaaagtagttattgtattttgtaaaatgtattttgtctttttctataatactttcaaatttggagctccctcttgccaactaagtgttttagtctctcctttcatcactctctctagtctccatctctttccatccactcatctccccctcctaccaaatatagtgtaaaacatgaaaacaagacacttcatgcaacgcacttattcactatagtttataaagttatttgcggcaaaatccctttatattttttttttttggaatagaaatccctttatattttaattttatacacttaattcttttattttttttcttggtggcaaaactccttatgtttatttatttatttcttttgcaaatttgatgtgtcagttaggtataatcattaaatattaactagattaatattgtattagttttgaggttttattgtcacatataaacaagtgtatatagtggttattcaattgatcaaatttgtaaagaaaaataagcttaacaaaattttatcacaaaaaacaaataaaaaaattaaaatataaaagagttttgccgtcaatcactttagtttataaaagcaagcataattaaccttatctaatttacctaatcataggtaaatgtttgtatcccacattgaaaagttataggcagctccatgtggccacataggtaaatacccttatgttgtagatagtaaaaatcacttttttgcatatgctaatttatagttcattcctttagacataaaactccacgagaggcatctcagtaaaaattatttatatattgagatgcattttcattttattctaattgtttaggaccaaattatgatctatgtattattgtattggttgattttttttacttttaaaaatagtgtttaaatcattcacagtattttgttaagtttcgtaacatatagcaaataaaatgataatataaatgtttccaataaaaaatatgtgttttaagaaaatatcaatattaaaaacttttaatatttaattctataaaaaattattatttttttttcaaaattatacatacaacagtaccgtgccaataaaataaattgttagcattttagttagccacatatgacaaaatttaacaaaatgggcacaacaacccatgaattagtttggggatctttaacattttgaaaaaaaatcaaagacacaataatatataaattatgcaaaaataacctttcatctttaccttaaaatatcatcctctttgtaaattttggttcattagtattcatacatgctcttctttcaattctttctaggctataaaattagaaagtaaaaccctcttcatattaggactgcacatcgggcagatattctgagttttgagtttattaagtttgtttttttttttttttggtattttgggtgtggaaaaatatctacagaacctactcattttagtgtcgggttttaggtacaagctatcgagtttcgatcgagtttgatagatttcacccgatatacccaaaattttgaaaaatatatatttattttgtaaatgataattataaccctatcgaatctcctcattgtcctctaaccctcaatctcatcatcaatccaaaaagaaaatctaatctaaactatcctctcccccttatatttaaatatgtataaatatatacacaacatataaatcatatatatactataagaagaagaagcaaaagagaagaagttgcttgaggagagggggggagcggggaaggggatatggcgactggtgaggtgagtgttaggtttaaggttggatttatttaacattatatatataacataacgtactgagttcggatttcacccaaaactcaatatttaaagaatgtcaatccgatactcgcctaaaatatcattcagttgcacttgaacgttattcttttaattgtttttcttaggtactactgagtccagatgggcaaagacaagtgcgtcaagtgagctgaattttcgggtctaaatattcagtcctacttcacataacctctaaatagataagttttgtgcttgcccaaagcctactcctccaagcaccaccaacaaagtcagaagtcaaaaccttgttaaactctactgatgatgccgcttatgaacctcgatatacttttgaagtttgaaatgataatgatctttaggtcagctacaatgataaagctttcatgtactttaacacagcaagccagtatgcaaagtgtgatagaaaaaaaaaatgatttttgattttacaaatagaaatcaagatgtttgcaatatattgttttttatgtcgggaagtgatggattgcagacaaacctccacccatcctgacaaagcaatagaattatcgtgccatcatagatagtaagtagaaacaacaccatgataccaaccacagtggaaaacttcattgtcaaaacaaaaacaagcaaaataacacgaaaacaaatagaacaaaccaaaacaacacaagaagcaatcaatagcaaaattctgatatggtggacggcaccagtgcaaagcaaacaccttctcgaaccaaatcacacctaattgtttcttttattacattgttaatattgcataagttactaattagaccatctattttgttaaataataaaatgaatcctgtattttttaaaattgtacaaataggacccttcactgattttttactaaaataaaaaataataataatttgatctagaaacataataatttgatctagagatattataacaaaaatgattacattttctgtatttattcgtgttaaaaattgccttaaagttggttatattaaaaaataaaattattgaaaattgagctgagggtcttatttttatccttttaaaaaaatataaggtgcattttgtaatttaacaaaacagaaagtctaattggtaacttttgcaaaacacatcgtccaaaatggtatttaccctatatataagttaagaaattgaaattttatgaaaaatttgtttttaatgtttcatataccaactagctgcgtgcttagctcaaactccaaatttaataaaaacaaatatattcagagtagcaacgaagcagcacaatttatgataatatacaatatttagctgaaatatatacttgttattgccaatggactttttatttcagtgcagaacactaacaaataataagaatactaataatggtaattttagataaataaaacgaaattaatattttttaccaatccaaacccaagtttcttgaattgaaaagcttctcgatgtacagaattacatggtcagacgcaataatgtagctttgcattttaatctttgcagaggcatctgaaaaaaaaaaaaaacaatcaaaagatattgtgttaataatatagtcgatagtaaaacccccttataaaattatcatcttactcgagtttttcgcgaattgttattgttaacacattcctccgagtaccaaaaagaatgagcttcactagatttatgttctatcagtattataagtccaactcaacctaactatgatccaatatacgatccgaaaagaaaaacttataattgcccaatctcacaatcatataaaccaatggtccatccccagttccccacttaacctaatcatacaatttcttctgaatcaaccagattcattccagattatgctacccgtgtcaaattcaatgttacaaaatcatagaatgccaagtacctgaacatagttatgtaatgatataagtataaattgtttcaagagaatcaagacttactatcttcgttaagtttcttcatcagttgctctctagtaggtaggcaatacatccctgcagcaacagcttgtcttatagcccaaccgtggtggggagcaaatacttttgcatacgccttggaagcaggatccttaagagaattgcttctgccacatgaagatcagtagcaattactttatgcataataagcatcaaaaagcaacaaataactggagccccactgcacgccaatattatatgtgtgtgcagataactttatagggtacagcatttggcaaatagtttgtgaaaggatatacatataatatagagcttttgatcagtgaataaactaaggcatagacatgtaatcttagtctataagtagagaattcgtgagctaatttagttttatgagatcttcattcataaagcacctcattcagtttcaatgatagcacgtactttagctgtttagcaaatgtagaaacaatagaaatgatgaaaagtatatcagaaatcgttgaatttgttcataataagtttgtcactgacattaaaatcacaatttcacttactactttcagaacacaaaaaaccttagtttctgcaactacacttgaaagaaaagttgagcaatgtaacatatcaactttatgaagagttgtataacatatcaacacaatacacaaatccaagttcattgcttgattcttatgcctccagaattattttctaaggtgctaagattctgtcaaagtgtctgaatcagacattattccaaacatcaatagtgcgagttatcttcttaattcagctaaacaatttaatgtgtactttctctgaattccatcaaattctagtcgtttctaaataactgaaagttttcatctcaataaactaaaaccaccttgaaaatccacattcaagattacagagaactaattaaaggaagttgcccattcctcaaaagactttgaagtattcattgaattttatttttatcaaatcatcataatattgacactaaaggttgcacaaagtgttttctaatttaggtataaattggtgttcttggttgtaattgaaagagacgattcccactcatctgctactaatcttcttgaaactttcagaatttgttataatgtttttcttttctcctggacatatttatcttcaatatccaacccaaattagcgaagcaaacaatgcccttgtaattggtttaaatgccttcaactccaaaaatagaaacactctcttttaactctaacaaaaattataactggagtgggaacaagggagctttcctatagttagttatatgggataaacatttcaaggcctaccgccttcaaccaaatctaaaatcactctaggcaacataacaaaactatatgaaagctacactagtaatctaagctatggaagtgtgaatatggcaccaaatcacctgaattcttcaaggagttgttaacattgacaatgtacatagcacatcactactttagatctagtctctatttaagatgttagtttgcaaagaaacctaaataaacgcattgtattgcttgttctaaccctaacaaaaccggccaattttttctacaccagaagaacgctttaaattttaagtcggtagagcataaaagtgagaaattcatactctgaagcaagaatttgctcgaaaagttccttgaccatttggagaccacgcttgattctcaacaaattcctggtatgactaccggcattcctaacgcacttcgcttcaatatcaccatcgatcaaagcctgtaaagtcacgttcgacttcgacgctgtcgcgagatcattcacctgatcataaaaactactattaatttcgatttcgattttttttttttggaatccggaatcagattgaggaattttatcataccttgttgacgtaatccatctcggcgaacttgaaagccatacctaagcacccgaagaggggagaaacaaaagaacaggctcgagagaatggcgctacctccacatcctctgctccggaattcaacgtagcggcgagatcattgaacgcctcttctattttgctgagctgcttttcttccgccattgatgaaccagagaagcttgctatctcttttctctctgattgtatatgtctctgtcaattatgaacagtcactttctctagaatcgtattatttttattcccttcttaacgcggtaattgaaactgtttggttctcgggatatatctactctccctgtttaattactatatccccggactaccctaatccggacgtggagtatttggggtagtccagaaatttgcgccataaatctcctaattattggtttggagtagtgtcggtcttgaattgaaatggattatagataaaaaaaaaattaccgttaatataaagataaatggtatttttaaaaattattaaaaaaatatatatctttaaaagggtaaacttacaaaa

SEQ ID NO: 298674 - DNA, 2738 bp, Cannabis indica
acctccataaatgccttaataatattagccgattcctcaggttacaaattcattgtcacctttggaaatggttgaacatcttagaaagggaactggatcttatggacaggtgtttgcactctctctctctctctctctctctcgttaataatgttatttggaagtgaaaaatgcaccaatcgttttcttttcaaaaatcatgataagttgaggttgggtgcaggttgtcattgcaaaatactattagtatgtttagcacttcaattgggttttaactaaatgcagatggtacatgttgaagacattcgtgctagggaagcaataagtgtggaaattccaaataatatatcacaacatatgatgaatgcacttaaacgaatgaacgtgtctaaattgtatagccaccaggtatggtcattatgttcatgcttactttacaaaacttcagccagttatggtcatcttgtacatgggttttggtttttatgaagttttgacttgcaggcagaatctatagaagcttccctggctggaaagagtgttgtcgtatcaacaacaacatcaagtgggaaatctctttgctataatgtaccagttcttgaggcattgtcccagaatatgtcattgtgcgctctgtacttatttccaacaaaggtaggctggaattgtagcttggggtgttattaataatcatatataaatactagacgcagcacatattgtgagtgtgtgtaaaccaaaacatttcttggatgaaggctttagctcaagatcaactacgggcattatacttatgacaaaagaacttgattgtgacttgaacattggtgtatatgacggtgatacttacaaaggggacaggagatggctccgtgataattgtagactggtaaattgttactttttggtttcttaacattgttcttaggcactctgcatcactttaattattgttgacattatttttgcttgcacacagttgatcacaaatccagacatgctgcatttatcaatattgccataccacagacagttccaacggattttatcaaatcttaggtagtgcattattatggtttgttaatattgttgctgttgttgctgttgtcgttctcttttctggttttttcagttgtcaggcttgtaactacagtgacacattcttcttatgatatcgagatttttgtactttatttgctagatttatagttgtggatgaggctcatgcttacaagggagcatttggctgccacactgctcttgtattaagaagacttcgccggctttgtgcgcatggtatatattctctcaaatctgacaaaatagcaaacattatgtatagtttttgtgtctgtatatacttatttttctacgcatgctggtagtcacattcctattgatatttttcatctctactttgctttgataatcacctggctgtttcatttatatgcagtgtatggaagtgatccatcttttgtattttctactgcaacttctggaaatccccgtgaacattgtatggtaaagactttgagaaatagtaatgtctatttttcttctattgatttcaaatcggtgtagttattattaggttttgcgttgtttattctattcttttcttattatataaacaaaaatttaggctaatgcttacgtcactggctagaaacatgcttctgaaattgctttggtggcctgtggaacacttttcactaaatattttgaatgtataaatacgtaagcattctctaatagtaagagtgggtgttaatcagttggacttttcttcaacttattaagaaatgccaaaaaatatttatatatgatattaccttggattgattagttgatttctcattctgcttgtgttgcaatatgaaaatgacccactccattctcatcaggagcttgcaaatctacccacaattgagctaattcagaatgatggaagtccttctgctaggaagcaattcattttttggaatccttttttccatcgggataatgttcgtgctttgttataaactaatcctttacaattgtcactgaacgatttctataattgatttttagtgttgtttgtaggtgtcaaagaaaacacatgatagcatgaattctatcaaccctgatgttgaaaatactagaagttacaggtatttaatttccatgttaaccctctttcttctaagataacatgctttgttcttgaacttatctctgtttactgggagtaaaaagtattagtaaattacgacataacctctaatactttcactttgatagcaattaactccaaatcttaaattttagcgacaaaacccaaaactcgtattctgttagcagttagacatttctattcaaatttctctattaaatgccatgttggactatccaagtgtacactcttgtacacgtgtcaaatttacattggtccatctgatatacttattatttttttttaaatgtaatatacttatttcaaaaaacataaataaataattattaaacataaaaacaaaataaactaataaataattattaacactgtgatttcaaaaagggtaaattgcggcataaatacttaatgtttcagattttatacacttaaatacctaatgtttatttttggaggcaaaaatacataatgttataattctcttacaccgttactaccacttccgttattaactcataaatatggacacgtggagggtcaaaatgcattacatttattt

SEQ ID NO: 298675 - DNA, 2602 bp, Cannabis indica
gtttgaagaaggaagtgcaaatactactattatttatagagatcacttttgacaagtactgtagcaaaaagagatcacgctgtccttaatttcacaaatattccaccaattacaggttgaaaaaatatagagattcaggatcaaataagaagaaatgtaaagaaagccatgggccccaggcccccctgaccctgaggaaatccatggtttgtcacgtgggatcagtgcagtggaaattaatacacagagctcttgtacgtactaatactagctaatatcgaattaggctcagccaaaatatataaacaatgaaaattgtaaaaggtagcctgacttgttctttttctcttgtaattatataattatagcttagcaagccagcaagaaaataatagtaattatcgggctcacaagcctaacatattgacgcttttatgggtataagggaaagaattttgtacaatttcgtaacccaattagtaatactagtactaccattcggctaatctatcgttttgtttagaataaaacagaataatagtaacaaagaaatactaatactattaatattattggatttttattatactttgaatttgttcaatgaaaaagacaggtcggattaagctcatatatatgaaattatgggcaactcttgagtctgtagactacgttctaataatgttttggatatatgtatacgtatttatatttataccgtatattaactgcacatagaataatgatatcaataaaaagtcgaaataaattataaaaaattcatagtaactaatttgtagggttattataggggggttttatttcaaaattttggcggtggcgtttggagggtgtgatctttttccgacatggatcacgtgggaaggtatatgagtacaaatggaagaagtagaagagattatattatatttatagtatagtggcttatttacagcccttgttagtgctatataattcccacagccacagcaatcaccatcaccatatagttatatatactgcccattcgtccttaccacaaccacaatatatgtatatgtacatgtgtagtgtagtgtagatattttccatagagtaactatatatatatgagactggctagttgataatatcatacacatatattatataataatatgtaacataataatgcgtgattatatatgtacgtaatgtacgtagaagaaagatcgagctaatatatgtcagcgatagatatgatgaatcgaaatatctttcattgcgtcattaactttatatatatagcagatcaaattatttatctatgttcattattgaaaaggttagctacctagcaaaactgcaaaaggatggaatatatataatgattaagtacgttctctatctgggcgtgaattattaattatgatatgccgctatcaaaattgtgtaacgatggagaattagacaagtagcgtaacgtgcatgcccaaggttcatttgaatttggccgacatgtatctctgtgtgctagtactatactactacataagtacatacgtgtaatttaaagtgtcgatttggacgtttgaccattaattttctaggtttaataagtaccttactttatgtgcttgtggtatagtttctctaaataaaaaagtttcttggagcttttatcattcctagaaagcaattgactcgcggaagttggacctagaaggctttcttgttcttctgggaagggtctttaggaatgttagtcctcctccggaaaagagttctggatggctacctgttcctcctagaaggcagtcccggatagccaactctaattggctcttttctatccgggaaggttcttcaagaagtgccttgaaccgtgactccggaagccctcatactcactcccggatgcactcctttaggatattgatcctaaggcctataaatactgcctacactagtcatttcaggggtgcgtcgttcagtttgagattgggaaataaagagagaaaagattgagaggtacagagaaaagagagagattgggtttgggttttgtaagaagaattttacagaagattcttgggtaagagtgttcagatttattttaccaagatctagatttactaacatgtatgttttattaacaccctaaatacgaattctctaaaataataaaattaaacacataagagtttagaaaaccttacattgatggcagcggaataatatgactccttctgctcagatctctaactcttgttcctttctgtagaagaataatgacaagatctgagcctagatcacattctctccttcgggttggttaccaccatcttttgcactatgattgagtacttgacttgctatgtgtgggcatgacactctatcactatgactcgagtatgaagaaaaatgaatgagggccgaaatcactatagaaggagtctctcatctactagttgtctggcagagttagaaactagatttggtaagttgaaagtattgtctgagaataagagcatcgtgttccttttatagtatttcaactagggtttaggattgaattatatggattaaaaaagaataaaataatgggcaaaaattacacata

SEQ ID NO: 298676 - DNA, 1126 bp, Cannabis indica
gctgaggcacccaacgacgtcgtctccggatttgtactgtagatcagctgggcaaccgtcgtttaggttgtttggacacgttgactcctggcaatccccattaccgccttctggcctaaccgaaacgggcaagttgaacccgtccacgttgctgacgtcgtaataatcttgtccaccgttttctgcaacggttatttcgaccagagttgttggagggactccgcctgcaccattacactccaccgtaccagaggcacagtctccgctagcgcacgtgaacctgccggatgagtcagtggagcaaccatctcgaccccagaagcgccctgaccattgtccggctgggatttcgatggactggctggctcctgatgctaactcgaaaccagtggttgagagttgtgaactgtcgctgccggattgggttgctggccagatggttcttccgcagttgttttgaatgttgacggtaactgcattcgtccctgtatataccaatgtttttattttttattaaacagttgaataaattgtaacatcatttagtgtacaatgtaattatatggactaaaaaaacatatttatacctttcaaaaaaaaaacatatttataaaaactcttgataatttaaagatactaaaatcaggatataaaatatttattttgttacatgtgtgttcgtttcattttttacacaaagctgattttttttttctttttatcacttttagacatctaaaacaataagcctttgtttagaaaatcatttgagccccctaaaactggaaaattgatcatatagaaatctaaagttataatttattattataagaagattcctaccattaattaaatccaaaatacaattcgtacaataaaatctttatacagtaaaggttaatttcaatatttcagtccgtttgaaataattagattaacttctaatgaattgcaatagattataatttgtttaaaaaaaaaatgtattaagtgtcactcatgttccctactgatcaccattaattatttataagataataatattattaaaaataattttttttaaaagaataaataaatgtgccaaacaactttatatatatatatatatagggacatgattttg

SEQ ID NO: 298677 - DNA, 4289 bp, Cannabis indica
aaaaaataatatattaaattacaaaaatggtataattattgtttttaattgatttatttgaagaatctgcatttattatgattgaaagtataatattagacaattaagttataaacaaaataaaactataaaagttagtacttatattacataaaaaaattaaaaataaaagaaattaattgttttttttttaaaaaaaaactataattattaatgaatagaatccattacaataatagagtggattggagaaggaatttcccccaaccaaaaataattattatccaatcgaagagtgaatctagctaagtcatgagcggctctattagcctcacgcttaacatgagaaacaacaactctaggaaagtaggataataaaagagaaatatcatcaatcaaatcatgaaaatgatcgatctccacgaaatcaatattcaatccattttcaagggcccattttagactgtgaatcaatccattcacttccatttctttgactgaatagcaaccacacaaaggtttagaaaaagctctaataacatctccaaaataatcccttatgacaactccaattaggggtgttcataaaaaccgacaaaccaaaaaccgaccatcaaaccgaccatcaaaccgaccagaccgtaaccgaatttttagttccaattcatcaccgaatttggcggtcggtttcagtttcggtttttttgacatggcggtcagcttcggtttttgaaataaaaaaatagttaaaccaagaaaccgccaaaacccccaaaaaccatccaaaactggcaaaccaaaaaactgccaaaaaccgtacggtcggttttatacggttataatttctaaacgatcagttacaattttcgtaaaataaaaaccgtaaccgaccggtcagttataaaattgtaaaaaaccaaccataactgaccgattttcacccctaacttcaataccaataaccgatccatcactatcaaacggcgcacaacattcagtttgaaggatccaggtggtggtggtttccatgtaatcggggttcgaaggctattattaatggaacttgcatgagcaggtctttgaattttagccaaggacctagagtcactaatcgggtgtacttgagctttgtaaaattattagagataagtttcagcaaagtgcaaataacatttgctggttttggcttagattgatggaattccttgtttctttctgtccaaatacaccacataaggcatagaattttctccagttcaacattattgaaagcagccactaacgtagagaaaatatcagagccatggaggttggtgacattgggattgagattgtagaatttggcttgtgaccacacctgacttggtctcgtgcatgagaagagggcatgacctattgactcccaatgacaattacaaagcgaacaagctgtatagttgtgattttgcaatggtggagattagcagcagtaggaatagcattgtttataaccctccaagcaaagattttgaccttctttggtgaagtaagggaccataatctattccaccaagatctattcgaataagatgaagaagaatcattcatttttccaatgctttcgactaagtgataaccagtctttatagagtaaataccattatcataatgatgccaaaataatttatcctctcttggagtagaactaagaggaatagcaaggatacgatctacatcaatttttctaaaatgcctctcaagaagagtaagatcccattgacgatcaggcgtgatataatgttcatcagtgaactcacaatctcctcaataagaatacgggatgaatgaagtagtacttggcagccaaggattggatgcacattgaactttattcccaagatcgattttccaacgaagtctcttgactagaaggtctctcccatcacaaatacttttccaagtaagagaaggcaaagtacccttggaagcagtaagaaaatctccatgcttgagtcgagcttttaagactctagctaaaagagaatttggatcatcaaaaatcctccatgcttgtttcgcaagtagcgtttgattaaaatggagaaaagaacaaaaacccaaatctccttttgccttagattggcaaagaagactccatttcttccaatgaatcttagatttgtttgtgtttgaactccaccagaaattttccatcatagactcaatttgttggcagaattttttagggagactaaagtagctcatggcatatgtaggtatggattgaacaaccgcctttaacagaatctcccgtcctcctatagagaaaagcttcacatgccaggaattcacgagtttccaaattcgatccttaatactgctgaatggttcttttttatctcaacctgcgtaagaaggaagaccaaggtatttttcatgaagatcacaaatcggcatgctcaacacactattaaatttgttctgtacaacatcgttgatgtttggagagaaagacatcacttttttctcagtgtttaagagttggccagaggcacaatgatacacatttagaactctgtttatcgattggcatgaggcttcattagcttggcaaaagagaaggctatcgtaggcaaataaaaggtgagtaactgaaggagcatttctagaaattgagagccccttaagatttccaagctcctcttgcttttgtaataacactgaaataccctccgaacaaatcaaaaagagataaggtgatagtggatcaccgtggcgaagacctctttgaggggtgaccgaaccatggattacaccattgatgttaaaagatagagttgaggaagagacacatcgcatgataagatcaacccatttcgcatcaaaacccatctttaacataaccttctttaagaaaatccattctacccgatcaaacgccttgaccatatccaactttaaagcagtataacccatacgacctctctttttattctttaaacagtgaaccaattcaaaagcaagaagaacattgtcggtaattaaccttcccgggagaaaagcacttgggttttgagatgtagctgctggcaaagccgtcttgaatctattcacaagggctttcgagaccaatttgtatagaaccgaacataaactaattggtctatactcacttagtcttataggttgctccacccttggtattaaagtgattaatgcagagttaatcgcttcaatatcatcaccatcatttaaaatctgcaacacacattttgaaacaagaggtccgactacgtcccaatgtcgctgataaaacaaaacagatatgccatcaattccaggggacttgtcaggtgccatggaatgtagagcatcgtccacatcagtacgggtaaactccttcaacataaatctattcatgtcgtcagtaattgtaggatttatagcttctaatgtagtggtaagagcttcatcatcagcctcagtagaagtaaacagtaaagagaaatggttcgaggcttctgttgcaaattctacatctgaatggagggttctttcgttgctgtcaagaagagttttaattttattgttgttgtatcttgacttcgctctagcatgaactttttttgtatcagaatcaccacttttcagccaatcaattttcgctctctgttgccaatataaatcctctttttcaagcaagtcatccaatattttctcagtatcaatcatatttgcaacatgggaaggagatgaatcactactgttatgcaaaccaactgactttttctgcgcttcatcaatgtttcgcttcatttgaccatacttgttattatgccaatgttgtagggcattagaataagctgagatattttgcagcaaaaacttcatggatatgtcttcatttgtcacaaaccagttattcacgattattttacattcggaatccctgagctaaaattgttcaaatcaaaatcgactatggcgatggaaaacacggttattttgagctggtagagataccgagtattcaattgctctatgatctaagctgaaaaaatcaagatgagtgagatgattctaagcaaaaatagattatatgtactaccttgaaatttttatcaccttagggtaactaattactttatattatttttccctttgtttaacatttttttttgaattttttcccatatatatatatatatactagtaaaaagttaacgtgcgaggcacgtatattaatttatgttaggtatttttaatttatttaaagatataattaacaattaaagaaaaaataattatta

SEQ ID NO: 298678 - DNA, 2643 bp, Cannabis indica
tgtatattctaagatagacataaatacatgtgttgtgatcctactcacatcctggcattaatcttaatttttcttttcttaacaaaagatagatatgtattattttttgtctgggattatatatatatatatatatatatgaatattgatattgactctttcaacccactcaaaaaaatttagttacgtctaacaaaagaagattaagatgaaaatttagatttactcaatactccatgggacaagtatctcattttccattgactttttcattctaaataaacattatatttcggagttttcttaattttggttatattttaaacaattaaggaaattgataggatacatcatatgaatagaatacatttgtacatttataagattttactctaaaataaatatatgaataattactcaatcattacattaaaaatgctagtatgatgactacatttttatataattgggtaaaaaatttatttttaaacttaaaataattataattaattatatacttaaaataaaataaaattttcaattaaaatatttaataagacatctttacaaataatgtttatatatactttttatttataaagaaataaatgaaatttataggtaatttattaattagttttatttaatttttaaattaatcacaaccgttttaaaatagtccaatctatatatctatatatgtaaaggagaagtatgaggcggtgatatgacacttaagataattttattctactctagaatttttctcattttttcatattttttaatcacattaaatattaattaattcaataattaataaaaaaaaaaatcgaaaaaaataactaattacaaaaatattgtgaaagccagaactgctttataaataggctcttgtaagttatcacggatgggaaagatggaaaaatttgggaagaattgggttgatccacggtaaagagttctgtcctactcttatgaccaattatccaaataactctatttggattatggacctacagttagattctggagattgggacctcttaaaactctactccctctttgactttgagacttttgaagggggggtaagcctagcggtctaagaaataattagtggatctgaactgaggatcattataaaactttcactaccaagtctgcctacctagtccaagctttagaccatgtcccaccgtgtgatgtggctcattccctttggagcaaactgtggaattgtaaggtgttagagtcccataaggtaatgtggtggaacattctttctaactgcctacctattcgtgctattctgactaagcggatgcaaatagaagactcttcctatcctttatatggggtggggaagagaccatggagcatctccttccatattgcaacttttctttccacttatggagatcttttccgtggggtgtgttgtcggtcattaattatggtggtcgtgtttgggattgagtcaaattcctttggagcttaaaaagtcaaagggtgaaaatgttgaggaagttttcctctatgcttctattgtggtggatacaatttagagtgccactaatgaaaaggtacacaataatcatctaaacaacattaaacattacattgattcgatctctcattgttatgtagattatgattactctttattccctccttctcgtgatgatgctccttccctttggtcccctttctcagaaaactggatcaagattaaatgtgatgtgaaagtgaggagtggggctttgtgtgttgtggcattgtctagagattacttgggaataattttgtgggttgttacgaacaagttcaccttctctgatcccctcattggtgaagttgggacttgcctgctagcacttgagacggtggctgcttggaagcaccaatttgtgtggattgagagcggttcagagaaagtcatcaaaactttgaatgggacctattccaactagagtattgataactatatgttgtgttgtgctagtctttctaattattttgtgagttgtaatttttcttttattttaagagattataattttgcggccaataatgtggctaagtgggcttatgctcaaaaatttactggtatggttgatgtattagccattccacaaatattattagttatgaccataaggtctcaatttttctttttttttaaatgaacgctaatgaacgctaattttttttaaaaaaaaatacataaaactaatagttaaaaatatctcgattataaaaaagtaaacattaaataatttaattaaaaatatctaaaactttcttaatttaaatttgattaaatttaattttatttactttttcattcttaattaatgaattttatttggtatactcttttatattgggtgattactcaatggttacatttttattgtaaccatgatggttacatttttattgacctgtaatagcaaggttaccaatatgtaaaaatttcttttttaaaattacattaactataattaattatttcttaaaataattaatttttaatttgaatatttaataagactctttttaacaattaatattaataattttatttttatatttaagtctctattataatttttttaatagttaagccatttaattata

SEQ ID NO: 298679 - DNA, 2882 bp, Cannabis indica
gagagaggagtttctacatacttctctttcgctttagttgatgctcttctggtgggaaaacccttaagcttctctgcactagcctgaagttcaataaggaaatacagaaagccagaaaacgaagcctcaaactaaaaacaggaacccttaagcatcatatcttagtaggaacattacattaatcaaggatactgaaggttctatctgtgcatcgtcagaacagttaaatagtttattttgcaaaaccctgaagctacgaacttctcccattttctctgaattgggcattgagctgagggaagaacttgatagaggtgtattaattccaaatgttggacttcgaaacccatcttttaggttgtttacaacattccttacagctgggctaccactgttttcttggcgcttcatggagggcgtaccaatgtctttgtaaacaacattccttacagctgggctaccactgttttcttggcgcttcatggagggcgtaccaatgtctttgtgttgatctctgttatctggattctcgaaattcccatactcattgtctctgttatctcttagaggggaattgtttgagatattcttcttcactcgaagatagtcttcttctttctcaggttcaaaaccattgtaatctctgaatttaccaagtgaagatgtttttaaagcaggtggtgatgtttcactcctatgtgatacttcttgaatcttatctgctatattcttttcgtgaaataaagtacggggctcaactctgaaactcttcttatcacttttcttttgtgcaaacatggaggaactacctccagcattacttaatcttctgggaattttatcttcacaataggaaatgttcttttcttgttgtttcagtttgcaaccagaaagctgaccactctttttagttctagtttgcgccttggctggagccctcttccttgtggaagaacgagtcacaggtctcttgaccctataatcagagtcagaatcagtttctattgtatccgaattctgtctaggcttagatagtgcatcacctatcttatcatatgcatgttctttgctttcacgactctttctcggcttggatacggtatcacatatcttatcagatgtctgtgctctattttcacgattctgtctaaacttggatgtatcacccgccttatcagatgtctgttctctgttttcacgactctgtccaggcttggacagtgtaccacctatcttatcaaatgtcggttctcttttctcaggactctgtacatggttatcaactggatcacccatttcatctaatgcttgctcttgatttatacgattgacacctaaatcgggagttggagacttgggagactgctcattaggggttgaaacagctcccagtatctcctggagcttcagtcgtagattttcagtttttccatttgcattcgctttgttctcgatcacctctttatctgattttgaaacatctgccatagttgcaaaggtaaactccggctctctctctctggatccgtccctccttcccttcctttcatacgtgaccccattgaactttttactggctggtgaattagatattcgttctgagcaaagaatagtcgcagaattggttgttgcttttgggaagaagtttcttgtgttaatccatggggattttgggggctctattgcttcagtctgtttagttttctggggagttgtagtttcctcgatcttgctttttccttttgcagacttccttgcatcagaaccatacttaaccctttcagcattcggctttgcaatatctccatcctttgaagcactattctgtaatgaatctaccaaaatcccaattgatatctttctggactggctcgatggatgattattacttcctaaactccagtaatggttcatttgctcctgcaatttcttaaacatagtcaaatttgatttgaattgcaatgaatccagcatagtcagcaagcacgtatgaaagtactaaaatgagtaaagaagcccttggcggcgaatcaaataatactaataaaccattgtttgctcctacttacatctcgcaactgttgtgagtcaaactcaacccccatccttgcaattcagctggggaggtgaaaccaagattcacgatggggctctaacctgaagagtaggatcaaaattcagtaaaatgaaaaaggagctagctagttccgaaacccgatattgtctctgaagaacaaaggggctaaaaacaaaagcaattctgtgatctcattttcccttgaattaggatagttttccgttcttacataacatatgaaaaccccttccaaaagaatagaacacgaagcataaatatgcagacatatactcaaaaatatttatcagctgcaacccacatttacttaattctaacgaaaatcacgaaaagaattgtggtaatttttacgataccaatcggtttttcatagaaatatctcacaacattcatgattttcttaattagaacttcatcaacaatgatcaaaattagatatcataaatcgaatttagatgaaaccctgatcatgactatgattttatacaaacatagaatggtaaattgaaatttacttctctagctggaaacgaaaccgatacacacagaatagagaatcagtgttacaaacgagatccgagagtgatgttgtacaaaaccaaataaaggaaagtagattacagtagctgaaaatcaatgaaaagccaaaacaaaagaaacgtgatgagaaatactgagtggtaaagaacaatggcttacaggcggtgatcatggatgagctcgtcgttgcagttcttgagagagagagagagagagagagagagagagagagagagagagtagtagt

SEQ ID NO: 298680 - DNA, 1367 bp, Cannabis indica
atagttttagaatgaattaagttattgttgggaatttgaatgatttggtttcggacttcatatacacaattccacctacaactaaaaagaaatttttgtttaaagtgttgtagagttgttgtttttggatattggatacaatttattaatttgttacattttttctttttctttattgcttctttgatgggtttaatgcgcttttcgtctaaagggttggtatgattaataaactaagttagtttttagtattaatcatagctagaatatacctgatttagagtatgaagatctagatgtggtgtttgatatattacaatgtcatactggttcaaacttgttattgtttatgttgtttggtcctgacttgttatagttatgtatttaactaatgctactgcttagataatggcagtgtaatttagatggaaggagattgagttgagagtgaagaaagatccgacagagagagatagagtggaaagggttgaagagggagaaaggagcgagattgggtctcgggctgctggtagcggtggtttggtgcgtcgttggcctgcttcgtggtttggttattaaagaggcgaaggggagaaattatggatgtgcgagggttcaaaacatgatgaagactaaatgatagctttatttgtcaaaagggggtttagaaaaaaattaaaacattttgctttggtggataacactagctaaaatattagcgtttgtttctaactgaagcaaaaacaattagtgtctattgtcatccgaaacaaaatataaagatatttgttaaaattttcaatttttttttcctcagtttctcttttagtgttgaagagttaaccgacgcttattgagctttttttagctttagttatcctttgaagcataaaataattggttatttattgtgtcggtcaactatttttatgtgacgcgttgagtgacacaaattagacattttgtagtagtatcatgatcaaaacaggtgactatgaaaactattaaaaccctcttcatacggaatgaggatttttcatttttactctcattctcaaattctctaaaacttctctgtcaaaaagccagagaaatttccagttcaagtccttgttaatctttcaaagcttgttcgaaatattttgctgatatactactcagattcacggccaaagattctccaagaagacagtgcattggattcaaggtgggtcctttgatttcccgtctatattcatatggatttttgaatgatcgcatgacttttaggtttttaggattgaaaatacatgaaaatgataggatagttttctggcaatataaattttttacctagaacacttaaaatactcgcatatgaatataga

SEQ ID NO: 298681 - DNA, 1637 bp, Cannabis indica
ccgtaaaaaaaattaatattaaaaaaaaaaattgttttaaagtgtaatttatttttgtttttatttctattatttagtttcatcaataaaatattttttatatataatatttaaatgatgtaaagaaaaatataaaaaaaattaatatatagtgtaatataaaattataatgtacaattaaaattttgataatatatttataaaaatagaataaatgagctcattttaattattattaatatttataaaggctctatttattacttaaaaataaaaaccggaaagatgcctcggttaagaagtctattttataatatattttccttctttcctaactactgttaccccaaaccaaaaaaaagaatttgtggttgaccatctaccaagttaaacaaattttaaaatcagatcaaataaaatctaataattggtggtatttctttttctttttttttttttaagggataaacaagaacattattatcgtgaccaagtctaccacacaaccacatacatacgttatctctttgcgtggcggcccaagtaggtgtacccactatagctaattagctatttccaagaaacctactttctttcttatttttttccttttctttttctaataataatttgcacatttagtcctttgatcattatattgtaacaatttggttgctagatttataattttcaccatttgctcccatgaaagatgcccaatgatcatcaaatggttgattgattcgaaatatatttttctatataaaatataattttgttgatttatatggattaaataagtgtcaatttagttaagaaaaaatgtgtaaatttaattggtttaggatttacatattttttttttggctcatagttactactctctatatacaggtttgagattcttaaattattattgatctcatgtttaatgaatcgattctttataattagagctgtattaggcatatttggctgtactattttttttattcatgttcaaataatggggttgttattatttaatttttatttgataattattgattggtgtaatttgtaaacctagtgatttattggctttttttttatttgataatcgggttggtaatttattggccttttagttgaaggtattgcaattttttttttttattttattttgtaaaccacataatttgctaattatattctttgagcaatttcataactttgtccaatttatccattagtagaaatttttatttttttctcaaaaatttattggtaagaagttaaaaaagtacatccgtcatcataatacaagaacataaattctaccaaccaattattcattgggtttttttttttttttaattaagtcaggagattatttaattattaaattcgttcaaactaatagaacgtacttcaaagaaataatcttccaacagaagcacacaacttatagagaaacaaaagtctcttgccaaacaatgagccaacttgtttgcagatgtttaacaaaacataactcaacaaatgataaagccaaaagtaaattcttaacatcttgaacaataagaccaaactgtgaagagataaaaatattattttggactgcttggacacacaccaaactatccatttactaacac

SEQ ID NO: 298682 - DNA, 5098 bp, Cannabis indica
actagtcaatgaccataggtagaaagaaaagtaaaagaaaagataatcaaaggctatattaatatacaactcaagcttttttatattttatgtaccattctttcaagattccaaaggattcggtcagtcaactactaataattaattacaagctcacaatttacaaactcaaaatttcactttatacaaatatatgctggcatctatgagtggacacttccacagccaaacttcgtactacgtgcagtcaccatggtactctagcatgtaccaatttgcacgtgtcttttcctttaatgtgtgtgcagataaaatcatctacttctagatttcctttaatgtgagtagagcttggatgtcaactgctaaaagcatcaacattattcttatatggatcttatgttttattccacactattcttatccttgtagttaaccatgtaaattgcaatcacagtaacaacagcaccagtaagttgcagtggtgagaaagtctcgccgaaatataaaaatctgtaacacaaacgagcaacaacaactagtcatggtttgtagtcaactgcattaatgtctttttgtttaagcaattatttgtatgcttgagcatgtgtatggctggaagaacttacccaaataccgaagcaaacattggagttagaaatgtaagggagctcagctttgtcaagctacctgaaatgtataggaacctataagtatattatctcaagatcaaaatggaatcctcatgtgaatgtgtctaatttggagatgcattggaaagatgataaaaatctacgtcaatggatatcagatatgtacttacaatataaagtgcttattttgaatttagttttatattactttcaaaatcctagaattagtttcctgactggtttagagtttttcatttgcctatctacaatgggtctagctataaacttctcaacatttctcttttctctacatcacttggacttagactgaactgtccacaacatcaaaaggagaagttagccaaaacaaaattcgcaacctctgcataccaccatagatttctagctataaattgtagaagtaaaactatatatgaaagtaaatatccttaagatttcttcgaatgttgttctctctcaacgttgctctctattctacatcacttggaattagagactgaacggtccatgacatcaaaaggacaagttagccgacccaaaatttggaacctcaatatacaaccatagaaaattgaagattgaaacaaaccttttgttgcactgtagaaaaatacaccatagctaatggcacttccaaaaatggaagtatacaaaagtgccaatacatcattcattgtgaactcccccagattcccacttacagcattgtcatgattcaaaatagagattacaagtaggggcaaaccacccaaaaccatgtgctgcaataaaataacatgtacaagtttctttagttcttgaactgaatgatgtttgtgacttttttgtgttgaatgcaaccttttttttttttataattatgaacttcttgtttactgattaaaataggaataagttaagctttttcagttatcagtatatgttcaatttaattcatttctatcatattccaagttaattgcattacagaatttttttttaaaaaagcataatgagctcaaaaatttgaaggttaagtttaaattcaggtagttagatcaatacgagagtgagttgatacaacctacccatccagttgccataataggatcggagtacttggaaacccagcggaccatgactgtgccaactgccatgctttgagctgcaagaagcatccaccactctccacttccccacaatgaaaagttactttcatcaaaagcaagtgcaggtacctgtatacaaacaatgtagcatcacaaaatagccaagggaaatcaacaagccttttaaaaaagcaggaagaccttatttagcttacatgttaggtaatcagatgattgatatgagatatttacatcactatttacaaaataaaaggaagtacaacttcagcgttatataaaattcatacccttcttttgacactgtatcctaccaaacatggagcagaaccaatatataccgtctttctatgagcacccaaataaaaacgtacattttcatctattctcaatgtaaataactatactaacgcctcagtgcatataccactccacaaataataaataaataagaaagcagtacataaagctcattccatattcagctcctgatactacgctacctaacacctcaggttgaattattcatgcgcaaggcatgtctaaatcatcagaaagttcattactttttattgtcccattacaattactcaataaatcacgctccctagcattcttgtctttgaaaagctaagaaaaaaacgacaagaattagcctgcatgtatgtcaatgacattcaccaagttaatatatcagttaattgtttgccttcactgacaattatttctacaattggaatttgtttacgttgtgtaacacatacaaacattaatatataactaagtcactttccagtactgcttaaactgaaatatcaattcataaacaaaccaaatacttgaaaagaagggtacagatacaatgcaacgctttcagtaacatacacagcaattataaaagtttccttgtaattatttatttattttgaacaatatcctatgtccaacgaataactttatgccacgttattcaaaacatttaaatagaattaataaagttagaaaactattttaataattacttatgctaaatagtttgtcatatattcaacaccttttgttcagatttaattgtagccactgtttaaaaaaaaaaacaataataataataattctatgccactgcaaaagtatctaaacataagtccaataaaccaagaactcctaagacaccagatggtcaaaggcagaatcagagagagagagagagagagagaaatcaatgaaaaaagaagttatttcaaagctgagaaaaaacagaaactataacaacaaagcgcagtgatagccccatccaaaaccaaccctaaatcaaccggaaatgctgcccgcaaaagaagaaagaaggaataaatacacggccaataaaataaaattaaaatagagttgaacattatgacaaaatagtatttttgctgtccagtaaacattatggctaaaattaacctatttacaggtcataggagaccacatttaagtaaaattataacttgcaagcctataagctatacgtacaactttttcctatcaatcactgactgagttacaaatatgagatcaagccacttaccctaagcagccgaatttttccccacaagttagatgtgcttttgaaacacagataatatgttaaatcatctattataatccaaaatgaaatatcgccattaaaatcagaaactaaatgatggaaaggagaaagtaaagtaaagggtgttgaaacaatttaactaattaaacccatgttttacacaagacgaagcagggattaaaggagctttaactgataaatggaaaaaggttttacttacctccagaagtaaaagccctacaacaccgagtccaagccctacagctccaacaagaccaatggattccccaaacagcaaggctgcaagtatagcaactgttaagggctgcgagtcaattatcacctgcagcaatgtataattttttattcaatcaaaacacttgttagtggaatgacccaatttactcccacatcgatcgataggttcaagagcagtgcttgtaaaacttacactgcccaaaccagctgaagtcctctgcaagccctgagcaagaaaaccctgaaaacaagtggcgtcgacgaggccgaagacggcaatggagaaccaagcggagagtccggaggggaaaggtcggcctcgagaggcggcgaaagctatgaggaggaagccagcagggatgaggcggaaggaagagacgaagaaaggacctgctttaggaagaacctctttcatggccaccatagccgtaccccagaagaagaagggagacaccaacaccgccaattcccatgctgcttctagcgtggattgattttggatttgcgtttgtgtctgtgcttggtccgactccacgaagcactcaacgtcgaggcctgttcccacgcagtcgagggattcagtgtcttcttggatgtctgtgtctgtaccggaagtggtgcagttgacaatggcgattgggtgtggccgtaaacgacgggctttaggtatagcaaccccatagacgagggataacgaagtaccagtatgtgcagaagaaaattggggtttggccaaggcatattttgatctgccgatggcgatggggcatggaattagaggcgtcgagcacgagcaccagctccccgccattgttggttcgaataactgacactggtaaaagaaaaacaaacgataatttgagaatgttgcatagcatgaaacgtttgggccacataattatctttagttccaaatatcgaaaaacatattaaatttaagaggatagcaattagcaaatcgctataaatgtattgttattttttataatattttgctaaaatttaattttaatagcaatattaaagtattgacagtaaaaattcttcaatgaaatgacaagaacatctattgcagaagaatactcaaagtaaaaatcttacattataataataagatatctagtttaaaatttaataagacaaaatatagtatttaaagtaaacaatttaacatatataaaataggaataattacataagaaacaattttttttgtaaaatatttatatttttacgttcaaagaatgttttttacatatttatagttttccaaaaaataacacgaaaacaacataaaatcaacaagaaaacaacataaaagtaacatgaaaataacatcaaaataacaacaaaataacaacaaaaaataacatacatataacaaaaaattaacaacaaatgaacaaaatttcaatataaaaaaccttattttatgtaaataaaaacaaaaaaaaatcgtaaaaatgttt

SEQ ID NO: 298683 - DNA, 4823 bp, Cannabis indica
tttagtacatgtaaaagttcggaaggcaaaaatgtgacgaacaaacaaatgaagagaacaaagaaattttattcaataataatccatcatatcaaatggaacaataatgtgttcattctctctttgtttcaatgttgtgttattatacatgtgaagatgggcatttcacaactttagccaaacaattgtctttaggcctagaatgaggcaagtacatcactggacttcctgggttaatccttttcagcctgtgaaaaacacattacaattctcagttaagattcataacatttccaataagtgaggagaaaatgtttggattattataactcacctataattgaggagataatagtgaagaaaaatagaaatttccatcttagctaaatcatttcctggacacaatctgcttccagctccaaagggaaggaatgatcctgcttttggtgtataaccctatgcaataaacaacgtgaaaatagttatatatgtatgtatatgagacaatagataatactaagttagtataacacatgctgcttttaccttccatcttccaggattgaactcctttggatttggatatatttcaggatctgaatgaacacttctaaaccagaccaagactttccaacctttggggatggtgtaacctgtaaaaatggaatatcactttgtattaatattaaaaagtaaccttaggagaaacccatgtctttccgtacatgaatcatgttatgaagctaaacattactgttgtggaaactagaacaatgaccaaccgcttatgttcacatcacgtttggcctcgcggaaaacagtgagcgagaatgttatcaatcttagtgtttcatcgatcacctacaacagaaaaatgtcaattgagggaggctgcaatggtcagattttagtgttatgataatcaccgatggcttacatcagaaagatactccattcctcgaatttctttaagagtcaatcctttctgtgttgatggccttttctttacaatctcttcttgctcttcctgcaattgtcagattaagcaagccattaatcatatatatatcatatataaatataaaatacaatgaaacacagctaagctattgtactaaaggccaacattttaatctattgtacacttgcttttcggtgatcatttacacaaaatttgatgagtacaaaagtcagagccaaaaacagggcaataccttggccttttctagaatttcggggtgtttttcaaggaaaacaatagtccacataatcatatgaccagaagattcatggcctgcattcaagtacattaataaaatatctatgacctcctcatcactcaattttctaccattttcatcttcaacatctagcaaagaatccatcatatctttcttctttgttgtggctatgctggccttcttattagctcttctttcatctacaatagattgaaacacagctacaagttttttcctggactggaaaattaagattatcatacaataatgtaagttgtttacaaaaaaatagctttgtgttttttatttatttatttaatgttaccttgagagctctataataagcaaatccaggaatgttaatggccatggctctaacaccatggttaagaattgtgtattccctctccaaagaatccatcacaggctcactctccgagcttaaaaaaatgtacataataatccgaaaagttagccttctaatttcagtcaagaactcaatttgtcccatgttagaccatttctccaatgaagccacaacattatcttgtatgtattcaatgtacattgataatgcttcatgaccattcactggtgcagctgttaacttcctcaaccacttgtgttcttcagaagaaatcccagtgaaagatttctttccaatgagttccacggttgcacgaggccaacctggcttgaatgcatcatcatctgtcagcactcgcttacaagtttcaggcgtcgtcacaatcacactaggattaccaaacatgaaggccttgtagattcctgtacggccaaacctgaaaatacaaacacaaatgttaacacttgtggtgcatacatcatcatagatcatagaatagaaacttcttctagcccattgtgtttgtgattatgttaacagataagattattgagtttgagatttccaaattcattaatcccaatgttgctaaaagtatgtacatacaaaaaacatcaaaatcatatctgttagatatagtgtctgtgtccataacaataataattcacacacagtagtttagtttcaaccattcatttcttaataatatttccttcctttctaatcattttgcagtcactagatgcttttgtacagctcagcaacttatatagcacaagtagcctgtatctcatcaatagatttctaatccacagaactgatctgatacagccaaatctatatgaatattatttatattatatctgtaggcatgtgtacaagaaataagatgatatatatattttattattctggtcagttgacatgttaggtatcaatttcagaaccacatattagtaatttagtaataatccaatggtataagagtcaccttatattattcatttaacagtgttaaagtcaaagacacagtgtttcatttgaaatttagtaaagcagtagtacacttggattttggttgatatcactcttctttttttttcttttatgtccccaaataacctttgaccaaaatggtcaaagggtaacagaatgtaaatatataaatacatttacattttatttataacatggtgagccagacaagatattatcaattatagcttctcaactgttgggaaagggcactgccttttgcaatttaaaaacaaacagaatcgattccattatgtatagtgtttattacctgttccccagtcctacagatgtcaaaaatttgaagcttagaacaaagcaaaaccaaataacaaaaatatattcgtatatattaaaaaggaaagaaagaaaatataaagtcacatatcatcaaaaaaacttttttatttattaactgaactatatttcttataggttctagttatataatatagatatggtattaaacatatcatatagtacattttctgtgtaatactacactgaataagaaagacctgaccaaaaatcatacagtgatggtccactagagaagtatggggtgcccctggtgggaccaaagtcccagatgcttacaatgacatccagagtaaaagaatcaaaaccaatttggaatggacggccgaaacaaacaattttctccacttttctatcttatttttagcccaaaataaataaagtgaaaaaaaggggtggctaaatgaaatatttctttatccttttgatgtgtgtatgtggcactaaactagtatacattattatcagaatgtcattttctccaagtgcatataagtaaaacaataaaaaaataaaactatgcatatgactagtagtttagtttttgggtatgaaaacaaaaaaaacacttcgataaaccaccacaaatatgattattatatgttggtataataaagttggattatgtggcagttcaaatgataataataaataataataaaagaaaaaaccaaactcaaagctctataattcattggttaatgtatgaatgaaataatgccttgttgattccgtactcactaaggtacccgagacacacagacacagccacatttacacgcacacatatacacaaacagccaccattactggctaaagcttggaggcacactcatataattccaacctccttattctctccctcaaaatcatctaattgaaagagagagatagagagagagagagagagagagatgaaagagaagttattattattattacctggtaataaaggaagacatgaaagagtcaggatcagaggacttgaaggctgtgagaaaagcccacatgttgccaaggaaaggccaacccaagtcacctggaggcaaagagtattgcttatcacctaactttgcttcataaacccaccaattcacattcttcagaacccatttcaacaccacaccacacagcaaacaccacagcatcaacacaaccaactccattgctacttcttcttcttcttcttcttcttctgcaaccaagtaaataaaatataacccaataatttaacatatatatttatatttatgactgaatggttataagaaaaaaataataataattcaaactactccaactccacctacccccactttctgagtcagtttcacaaataagaaaaactaaagatggtctgtatttttttttattgttttgtgtatatcacactcagcagtctacttccatgtccctatacataaaatcttattaggagagagaagagggatagtaccccataaaaagttgaaagagataatgaaaatgagaaaggagagagacaagagggaggggagtgatttttttcaaactatgaactgtgaagtagaaaatgaaatcaaaccgaagaaaaagcagagcaaaatttgtggtatttatagggaggaaaaggttggttggtatgtgtgtagtgtgtgtgtgagagagagagaaaaagcctagcctataaaaatacagagagaggacagagaaagaaaaaggcctatatacatagatgtatagatatagccggccttacatgtatgtgattctgtcgttttgtgctcctatatatatatcaaaaagagtctaaaacgaaagcaaccgcaacagcaacagcaacatcatcaacttcttcatcatcttcatcttcttcttcttct

SEQ ID NO: 298684 - DNA, 5642 bp, Cannabis indica
ttagcattagggcgttacaccagttgtcacacctttggcttaacattttaaactctcaaaggaacaagcaccttagactaaaattgagagaaatcatatggattgcataccatatgctagatgtgttggctgtctaatgtatgccatggcatgcacaaggcaagatttagcctatgccatgaacataactagtagttatattactgatcctggaaacaagcgctaggatgcagtcaaatgggtaatgggtaatgaggtatgtgaaagggtccttaaacattgtctagtctataaaactagaaggaaagaaggctgtgaagttgagggttttgtagactcagactgctggctatattaactcaagaaggttcctcacaggttatattttcacaactctaagtggatgtataagctgaaaatcaaatctcccaaaagtggtagcactatcatctaaagaggctgagtatatggctgctataggggcaaaaaagaagctatttggttgaaaggtgtcaccaagaaactagggttcaaatctgaagatatgacaatacactgtgataataaaagtgctttgcacttaatgaagaacctaatactccatgaaaggtcaaagcatatttacataaagttgcacttcattagagacatcattgtcaagaaggagattcaagtaaagaaggtgtgcactgatcacaatccagctgatatttttaccaaatgtattactcaagccaaattcagacactgtctggatttggtaaacatcagtgacattggatgaatatcacatccaactgcagaaggttcaacaactctctctagctatgcgatcgagacctagtgtctaggtggatttgttagagtatggtctagtcactaagtcttgtacacatggcactctcttatttgtttcttaagtcttagttagttaaggtagttagttctataattagaaaactgatcattcaattgtataactaacattcgttcaaacttttgattttcttggagagttattcttttagcttagagttagatttatggtagcttactacttggagctagggaggtaattagaaggattgttttgatcaatctcttcttagtgtgtgaggaatcattgtaaagagttgtactccattgctaagtggtgctaccattgtccatgtaacctaattctcaagctaaattgaatcaaggagttccatgaaaggctgaactatttttctgcaacttgttcttattcttctcggtttttcttgaatttttagtttatttttcaactgtatttttgtttttctaaatgattgttcatgattgatattttatgttttttgctttttcattgtgtgattatataatcacaacaataagtacttaatatttgtaaaactcttcgagccatcacctccacacaaacactgtgataaccatggcccccaccaatcatgataaaatgataaataataatctaatatcttaagagcataccactaacattacacactctaaataattgcttgtgcaaaaagtccataatatttccatcaaactacgtacacagaatatacaataactactatatataattatattcaaaagaaattgagtacatacaaaacaaaaataataataaagaaagaaagaaagaagaagataagtttatataagtcactggtaattataatattattcgacaaaaaaaaagactttataatataactatttaactagaacttattattagtgtggtagctagtgtaacgaattttatatttgttgaagaagtttcctgaataatttcaagattttcagacaatataataaatgattattgactagataattcaccaatgattttttaagtggcactaatattgtatatatattatgatgttatttataattttgtatggggaactaggtcataatattatagggttaagttggtcaataatatataggaaccttaatggtaacttgatcatatacagtcaattatatatattcatgaactatatatgagcacttattaatttgtataattgattgtgttaattattataaacttgaaaagaatccattatgaaattatcaacaacaaataagtttccactcacttaattattgttataaaaatattacaaatataacctaaacaatcgagaagttcagcacttactctagtaacacaattaatttccaatcaattgtttcttttatttcattattttcaatttagttaattttagggtcctctgttgatgctaaactcaagtattgttcatcacattgacattgaaatctttaattcattcatgcatattttgttattattatttgagagaaaaaaaaaatacaaatagcacgaaatggccagaaagaattattatatatatgttttttttagggaattttcactgcaccatatttggtgcgtactgtataactgcactttcactattcaatttttttttatatatttaatatatttaaacagatattattattattgggtaattacgatgttttggtagattttttatcggttgttaaattttttaagttaatcttttttgtacgttatatattaattatttaagttatttttaaattttaaaaaaattcgaatagtttgcaatgccgaaaatgttaatgttcaaatatttattgctagtgtaattattttttctaatatgtgtgatataatattgtttaaattttattttaaacattataaactattaaaaagtttataaaaatttataagtaatcttaaatatactatatacacgatcattgtggggtcaaccaaaacatcttttttgatatgcaagtggtcataaataattataaccgatacaatcaataaattatatagtatattatatttttttttgtgtaacttttggtcttgtagttagaatgaaagagtctataccagtgcaatactaaatttgatatttaaggttggagagatgcccttacatgtaaattatatttaattaattagttaaatatgtcataatgactcacaaatatatcatgtaagactgtaaatgtgttaacattaattgttttaaacaagttaaagagttgataaattgacctatattgaacatagtcctttatataatttggttaactaaataagtcggtcagattaacctgtttataaattaattgagtttatgtttaaatttttgatacaattaataaatggatcaaatttaaattgacatttacttgtaaactttaggtctcatgagacaaaaaaataggtacaattcatgaacacgaattgtcactattagtataatttaacaattcctcctaaatatttttaatttaaataaaaatatataagatttaatattaacatgatgaacattctttaaaatttcttataacaaagtgtatgttctttttttcatcaaaatatatagattaaatataaaatgtaacagaaagtaattaagtgtatatttttgtaacataaaaagtagagttatttgcattttgtaactttcatattattactaattaagtgtctaaaaagaagttatagaacttaatcctttgaaattcaaagctataataaaaatataaatgttggggatttattttttatttataatgtgtataagtgatataaaattaagtgagaatgatttagaatgctttggggagttatttacgaaagctaaaaaattcggtaactagtaactagctactgattttttttcagctttaacgtttttttgacaatgggaatattttttaacagcttccataacctccaaatcagtaatttgatcctatttacatttaattaagagatggtaacagacatgaggtgtatagggtgttgaattttaaagtgtgtgatcataaatactataaataagtgcctaatgcgttcatatgaaaataatgaagttttctatcaacaaacacttgctagaaaacacaaggtttgatcattctcaaagctatttttacgagaattctcttagtgcttagagataagggacataagcttttgcacaaaagtgttatacattgttcaagtagttatggtgatccccactaagctacactcaagattgtgagtaagtgtttctattcatcttcttcttcttcatcaccatttatatatatgtgtgtgttatattacatatggtgtaatctctttcttttaccttttttatatatatatatattgaaatttcgtattttaatattacaaatttattatttaattaatttctcaattaaatacagaataataaaattggtgttaaaatagttattctatagctacagaaaacaattctgtaacttcaaaacaaaccaaaaaataaacagtgtaaaaacgtaaaaatgcacaagatttgtgtatgtggtttcaacaatccttgttgattgttactagtctacgtgtcaccacgcccaaagataagattcattagatagatctcaaaaatacaaattaattgatttatgcataaataaactccctcttattatatgctgcaagcttgatgtattctaccttctaatcgaatcttgttgaaactttaagtgctcgaactctctttgatcttcttgaagagtgcttgcttcctcccgaagcaagacttaaaaagctatctcccaaaagcttgttaaacattctcccaaaggtagcactgttgttcttcttcttttgtagacttgaatacaaactcaagagaatagaaaatatataaacacaaagagagatgaataacctcttctctacaaaacaaagactctatttgctaaagatatgaatacaattcaaagggtatgaaagagatacactttattgataacttatctcatacacggtctgaacaagaccacaatccacttgaaaattttcttaaaataattcttcaatcagcacaatgatgaacagtaagtgtgactttcttattatagaaaaggaaagtcattcttcgttttactcacaaagaatcagatatacatatctcaatagataaaattgtttgagtcatcaaacttatcatttatgtcttacttttcacaaataaaaaaacttatcaataataaaaaataaaaattaatggaaaataaactaaacaactcaaccgaaattaaataattaaataataaaatattttttgttaattaaacgatgttaaaaatagaatttacatatataatatttatagtgtagtatatgttgttgtaacatttatttaagagactattttacgaatagacaaaaaaaattacaaaaatacggttttacagaattttaaatattttattgatttttttattttatttatagaaaatacagtctttttatgttgtacgcttgttaatttttggtgaaattattatctatatgtatattattgtttgttgttctgataatatttagtaagatattattattatgtaactttaatgtagttttcttattgttttcgtgttgtttcaaataaaaaactgtaaaaaatgtaaaaaaaaaaaaaaaaaatactttaaacgtaaaaaatataatttttttacaaaaaaataagtaccttatgtaattatctctttatttaatcactttgttgccccttacattttatattataata

SEQ ID NO: 298685 - DNA, 3525 bp, Cannabis indica
cggtttgaacagttttttcgattttccgaattttatgctcacccctatttcaatgtctaaaacatttttccaatatttataaaacattatttaagtgaggagagtgataatgccatattttggtgggaagcatactaaacaatggtttaaagaataaagctcattctttcacaatgaaaccatttcaatgttgccaaaaatctcatctttatcaaaatatacacaaaaaaagacatttttaatgtttgttcgataactcacaaaccttaaatagtggaaatatcaaacattttgggagaaagagaagagagtaagcaaagtgtgtttcatgggtagtcttagccttagtgttaggcctatgttgttatggctaatgataatgttagtgtgtgggagtgagagaggtttgtgtataagaaacccagatcggatctctcaaatcaaaatctcccaacaatacccatctcccaattcccatttcaaaaccgctgtttttgctcttggtagtttttggagatcggaagccatttttggctgcctgaatggggtcacacgcaccaccgcaggttactccggtggatcaaagatcaaccctgagtatcgaagcttggccgaccatgccgaatctgttcaggttcttatctatctatttatcgatcacatctctttttttggttatgaatttaagggttttttattagagattgtttcttgattttcgtgattttgatttattgggggaaaaaagattcgattttgaaaggaagagttgccaaattaacaacatgaaaatgttaaattagcaaaataatcagaatttcaatttcagttatattcatgctatattttcatctgggtatcactataattttgatttttgttattacaaagattgaatttttagtgggagttcatactgctattttgttcatttatattgtttctgataatttagtaatctatcttacatggttgagttgtgtctctaatgactgcaataccattccattacttccttatgactattattaggaatgtaattagtttagtattaggattagcactctagaaagctatataaattttagggtaaatataatactattttgaactctgtgttttgcaaaattgattctgttttgtttaatgacaaattggactctctattttttaaaatattactaaatagtaccttgaactgattttttttattaaaataaaacttaataataactcgatgtaaatgtgttatgacaaaactggttatattttttgcatttgttcgtgctagaaattattttcaagttggttatataaaaaaaattattgagttcagagtttttttttttcaagcaatttagagtcctatttgtactattctgaaaaatataggtcctattttactatttaacaaaatagtgagtgcaatcgttaaattttgcaaaatacaaaattcaaaatggtattatttaggaagttattttgattcattttgaatttatgaactgttgatgtgttttaagaggtaaaatcttcgaggtgaagagtgatcaaaggtgaaagtgaatggtatctcaatcatattgatagaatgaacaaacttttgtattgttggtgtcatttcatattgcttgattcaatcatattgatttggataaagaatatgtatgttttgaaacttgagtttttctttatatagttttatggatcttgcaggttgagtatgatcctaagttgattacattcagacaacttttggaagttttttggtctagccatgattctaggcaagcatttggacaaggtcctgatgtgggtaatcaatacaggtaaggacaatccatgactatgaatgaatgagaagagggtgtttttatttttcgattttgttttgtaaatcttatgattttgtttgtaattaaggtcaattattttcacaaatggaactgaagagtccagattggctgctctgagcaaagagaaagagcaagctagatcgaaagttcatatagttttgacacaaattcaacctcttgggacattttatcctgcagagcccgaacatcaggtatgttattgttgatgatgatggtgttttgctgaacttgatttgttatcgaattcggttaggtgtcattggaattctgtctgttttaacatgagatagtttgtcacttaggagaatgactgactgaatcgttcggttaaaatactaaacttgcagaagtttgaactgaagcgaaatccgtttcttctccaactaattgggaacttgcctgaagaggagcttgaagtttccaatttggcaactaaaatgaatggttatgcagcagaactctgccctttaaacattcagaaacagatagacgccaagatcggtgacattgtcaagaaaggttggcctatgttgagagaaatatagcttatcatttccttatagcttcaaaatcaaaagggtttatcaaacttctgcaattgttgaaccacttgattggcttgagaaccacaagctcacacctttagaaactttagtatctaccgattactttgaacagagaattgttgtaatacaaaatttagagatccatattcaatttatgtatattttttcaggggtgaaaggatatcttgaggaacacagataaagggcaggcaagaaaaatcattagcccttttcaacggctagccaaggaaaagaggattaaatgtcatgtgtgtatatagagctatatatgcatgaatggtttcattatagtgattctaaaatgcattgttaaaattataaatttatgtacatctttttgacattggcctgagtactcacactagtgaagtttgaacttccttatctcctttttctctgtactatgagtgtggtacttgagtacttgaaagctactgataatagtgtgaaaatgcatctaatctttacttgaacttgttgatttattcaatcagtaagaaccaattaagaaatcacatacatgagatgtagatgtatcaatgtcaaataacaaaaacagatatgtaagttcaatatttattatgtcttggctatatttttctcaatctcctgtcaaaagatatatgcaatagatttaatacaaactgaatgagaatataacaactaagcaaaagaaaattaacccatctactcttaacttatcaagtcatctaatataaaataaacagaaacatgaagcaaaatagaataaaagagaagggtaaatattctctttttctcttctcacattacaattactgaaaagctgtggaaggttgtgtatacttgttcatctatacagttgaaaaagaactcaaactttcaacaattcaaacttatgcatcaactaggaaatcaagaatcctttatcaactccaatttagttctcaaatcaataattgaattaacaattttattttttaatataactaattttaagataatttctaatacgaacagatgcagattatgtaaccaattttgtcacaacatctctagatcagattaatattaagttgtat

SEQ ID NO: 298686 - DNA, 3779 bp, Cannabis indica
aaaataattccaacataaactgagtgtggaaactctcctcagtgggaagcttgaggtgtagaagtagtagttctagaagtcgtccgtgtacttcgtggacctagttggacagtcgacactcttggaatggggctccaacttgtagaaacctactttttccttgtggcctctcatatgttgggatttgatcttgtagaggtataagatctcttccggcatcggtgtaggtttattatgttgagcacagagaatataccaccccgaaaataggcaatacacctggggtataaactggaaaggtgctactccgacaacaatgcagaagtcagcaaagtaacacctcaggggcagatgcacacccatctcgatgtgagcctaactccaaatgtcaaagcctccttctgcgtacttactaaacatctccccttgaacaaagagtctattccagaatagtcctggaacactttgaaacccccattgggtttcatacttcctcagattattgtaaatcttgactttattaacatgctagtccatctcccatggattatcattcaagacaagctttaaagaactttctcactccaagatttcctcttccaagttagccttgtcttgatggaccctcttaagcatgatttctgtacaaaagaagagaatctaagcagttagccaccctaactacctagtatagaaagggagcagggaagtcttaccccataaattgcttggagaggtttcaaataaactaactatccagaaacaaaaacttttaggattcattcattccagatagaaagtcaggaataatagagaggaaaagtagaacaaagatcaatgaaaaaccaaaaaccaaaaaccaaaaggattttgggcgtgagaaattttgccagcacatctgctgcaaaacgatcgaatccaagaatttctaatagggaattctaaaaacattatggctcatggtgcctgaatctacttacgatggtaatcatacagaaaaaccgtaatctcatcttagaacagaatatgcaagtataacatatgacgaaaaactcagaaaatacaatctagagacgaagaagcaacatacctgatatcaaaagtggagatatcaagctaatcgatgctgggttaggttgaggaagtcaatcacacatttcacgaaaacgagatgctgggagatcaacaagtcaacttctacgttaaaatccaggtttgcgctttcttttggcgtaaaactcactatcacttgggttttacaatgtggaaactcttgtactcgaatcctcaatagaaggtgaatgcaaaattgacaacgtattctagattgaagaagaaaacttggctctaagtttagttcttagttttgaagggtgaagagaaagcttcaagctttgaagggttaaaaatttgaaaattagaaaaaagtggtaactggaagttgtaaagggtatttatactcaaaaagtaatccacgtgaaaaaaggtgaatggtccaagatccaacctccagaaacacaagcttcatccaaaggttggagagttcaaagatccacgcacatcttcacaattaatgctccccaaaatcgagacaccaatcaatgatgaagatgccaatttttaatttttgcaccaaattagtgaataactatcaaaataagtcatttctagaaagcaactcctcaatggtcacatccttccaccaccatgcgattgacacgtggatataccacaatcaaatatggaagtcaacttctgtgatcgattaatacctgaaaagtcatgatattatccctcatcctctacatgttcgcactgaaggagtgacacaagcttctaccatatgtagcattttggaagcttggggtaaatattatccacatttccggcagtagacatgtggaatccaggtcagcatccaaggcccatcagtgggtcccccaaagaagataaagtagggcaagcccacttggacaggtccttccaagaacgcacttcagctccctgattgtagaaccttctaccattaatagctcatgctcgaaagtaggtctagtaccaagaggccggaaggttaagacatcgtgttctcaaaagatgggcccaatttccctttttattcctatgcccaaataaggaaataatggtttgccaaatcttgacaaaggatcgtatcaagctaaatggggaaacttcctaaaatagataccaagcaattaattcatagttaattgccataatcatagtacatggtgttgactaaatccaaccaaatctgatctgcctagtcaacatatcctctccttcatgggctggacttcatgaggtagcccaaatgtgttattcattgtaaactccccaatagagggaaaagggaaactaaatgtaattctcaaactactataaatactgagtggatcctatggactaatgggggaattctcttgcaatacttgctcaagataacttgagaacttacattaatggtattcccaaaggctttttcactaaacaattacctaataacatcgactcgtggactaaggctagttaacgctccaatcacgtaaaaactgtttgtgtctttcttactttttctcttttaattgtttatttcttcagttctaattatttataattcgtctttcaaaaatctcgataaacaagttataagacaaatatctataaccaaattcattttatattatttatttagttaattaaataagatttaataaagaatttaaaataaataattattacgtttatttaacatatagatcaaattctacatagtttttgaaatagaagaatttttacgtaatttttctaaaagcctaataaaattttaccgataaacctttctctacatcgccaaagaaatagttcttgctcatgtgttgagatttaattaagaactctatatacactattatcttactagcccacacagtccttttgtgtggtgaaggtctggaaagttaaggtgtgagttttgtcatcaccattctaaggatacaacatatgaaaagaatcgaggataccctaataggctttgagaggtaaatattcttttcatctatttacttttaatttaatatatatatacatatggtgatcttgggcatatgatacaattataatcagtaataaccctttcgttgggtacgtgatttagtactataaaacaaacaggtcttgatgtgggggaacccgtggagacagttgtttacttagattaggatccgttaccattggacccttctgatcggtgggaacttgcacactaaaattcgtcaccatttgatcagttaatttagtggattgagatcttcttgtcaaaaccatcattcgaggatcaaagcttctcacagattgtgttcgattgttctcaataaaagtatcaaaatatttacctcacttttggcaaacaacattgagtctttaaagagatgagtttttgaataagaataataactaaataatatatatgagcaaataagaacacaaggaattttatagaggttcaacctcgtgattatggtaataggctactcctctttttgttgtattactttcaagattatcaagatcacaaagagctgacaagttgagtttctcaacaatcttgatgaaagcttacaagtattttgacagcgtaagtgctctctaaaaaatatgaacttggatctctaaacaatggaaatactccactattaataggaaagatataatgaatattgttacttaaaataataagaaataaataaaaaattaaa

SEQ ID NO: 298687 - DNA, 1461 bp, Cannabis indica
gtataagagcattcattctgtgagtgtaagggtccaatggaggcttaaagcgaggacgttacattatcattcatattaccattaccattctcattacattacatcaaagcaaacattacctaataacaatatgtcaccttctatagtatttggcatcataagataccctttaatattttttaactaattataggactctgccttatagtcatgctagacatctaatcatggttttggtcctaagaagatgtgtgttccgagtacaatgtcttgtttcttttacccaatattatttggatacatgtctttagtttgtgtatagatttatgtaagaaaaatgctaaaaagtatcgtgatgttaattaagtgagttattacatatggaagttatgaaattaataggataaatttcaatctgttagcaattgctacaatattcacttatatcatttgaatgggtgttgggacgttagagaaaggtttggctcggagagttacaaaactcaatgttgagttttctagaaacagatgttttattgttgataacatgttttatgattgttctcctacgactggagcaagttttgaaataacatttataaacgtatatgaatttattgagtatgtttctagttttcatgtccaacatttttgtccaaataaacactaactaaaatgttggtaacagccatgtagtgaaatgattttgatttttatatgttatatatcctcaaaatactataaatagaggtctttgaaatcactttggtaacaataagtttctatcaagagagcacattgctagaaacactttagacttgataaatttaaaaagttattttcatttttttttctaaaggcttgtggtaggagaaatattttaataaaaatcaatcaggggacaccactagtactcaatagtaatatttcttgtgtaactatggaatggagtgagttgttccatttctatactcgttgtgattaataatagttttcaaaacaattaatgtgattaataaattagattatgagtcttggaaagactaacttgtttacttctttctccatggtttttctttgtgttctaattttttcttactcttgggttatgccttttgattaatttttaagggaaaagaaacaaagaaatatgtttattgagtaaagctaatgtgttgactcactgttcaaaccaagtcatgtaaagtattgaggtaaagtaacatgtggcattaattagagtcaagttgtagttaattatatatagccatgtgagtaaaattttatgtggtgagtttggtgtttaaatcctattggatatgtgtgacagtcagtagtcccgtgatccgtaaggggaaacactgggtaagctgtgcaatcccacaccgcctggggaaggtcaagtgcgatgattctgagactgtgtaggtaggggactacacagttgaagagagcttaaat

SEQ ID NO: 298688 - DNA, 3217 bp, Cannabis indica
agaaaccccatattagcaactagcgcagcaaccactctagaaacccaaaattgtaaatttgaaaaaaaaaaatgttaaaaaaacacagtatatggggtaatttcccataatttttttgctttaatatttaaaatatttatttttattttataggtatattttttttagaatatgacaagaaaaaaaataaaaaattagtacgaataaaatatatatattttatataaaataaaaaatttaaaatgaagtctatttataattttatgggataaaaaaaaattctcatttattaaatatttttatttctattataattattaaatttcgatatatattgagtatttttttcaattatataattaaggattaaaaatgatgcaacttttacttattttaaaaaatagtgcattgttattacacactatgatgtccaatattattataaggtgacaccttatgaatgattagtagttctctataattattattactataaaataagtgatattggcggtaaaattacccgaatttatattttttaacttaaccataaaaattgatttttcgggggcaaaactacctaaactctcattacgttttactttttacccctctgtctaaaaatctcagctaattgtcatgtggacaattgaagtgtatactaatgtatacgtgacacatttttagtagtccacataatattaattattaaaatattataaaaattattcaaaaatataaaaataatttaaaaccctagagttcttggctgaggtaggttttgttccgaccacctcttggtcggcgttaatgacgataactccatcgccagaggaggccttggggtcaatcttctgcgccttgctcgaactttccctgcctgaagttccgcccaacttcctcttgaaggttgattttagcctaatcgacatttctgcacaaacaagagaaaaaagttaaaattgacggccaagttaataaaaacatgagttatcaataataggcctactctaaatgtttggaggagcatcctcccggacaagaattgaagagacgtcatcatcaaaagatttctcttcaacttcctcaacaaatggctttccccttcccctcgataggatgcacgactttgacgagtaggtacctcttcagtgtccatgattgaatgggttcctcgataggcgaaggtccgaccctattggccttggtcttcttcttcttcttcttccgggcagcagatggatttgtcagctcataaggcttctcagagaacgaactctaaggcgtcggataaagtccctgagacgcaacgtaaaagtaggccatatgtacatcttggcccgttgaaaagtaatggagttggttggcatctttgtgaccatgtaatagtctcaaaggaagctaccaatctttttgacacacttctcattagtatcgatcagccacgagcattcatacttcgagaagtagaagtaccccgagcagtcactgtgcaggggagattttaatttgaaaaaccatttaatatcatgcgcagaaggttcacccccaccttactgtgcatataatacaaacatggtggccaggtatttgattcccttcggcgtgaattgcgtcggggaaattttgtagtaattcaccatcttcacaaagtatgagtgaagtggtaggagggaaccatgattggcatgtgggtcgtaccatgcacacatcccctcacctgggttgtaggaaagttgcccttgaaaggaagaaaaacatgtacgtccctaagaagaccatccttgtctaaatttcagagatgcctctcagtgagcttggacggtggaaaaatccacattggacccttaggctcttggtgttcaaacgactaagcctcatcaaattcttggtccgtataatcaacacccacgactaagaggcgtccacatgaatcatacagtttgtcatcctccgaccaccaaccaacccctacaaaaggcataagggcatacctatgattgtcaacctggtcttcgatctcttggacttcaggatcctctgtggggagatttccctcactcttagagtctggctcgtcctatttgtgatgcatagccattatttgaatgaactctttgtcgtacgagcctatcttacgaacagtttgctttgtgcgagccacgtttcttgaatggaatgaataactctctaaaggattatctgtgacgacaactgcgatctctgcctcaacctttgggtggaaagaaggttcagggtccacttttggcaaagtgtttggagtgtttggtcaaacaatgatgtccagttggacgacaagtatttcctccagccaaaattgtattccctaataaacatgtcatacacgtctccaacaatctagtctggataggagaaattttggacggttgggaaaaaaggttttaattcttcactcgagacgtcccactcctcaaagctagaggaggagttatcagcagagggcgaaggtgatgccctgagtcttagttggtcgtgaaagagtaactgtaagagatcatcaattcgattattacctccccaaaagtcgtcgagaatcatttataaaagaaagaaggagatgtaaataccagatagaatagaaataaggttctttttggaaataatttatatattttgaccaacaaaatatacaaatcaaaagaaaaggtttctctagaatgacgaagaacctggttcgaagctgatcaagaacaattttgaacctagaaaaagctaaagtactatacaagccttagttcaacaaaatttctcaagaaaacatatattcatgcgacaattcaatagtttaaccccgcacaggaaaatttgtcaacaacgaagaacattcatggcataaacctagatttttgcagaaaacatgcaatatcaaacgcaaagaaaaatagtaaaatatatttaaatcaacacacttactcattgggggagaagcgagttgaaggtgattcaaatacttacgatctccaaatgcgtccttacgatttgagaaaacaaaaatgctctctggttgtacaaagaatcaaaaatgccaaatgagatttctccttccctttttaagaatttttaaggggcacgatggtaatttggatgcccaaatcaaatttttgtttccttataaattttgcgatgagtactttatagagtacaaccgttagcacatgcttctaaggcacaaaaa

SEQ ID NO: 298689 - DNA, 10458 bp, Cannabis indica
tggtaaaataatttccaatagcatatcactaggttcactcaaattttcaattactttacttaaaatataagaatgtgtcgcaccagaattaaacaagaagtcaatgcagtaccagcaacagaaatttgacctgtcacagtggaaggaccagcatcagcctcggcctgagtcagagcgaatacccgagcaggagcaagtgtattatccttcttctattccggtcgcatcaactgcgggcagtttcttttcaagtgacccactgccctacactgaaagcaggccctagcctgacactcgccctggtgacgccttttacaccttgaacattttgggtaggtccaattctcgtttccaccacgacgaaaaccttggttgctttggaatctcttatttggtcctgtatttgatggatcattggaccttttcttgcgatcgccaggatcactacccttatcagaaccagcaccagacatttgcttccatgaatccctccttgcaatatttttctttcgtatctggtcttctacaccctcagcagcaagggccaactcaactattcgtgcataggttcaaacaaacccaggttgtttggcagtaacaatcccatctcgtgcaaagtgttcatccaacccctgaataaattttagcctttctaacggcctcagtagccacttcatctgaagcaaattttgccagccgatcgaactttgtggcatattctgtcactgtcatactgccctgagttagtcgtataaactcttcagcttttgctgctcagatagactcattataatattttttgaaaaacaatgtccggaaagcatcccaggtcatgttatttaggtcatgaccctgagacacaatctcccaccagatgtgggcatcctctcgtagcatgtaaatatcacatatgacccgatcattactctccacccgcatgaactcaaaaatggatgttatcatactcatccattgctttgccttgagtggattagcaccaccctcaaatactgacaagttttcctttctgaactgcccgtacaacggctccaaatgatttcctacatccagtggcactaccagaagtgccggaggatcaggattaggatttggatttggagtaggctgagctcactgctccctcagttctcggatttgctcaccttgttgccggatggtctcctgcatcgcgacatataactcttcccagtttggtgatggtggaggattctcaccctcactgccaaccccaagcccagcaatctcgcagttacccctaccggatcacctcgggtgcatgatctatacacatgcgaccataattatgttgtttaacatatcccaaaacatgacaatactaataagtatttcaatgcattcccaaacatatcaccattcactatacttttctaataactagcatattccaaataagtaggtaattaacaaataatctagcaattaaaacttactgcaccatgggtcgaacgagtcttcacagccaatgtgcatatcataccagtctttaggatctttaaatcttggtcactctgataccatgttgtaacgctccatcccacatggatgccacgtgtgtgcttttataaaactactcttttactaatttatataattatacaaaaagtgtggctaattaaaatattgcaattaaaaacaaacgcataatttttataaagataagtactaatatctacgtggatcccctgttaccaaaatgtttacattcggaaccaaaagtacttttacaaagtatgtttatacttcaaaatccaatcaaaatgggttatcctgtccaccgggccgtggccctgcggctgatatgtacattgttgctatgacttcaaactcaaggctgttcaaccttgctcttccctttacctcagtccaaagatcaggtgtgcgggccgacctgagtggaattacccttgatgatcgcgggtcctatgtcacgacaaccaaaacttgataaacaacttattcaatctccgaaatcaaaccctaatctccgtaaccggacatctaacttcctactggattagaacaattcaagtatcactaaattaccctaatctaagctctgaaagacaccccgaatcaaaaccaattttgaggctaaaactagaatttcccttccttgcaaaaccgattgatcgattttacaacacctgtaaaaccggttaaccggtttctcagttggcagaaatggaaaacttggttttcaccccaaaaaccacacaaatctcttccatacctgcacaaacttcccaaataaaacatatcccacacattaaaacacaataattcatcaattctcacaaaattctatgttagaaccacaaatcaagatcctaacctaaaatttctaactccaactcaaataaccacttatatctcctaacctaagcttaagcatactctaaaacaattctaaaaacatcatctaaactcagctcaacatcacaattctgaaatcccaaaaccctaaccaaaaatcaacacttattgaaaatcaaagaaaaaggcatcaacagcttacctcaatatagctgacacttagagttatggattctgccaagaaattgcatgaaaggggctaaatttctccctatgcttcagctggcttctgggtcatgaaagagagaagaatattatcactacattttctaatgatgccaaaacaattgttaaaagcaaaaatccaagggttaaagcaatccaaaaagccctaaaagttcattcggctctcgtgaggggatatggcaagactatatccgaagaatttggcttttactcagactacccttttgccaaactcttacacatgaaaagcagcatattcatgccaaaaaagataacaaatctctactggtatctcgcaagttcatacactattacgatcgaaatacacacaaaagggcttcagacatccgtttgtagctatatccaacgctctgacctcatgccttcttaccaacatccaatggctatgttgcaatggttcaaaacattgcccgaataggacgcactcctcacacaagagtaggaaaagattcacaataagagactcgtgggactcaattgtctagctactgaaaacatggcaaacccattgcgctgttttacaatcctgctactcaaactacaagtcgatctagacttgttatttacggcaagtgtcaaaatacacaagtgaagtgaacatccacttgtcgtgataggaagcacagaagcaagacagtaggaaaagcacctatttgccattaacatggtgattctagacgccatttggccaaaactcgaagatgacacgccatgaaaatattatctatccgagtatctccaaaaaattagaagaagacatgaataaaaaaacactactgagaaaaacattgttaactaaaatgattcaatctttcaagatttacaatacccagacactgcttgttctcaatgatcttgatgaaaaaaaatataaaagagattgtctatatctccaattgtaattccaatccctcacatgaacctattaacaataaatggtaaaacgccgaatcctgcaaagatacctatttgtacttatgtcgtgtctattttatgtcaataataaaatgaatatgtgactcctgaggaagtcaatccattgtttcgtgtaacctttaaatactcacaagaccaataaagattcctactcataacaatgacaactgaagacaagaaatcattcacacattagagggataaacaaataaagaaaatagaggagaagaagacaaacagagggtgaagaattactttactctttttttccttaagaaaaataaaaaatacataatggcacaaaaataataattagattgccaatggctcacaaataggtactacataattagccataaaaaaaaaaaactagataagagctcgaggccaagccaacaattaaaatcagacaaaattcatattgtcagctcctcgcgaaaagaaaattactcaagaaatgcatattcaaatttcaaagagcactgctagaatttttatcagaagactgacggagtatggagtgtttaaaaaaataattaatacaatgaacgcatctcctgctacccgctgataaaaattcaagagccatgttaaccgtaatccatattcaaactcagaatccacaccaaataagaaaccaactatcctctaatatataatttatttatacagtctaaatcaaagcaaccgtagaaataagaagaatttcagtggtttctcagccctattttagagttttctttgacaatagggaagggtggcaacagcagcacagcttcctctgtttcaatcggatcagaccttagtatctacataatccaagcaaaaattataaaaattaaataagcaacatatagaataaaacctaaaagaaaagtaattatatagaatcaaaattaacatatagaagagagaaaaaaaaaaaagagtaccgggtcttggagaacaggcttggtgtcgtccttggctggtctgaaatggggttttccactcctaccactttcaccatgactgttgatggctttcgtcgaagtctctgaagatttcattttcacgattttccttttgactggaaaagctccaaaaggctgggctattctcgtttatttatatcctttcgggaaagagagaccatttttaaccgatgtggtactttaaaaataagatgtacggtaataaagaaaaactagaactagaggcatagataatagatatgatataatggttgggaaaattgtgaaatatttatatgaaaattataagtaaatatcctacaacaaaaaagtctcacttcttattcccttttattaaaaacgaagaaaaagttaggcaaataaataaataaataaaaaattctcatatgctaagagtaagtaccattaagctaatttacgtacatcactttaactaactcagatcttcaaccgggaatatctgatctcaattagtgtttcttttctaaattcttttgttctgttgtagttgaatgttaaagagaccatgtttgaatttatcaatcaaaatagagaaggcagtacttcagacaatccagaataactgtttaatgaactttttttattattattaaatacattcaggaatcaaaaaacgtttacaaccattgataaaagaaaaaaaacgcccaggcgaaagagattcccagccgaaattcaccgtcaatattttgcagagagacccagaaaaccagtagagctgagcttcaagtaaatgttaggaagaaaaaaaatgcacagcagtaattaggaaatcattattgatagatcatgataactagttagtagcaccattcaaggtttccactaagataaatgctggatctactcaagccatttcaatatcataccattattataattaaattaggtctattttcactacattccaaaccctttatttttatttaaaaaaaaaattgataaaaaaattatacaccccttcaaaaatcttttagttacagaattttgttatatttaggcaccttacctattccagcaacaacttgtgaagaacacagaacattcatatagcatgatcttcaattttcgtttgttaaaaatattagaaacctgatttttttagccaaaagtttatggagtctctaatttttttagagttcaaaattttaattaaatttttatcttctattttattattcaaatctcgaagatggaatgtcttaacttttaccaagccctaaattaaaacacacacaattaccaacaaaaaacaaaaaaaaatgtgacacgttttgtccattcactctaaaataaaataaagaatatactattttattttattttattttaatttttaaaaaaattttaaaaaaaaaaggttatttgtatgtttatgcgacaaataaattaaaaaagcaatagatctacttactgaaacaaaaagatatgttcattacttttggcatgctattaaattcaaaatacttttgcaatatagcatgagttatattgaggtgtaaatagcatttggatattataaatatataaaaaaatcgtaggatgcttcttatgcactgtatctgcatatataacgaatacctaacctgcagaattcctatgcccctaccaaaactataatagccagtggttatgtgttatgttgtgctagaaaaagaaattgaatgagaaattacactctacgaaaatatttgttctaattatattatatacatacttatcattaagtttttttttttttgataaacttaatatttcagtttatttgttgtagcaatcttttaaatatttgttctaattttacgtggttttgtgttttgatttgtctaaaaatggtgccaatcaaaaaggagtgataaatatccattattttattttaaatttcctcgtcttattttataaatataagaataatttacaccataaatacttaagtttaactagcagttataaataaatacctaaattaaatttttaatacatcttttgtaagtacctgacggttaaatattaaataaattgctacgtgtcaattactaattggtccaagtcattaaagttttatttttcaaaaaaaaaaaattaaatatattaatgagaatatttaacagagctctaaaattataagtattattactgcaaaaaattaaacttaagtattcatttacaactaagagttaaacttaagtatctatgccacgaattactctaaatataaatacaaatgatcaaaatatacatccttcattttttaatttttctcgtaatagtaagaatgaaagccattattttttattttaaattgaatttcctgttattacttttataaatacaaatacatactgaaatgaaagaaaaaaaaaagctcttccaaggtacgaagagctagcaatattagatctttaaaaaaattaaaattaaattatattagcaaatatattcaacttaacaattatgaaatgggcaatgacagccttttaatggtcctcatttatacaacacacaccaattaagttgtccatgcttcatcatcatcatcattattattattataattattattattaattaattaattaattaatcaaaaacttacgaagatctagccacttaaacaaggattgaactgatataaataaaaatccaaacacttaaataaccgaaaggcataaacaaaaaccacaagaacaaacctgtttaaaacacaagaaagaagcagagaggatcggaagtccagtttttgccatccaacatcaaggaagctgtctcataagtcataaccacttaaataaagcccaaagtttacccccaaaaaatgattggaaaattccacattctcaaaaaaatcgaaaaattattaaaacacaaaaaaaaacgtcaaaagtgcaaacaatcttgtagttttatgtgcttaaagattaaattttattgaaattgtaacaattcaatttcaattaatatatcattatttaacacccattgcatcttagatttagagcttagaaagttagttaattttccttaacaaaacgtacttaaattaattgatattaggctaggtaatttaataatattttatgaggtataattattctgaaaggaagttaaataaataatccagagttatcttcgcaatttaaattttaatctaatttgactctactccaacaataaatagacaattgatatgttggtaggggagacaaagttaggtacacattattttatcaatggttattatttttcattatgtaaatgttgcatgcaacccacttcgaaagaagaaaaaaatcttcaaaaacgcatccaattttaaaggatttattattattattattattattatttgcaacaatttacagaattcattcttttatttttattttttacaacaattttaaaggatttacaaactcactaaaattggggatggcaaacccatctactaatctttcgttcaaggcaagccactatacctcaaatccatataataatcactctggctcctcttaacatgcttttaatgaaattcatcttcaattgatatgcatattctatgttgactttaaaaatatagttcatattatgaagcgcaacacaacaaactatcaaattatagaagaccaacccattttaaccaaccaatccatatgctgaacccacctaatcttcatgcatttacattttcttattgcctgatagtgtcccccattaatcacaaattaatggcgttcgcaatagtaataacaataataatagcaatttcactatcattatttttgcttaagatttgttttctcctccctaatccatgtgtgaacatcagtattaaattagaagctttgagaaactagtaattctatcgagttagtagtgcctataatatttgaagaaactaattacgtaggtgttcaaacatcagaccttgtgagagcaaaccacattgctgctcaagctacaccacgtctaggattcaactaacttccataaaggttagatggacaaaaatatgtcagcataattaaacacttaggtggcgtttgattgaaggtaatgaaatggaatggaatggaaaggaaacaattttcattccattcctttatttggttgcattttaaagtattggaatgacattccaatgaaatgctctttctaccattttggtggaatggctattccattttaaaaagaaaggaatgaccattccaatgtaacaagaaaaaaatttaattatttttttatcaatttttttatgcattttaaattttattccattccattcctattcctattcccattcccactcccattcccattcctattcctatattttcattcctcccaaccaaacgcctcctaatacattagccccacccccgtataagattaagaaccaaggagaaaacctaaagatttgaatccgattaactataatataaacgtctagaaaggtacgaaggttctaacttatgacttttccagacattcaaagtatccaaattactgccacaaatgccaactacgtttcatatgagaatcctaagaaactaccctgagatatggaaaaatgttcttaaatttataaaatctatagacatataaatccccacatatgaccaaattaaaatattaatactaataagcagttgctgcaaaataaatctttactcttatcttaacacaaaccttaccaagttacaaaagatgatgaagtaaacctttcccctgaactttcagcctctatgttgtctgcttctccgaaaaaagacaggtcggatttgaaagatctattgtaagagaaaatttcaccagaaataaaagtcactattaataagcacagaccggaaaagcttgaatatacatggcgatagatgcattagacctcaaggcaagggcgaaaaattaataatagatacacattctactttgaaactactcagaaatgagccttttactcaaaccataatttccacaggttatgacatagaggaatacttaacagcttttccttgtttggtatttaagttggaagccattacacaaaaggttatgataggtgggctcttgcagtatagatataaaatgttttgtgtgtgtgaaactaggacccctgcctaaccaactctacaatatttggggataaggagactagcaattgctatgttaggtacctaggagtgactcgaatctcaggccttgtgggagaaaactacatgtctaaccatttgagttagacaagagggtatattaataagcaaccataagcttttgatgaatgttaagtataaagttcaaaagcaccatcacgaacttcatcatatgccatacaactgttaatgtatatacaactccaaaagaaacaaaacaaacaggagcaaagcagttttctactttacatctcttaaatttctttcttggtattgatgttatcatgtgttgttatctgagaacagtgcaaacttcaaaagtaaactacattatcaaaaacttaatctaaactactattgatagttttagtatgcaaatattgagctttgaagtgtatgaaaatgataaaatgtttaaataaacaaagctcctagtcctatataatatcaacatcccaataaatccacatcaatttctccatattgtcaagtaaatgctcatattaagagacgtctgcaaaaccttaacctaactaagaaaatttttaagttaatagtctttcttatcacgctccagaagtttgatctatgatatataagtacaaacctaaacatagatagactaattatacatcacatatgcaatagcaaattctgttttgcacaagagatatagcatatgccagaagaagtatctaacaataaatatgagtaaaatatattttaaaaaaattgatacggcatgctaagcaccagca

SEQ ID NO: 298690 - DNA, 2920 bp, Cannabis indica
cattcaaaaaattataatttaatcggacctttcccaaaactatttaacaaataaaattgtaaagctgtgctaacaatacgagtaggtgacggtgaatcaggcacagtctgacctgtcttctctcttcaaccaaacccaactgcccgtattagcgcgaagccaatctaagccaagccacttagccacctctcctctttggtcttattctcactctcaaacttctctcattaaagccttcatcttcccccatttcatcccgtaccttatactttaattccatcaattgacaaccgctaaattatccaatactttgaacttctagggtcatcgattcaatcaaatcatctttctccgcgaaaaccatcaccggaccgatcctgattgggcttcatttagttttaggttcaattggatcggttccgttctcagctctacgtaatagcggaatcctgcaaattatagcttcaattttaggttttgtatttgggataaatggatacgagtcgaagagcggtggaatcgtactggaggtcgcgtatgatcgatggagcaacctccgatgaagacaaggtcacacccgtgtacaaattggaagaaatttgtgaacttctgcggtcctcgcatggcagtattgtaaaggaggtttctgagtttatattgaaacgacttgaccataagagtccaattgttaagcagaaggtataatttttttttcttctctttatgggtttctattgagcttggactataatagatctgaaagttcccgaattgggttacagttgaattttgattgttgagtaaatggaggacaacgagtggaagtttcataactgattttttttctttgttactgaatttgaaaagctcttgtctgttggcaagtacaaattttctaaattgatgcttaagataacacgatgattttgatattgactatgatgtggtgcaaaatttaagttctttaaaacgaataaaaaatgtaaaccttagctttatattaaattggatcaatccatctattgtttatttttcaatagtaactttgcatgtaaattttgatcttcattgcttggcacgattaggacagaaattgaaaccatggaatcatagtttataggtcaatctgtagcttaaggagcaagcatttagctactgtacaggagacatgttcagaaattcattataaaagttggatttttctttattaacatgataatgctggtttttgctcgaatcttttgcaggctcttaggttgataaaatattctgtggggaaatctggcacggagtttaggagagaaatgcaaagacactctgttgctgtgcggcagttatttcactacaaggggcagttggatcctttgaaaggggatgcacttaacaaagctgtgcgagacactgctcatgaaaccatctctgccatcttttcagaggaaaataagccagctcctgttgaagatcggaatagaagaatccaaggtttcggaaataaaaactatgaaatgccatcggacgataagaaatcatttctcagtgaggtagttggtattggaagtgcatctatcaagcagggtataagtagcttcacacaaagtaactcgatgagaaagaatgacaacggaaactacaagagcccaactctccataggtcattgacaagagaatcagagtatacggaaagatatgaaccagttcaattgcgcaatgaggctcagggaagttctggatatacaagaagtgtggccagtggaccttggaatcaagattcaggatcaagtaacactgaaatgaccaatgggaattcatcttcaagtcactctgaaagtaagactcccgaggagagactgttggagactattgtaacgtcaggtggtgtaagattacaacctactcgggatgccattcaggttttcctaggggaggccgcaaagttgaatggattagctttaagccatgctcttgaatttaagcttcaatccccaatgtggcaggtatgcagtgctgcggtttatacttctctgtgtttataagtataatctatgatttatttattttcttctggaatatggttgcagcattcgaagctttatttgtagaaatgtaagaatttatctttgtttggctgcactgtttcgttataaagttttaaggtatcttctctgttttattcgttttattcattcaggttcgcatgaaagctgtatgtgtcctcgagtcaattttgaggaaaaaagatgatgaaccatttacagttgttgcatcatattttggtgaaaacatagatgctgttgtgaaatgctccgagtctccccaagcttccctgagggaaagggcaaacaaggtgcaattttttttttttatataaatagtaattatttgattagtataaataacttctgggaagcaatactcaattttcccagaggcggcatggagtacctaaatgcttattcatttgtgttactatagacgtaatctagctattagagaatattacgagtgttttgtaaaaataacttttaagaattttttattagcaaaatagctttacaaacaattttattagcaaaataatcttgtatagtcacaaaaacgaccataaattacactatgtgaccataaacgatcattatgttgcagaacgaccatagatttacactgtgcgaccatgatggtcgcatagagtaaattaagtgaggttattttgcaaattttagtatttcatattgttagtttgacaaatttcactaatattaacttcagtaattgcatattctctttcttcaatcttcacatttccttagattaaaggccgttttcttttctttccggaagaggctatttgatgaaatgttatttacacgcttatttgtaatattgctattattttgttttgttttgattgtttttttttttt

SEQ ID NO: 298691 - DNA, 1631 bp, Cannabis indica
atttaattaattaattttcttcatacacactttcatttaaaacattgtgtacaaactataagaaataaaagtactaataataacattattattacaagttaatgacactcattttccaactaattaaaatttggaacaatattttctacgtcttatagatttctaataattcatattggctagccaaatacgtcctaaaaagaacactgcaatctaagttactaacttattatattgaacataataataagtagcattaagatcatcataattgttattattctcatcatcttcgtcgaattcctcgtgtatatcttccacaatagtctccaattcggggcatttcgagtacttccatgtcgaaaagtcaagcaaggccggggcgacttccatcatcaaaggcttcatcacatagtttccggtaacctcttttgacattgtcattattgtttttcttatgatgagaaagaaaaatgaaagtgagaagaaaagtgagaaaacccttgtggtgttttggagaataggaattaagagatgtagaaaaaattgagttttgattgttgaaaagggttaaggaaatatatataggtggaaatgagaagagaaaagacaaaaaagaaggaaagaaggaagagagtgtgttatgaaaaaggccaaaattttagtgtaatttgagggcaagaagggaatctatgttgagatattcttctaagttgggtttgtacgtggatagattcaataccgtaggttaggttactctaccaagttaccaaagatatatctaacaaatcataatcattattgttcaagatttttgtgctacctaccaatatatcattttgttaccctcaaactccattcattcattcattcaatacttttcaacatactctaatgtaataaataggagcataggcacgagtgacgattgagacacgacccaaactcgggagatagcaatgggaaatttttcacgatggcctaaagcctgacggagtaataccacgtggaggtagaaggcttacgagtcgtgaacttcttctcctgaagtttggactgagaagaagccatgagtatcgactaactctgtgttagtagttacaataatacagaggatgcaagtgttatctgtacgtagctttttaagtttgttttcaaatctcaaaacactattacaaagtaacgtcttatgaatcgttactgattttgtatagcaattattgaaataaaataggataaacttgataatgctaagtaccatgcatattttttttcataatatatatctttatactatgcaagtaaataatatgacttatttattacacttataatagggtggaaatcccttaactactcaaggaatgaagcgatgatatagagatgacatttttcactcgaatgttaaatcgaataaggataagagtggtattaattctcgcccaatcgcttgtttaatattttatttttatttatatagtttgtaatttttgttagaatttcctaatttcattaaacaaacaagaaaagtaaattggtaggtttctgtaacgtccccgcttcaagcctttgttgggcccttacactcacggactaatggctcttatacacgagtacgtcactctggctgc

SEQ ID NO: 298692 - DNA, 1237 bp, Cannabis indica
ttttggaggcctggtagatgggagtatgaggacttttcggttagtgcggcttggactagagatttatctagccgtttgattgttgatgaagcttggacctctacttcccatgcctggccccctgctaaactctttcgaagaactggtgccactcgagtggcccttttgagatggaataggtctatttttggcttggttgatagatagataaaattgcttttctttgtttcaaactcttccagtagggtctcgggactggcatgaggagcattgtataagaaaagagctcaacaaagcactgaggcgaaaagcccctttcctggaaacaaagatctcgtgtttcttggcttaaagacggtgacaagtgctctagattattttctttgtctcaactaccattagacaaggagaacaagattgaaagttcgtcgaaccgtgatggtagttgggtgtctactcggggctagatcagtaaaaagttcattgaccattttgctcttttatttgggggtaactctaatagtgaccgaatctccttttcacatctggttatcctgaccccctctctttagctgagaaatagtgtttacttgcccatcctgatgatgaggagattaggtccacaaagctctaggaccggatggtatgccagtctttttctataaacactactggaataatgtgggtatagacttttgtaatattgttcggaacttttttgaaactcgaaggatgtatagaggctaggcattaacgctaccaatgtggtccttattccgaaggtgcctaatcctcaaaaggtgtcccagttcaggcctattgctctgtgtaatgttatttacaaggtaatatttaagattattgcaaaccgtgtcaaaccgatcctcctagaattgtgtgccccaactaagcgacatttgttcctggtagaaacattcatgataataatgtccttatccattccttccaaagaaagaaaggaaatgggggttgtttgctattaaaattgagctggtcaaagcttacgacaaattgagttggagttttatcaatctagttttaaaggcttttggtgttccggatcccttttgcgagttggtaacttaccttaaattgcttttttttccatctttttatttttttaattatcccataaaatatattttcactacaaaaaagatcatctttagtgacaattttttagtcacaacaaaaaaattatttgtgactaaacata

SEQ ID NO: 298693 - DNA, 1674 bp, Cannabis indica
gggaattctcctgtcaagtaagatggagtttgagctgaaaagggtcccaagtacttcactctgtctggtccataccacaaatcatttccctattcaaatatatacacacacttccttagtcaatatagccctagccaaaaaaaaaaaaaaaagaatgaaaaacatataatataaaaacataccatggtgtatttgccagttcccattgggacaacatctttcaaggcattggagcttggtcctctgttttgaccaagaaatggggtgggtcttagtaatgtgcttgagctaccggtggctgccattagcatttcttgggttttggttcacagtttttgaattgtcttcttgagaattttataccaagaggagaagctctggtgtgagtaaatattatgtgcggaaactaaaagagagagattagtggtcaagaatagatgaagtttggggaaattttgtgatggggtccaagcctttaatgaaccaatcacaaagcttggaaggatttttaagtatctattttatccacattttatcttgtgtacaaacaaattgttttgtctttatggggtaatgatctagtaggtggtgcctctagaaccataattgtctatgccaatcagatgtagctatatttggtttattttatttatttttataattatatttggtttatttaatgtccaatttttatgtcctcttgatttttgtattttccaaagaaccctccttttcgaccattttgatttatgtggtggatgtgagttagatcaatagatttgcatgtgagttgatcaatagatttgcagtcagatttattgattaactcgcattcaccacgtaaattagagtagtcgaaattcttgggatgaacgactttattgttttccacattagtgtttttagtattataagtattgttattttttgaagtaaataaattttccactatgaattctagtgttgtacattttaaagaaaaaaaccaggttggaacgtaccaatgcttattgaataaaatcaataagtgcaccacatatgctcaaaatacaagggaaaatcatttccattaagaaaaaaaatacaagggaaaattcaatggagtaaattcattatttattgtaagtgtatacaaaacagaatgtactattttatattttgaatttactctaatatgcaaaacaacttaaattcaagatgaaatagtgcagagtattagtactatttggtttcattattttaaaataattactttttaatattaaattagttaatatattccggttgtattttatttaataattattaaattataaaattatatcaaacttcaaagttaatataacttttaaaaagtgactaaaaaattggaaaaaaaaatataaaatactttaaaatatttttaaattgtcacatcgctaccttaattcttaatttataaaatcgagataaatagataaataaaatattgtttaatcaatatatattaaaaaattattttaaacaattcattttgtcaaaatattaaaactatttatacaaaaatttaaattacatattcaaaaatttatgtcttaaaacttttaactatatgtgatatccttttttgacctttcactttataaaattaaggtttgcacttgtaatttttttttcttttcaaaaagattaaaa

SEQ ID NO: 298694 - DNA, 1961 bp, Cannabis indica
ttggattttgagattgacatccaataaccgatccaatccaattagaatccaacttttagcatccaatccaatccaattgtaattggatatccaatttcttgtaattagattggattgtatcagttcaattagattggattgtatgctgcccacccctaccttttatggcttttgtgcgagttattatggcttgtccttatttgtttaaggtaggtttgtggtttggttaatgggcaagagaagtgattctttttgtgctcatgatttctacttcaacgatctttttacttttaacagataagtatttcaagtctttttaagtccttatatttaatatggattaatttaccatcgttctttcacattatattttttcattatactatatggtaatagagttttatttttgttattttgtaggttgttttgtggagggcctacaattacatagaatttaccgataagttcaattttaaatataatctgtttgatatggattttcagcagttttaattagggtgctagtttgttgttgctagccaaaaggtaatacctttggcttgttttttttagaaattttgttggttttttagttttttaataatgttgagctaatgatatgggttgtgtttaaaattctgagtttgtttatttatttttattttaaagagtgtcatgctaatattactgttttttttggtttgggttgcgatgttttttcagttcctctagctctggcgacaactattaatgttgggaatgtgtttttcaatgtgatagggtattgtttgaagaagttatagttttattgtcaaaatttatgggggcagttttgtcccatgtggcttgcaagaagtattttgtaactcatggtttggcaaaacatgcccttcggttagacgatgagctatctgttagattatatttttccaggacctagatttactaacaagtatgtttttaacatccttatataaatctctaaaatgatgaaatttaaacacatataaagtatgagaaactttatattagttgcagcgggaattaaatgatactgtaagtagcttagtaaatataattctacatccagttggtttgacccttgggtcccaaccgggaatagtcaaccagagccactactggatgcaacacaaggtgctaatttggtgaatttcttcatcaatgatgatcagacttggaacgacagaagggtcaggcaatggtttcaatgtgaggatgcgagaaacattttaaacattggcctaccggcctttaaacaagatgactcgtaaagatggttgggtgagaataatgggttattttccattaaatcagcctaccatttgatcactaatcgcagatgtgtaggcacaccacattggatatggaaacttatttagaataaccccattcatgttagactgaagcttctctggtggcaaattatgaataatgctctccctactcgtgaaagaattacaatggttttaaatctaccttcaaacctatgtccaatttgtgataaggagagggaatcatcttttcacttattatggagttgtgattatgcttcagcagtctggttcggtagctgctggggaatcagaacaaacctcagtcaatgccgaaattgtgaggaatggatggactggtttggatgcaataggaaaagacctgttgatctcagttttgatgactttatgacgggtgctttgtgcatttttgaggttatttggaaggcgtggaatgaagttattcatggcggccaaataatgcagatatctatggcaattcaaaatgctcgtgtgcgcttcaatgatcacttggattaccaagtaagaaactattcttacaccattgccaggatggatgacctgctacactgatgtgtccattggatctgatcactcttttggagcagcagtttttaaagactcaaaaaatcaaatctgtagcgtagt

SEQ ID NO: 298695 - DNA, 2002 bp, Cannabis indica
actctctctctctctctctctctctctctctctctcagcagctgaagagagacagaatgagcagggcttcctgtctctttcaactctggcaaactcccccaaccagaatacttttcagaagctcaaaaactatcccaaggtttttcctttccttcttcatggtcatttccattttcatttaccttttctttacatatcagtttctgtgacttacatttcgctgtgtttatttttaagcaatatagatatgacccagatatttaaactttttgagtataccccatttgctggtctctataaatcttttagtatcataaaaaagtttaattcttttaagagaaaattacatactttatattgcatttgttttttcatcacgggtttagaaaatgaggcttgaattgatttaaacaataccaatctggatttctgaggtgctttaatttccttgttatggaagatgtgctgtgttttttcattattgccctgaatcctttgttacctttttttttttcttttttgcattgtcaatggtgattgaatttttcaacttattgcaattttctgaaatccaataaggtttggagatgatttagtgatgtataccacctatgcagggttatatgtgatacctggtgtcaaattttatccaccaccctgctcatgcaagaacatacaaactacctcatatgaagatgtcaatggtaaagccagctacgtacccacaatcaaaattaaaaaggaaattgaagaaaaggtatttcttcttgtacttgtctattaattaacagtattatcaggaatcataggacaaaagaaggtagtttaaaaggaaaaaattaatcagataaatgagaagatacacaactagttttcataaccattgctgaacaaatttcacaaaattatgagaaataagaaagaatgaagttagtcaatgaatttaatatttttttctttctaattttactcttgtgatttggtttctttactacaaatctgtgatggttcatgtggttttgttgctcttaatttaggaaaaatcatcagagaagcttgaaacagttggtgcatttcaaaagctgcccatggtgatgccatcttttgatattctttactcagcattaaagaaggccaagagagtttctccaactaagggtaattgttgtgggtgatttctttttggcataactgcatgtaaagtgataagatgggaattctgtttataactcctgctaaattagcttgtttatgacacaggcattgctaacattgcaaagcgagagagaaatagaagtgcaaagcagcttgatgcactgatgaaagttcgctcttaacttccattttgtcttttatcacttaaagtatcttttgccaaaactcaccaaccattaaatacccttaatagtattatgttttgcactttctaccaaatattggggatgagaatggtgcttctgtaaattttttgacatattgctttcactatctgtgttcaggaattggcagttcctttgaggacttacatggagagttttccaaagagacatacccttcatccttatgagcgatctctaattgaattgactcttggagatggaaattatgaagaggtagactataagcatctcatgcttgacataccattcaagctggtcattgttgttataactatagtttcatccattttgtgactataatatattacttgtaggtattgtgcaatgtggattcactgaggaagaaggtggtctctgttgcaaaggaacatgcttctctttgtgctaaggttggacttttctctttgaagtttattgactgcttgcttcttgctttaagtatttgacttaatcacttaggattcgtttggtacgccgtattacaccgtattgtattgtattatattcaattgtattttatgcaatatttttatgtaaaactatacttggtattaacttttatgggcacctaaatatataatattttagtataaattaaagtt

SEQ ID NO: 298696 - DNA, 5390 bp, Cannabis indica
aaagaaaaataaaataaaattaagccatagtccatgtacattgttcacaaccaagtcatgtgcaatacatgtataattattacaaaaccgaaaatgttttcaaaagaaatattacacaataaagtgagcttccaactcgagatgaaaactatattagctagcttgatacatatgttacaaatcattgaatcactcatttgtcactttgtgctttccatttccattttctattggaatggaaatcacatccttgtccttgtatgcttttgtagctttcaaattagtgtcaccatcgatttcgccagcagccttgtgatcattagtgctaccattattctctttcagcaattttgaaagtgttgaggctatactttgtcttgctgctggagaaaccccattcttaccgataattgactctaatattgcttctgaaagtagtttactttctatctcactgacccatgtttctggtatagattcatctttcgagaaacttatctaaaaatattcaaaaacatagcatatttcaatgtataagtgttttttttaagtcaataaattttcatttaaagttctttcagtgatataaaatggagtacgaacctttaaaaatccgttaggtgactgagtaaagagaatagaggagccaggtagaaaattttcatccttaaagatctcaagaaatttatcaatggctttggcttctgcatcactataaattccaagagatttccaaatggcaacgcaattctctgctactttttcggaatattgtttccccgtcaatggcaatatcattgttatccgagtaaatttatgaaaagggcctgccattttaagagaattatcaattagcctcttacagattgtttgataactagtttggttggtttggaggttgtcatcttaccactaacaatctccctgaagaactcgacggattctgtcaactcttccgacgtcttccccttccactttccagacagccatgttacagcgctatcctccaagtaaactccaatggatgtaaactttactaaatttccctggatttctagggccctcacccctacaaaatcattttatgtaaaatgtaacatattattattattttggcagaaatcaataataaagtagttaacagaatacatatgtagttgtttaaaagaagtttttttttttccttcaccctgtgaaattgcactctagtacagtaaaactaagactaagtaactccattagcgctccaaaaacaccttcaagatgtctctctaaaaccaagaaaattgtggttgggattgattacgactagtgagcaaagccgtggaagttgggcacagcaataacctcacttgaactgtcaataactacaaccactacctccatatggtggtataagataaccttacattttctttataaaaggaaaaaaaaacacaaccataaacttccattaagatgaaatgttagatacaagcactgaaaaagaaatagaagatgtaatatgaccattccacacaaattcacaatctaaccccaaagcttgttgggctaatgaatgtcctcgagaagtactagcctccctagccttagatcacaaatgtcatgaattagattacgcaaaggagaaaaatctctaccctttccccttatattatcaaccaccatcttacaatcagatgctattatattaataggcagacaaattgcattacaccattgaaccatcataagaatagcccgaacttccatcagaagggtgttagagaacccatgtactggtattgaaataccagcgaaaacttggccacaataatggcacaactgctccaactcacattgtcccgtttgagtcagaaatgacaacatctacattgagctttaaactctccggaggaggaggagaccaacagagccagaagctctttatatttcggcgaaaaatgtgcaacccaatctacaatttcattgaaaggaatgctagatttcatatggaaaaggatcacattcctattgttccacatagctcaaagcaagcataagaactgttcaaaatgataagcagtaaactgcctccaagccaaaagtattaaatcatagatatcaagatgagaggaagatagaatgaaattgtaaaagggagaatatttccaaatttgccttaccctggaacacaacagtaatgcatgagaaacagtctcaacattgaaaccaaaatgaaaggaaagtggagaaagtggagtgttaagtatgattgagtagttagaaggaatgtctttgcaatgatagctagaaaaggcatttgtgttcggttcatccatgataatagaatgataagcacctggctcgattaattacagacaacagcaaaacaccaacaagaataagaggaaaatcaatggtacagtagcaatttaatggaaaattcagggagctttattgaatcaaaagaggagactcaagtctcatacaagggaagagtaagttcaggtgatgctgagaatatctctcgattctagcatgaccaagactctagctccctacgcacataaagctgccagcacataataaaaagactcggcctactgctgaccatttggtctgccatcccttctagtgtaggtgactcgtatctcaggccttctacgccgatcagagaagtacttctcggtagttgagttttctcactaagagagttttggtgttcaactgagacttgtagctacttttgtaatcctagtgacttgtgattaataaagagagagttgagctttatttccccgtggatgtaggtgccttaacagtgttgaaccaagtagatgagtgtgtgttttatttttttttcaagtttttgttctttgcactatttcttattcattttctatgtcaagaagcattgttcttatttggtgtgagtctactcgaatcacaacatggagagaatgtataatattcctagtaatcaaatgagaagcaaatgatgacaagaccgccaaataaaaaaatgcttaacttttgggggtaatctgagatgccacaactaaccaccatctctaaatattacaggatggaggagtagaaacggctgaaaaagtgaagtgataggcagttctaagagaagttaaaccccaaaccaaagagaccatctgatctaaattaactagaggaatagataagatagcttgaaacacatcataggaaaagaaactcctcaattttgaaacatcccacaagagacagagacacgatcagatggagtagaaaccgaagccccattactgataaaagatgaacctaaagttggggatccaatagtcatggatagtagaaactgaagccccattacctatgtttaagattaaccctctcctaagaagatcttttccccaaagcaagtgtacgaaggggagtgaccaggcttagcatcaaggacattgcacctaggaagataacatgccttaagcaaacgaccaaggcgagaataaggattctggaaaagccggcaggcttttttttggcaagtataccttgattaaagtgaacaagccatctaaaacctaagccaccacaaaacttagactagcaaaaataagatcatttttttcccgttgaatgcccgactttgaacccaatgacccacccccaccaaaatttggccataactgattcaatatcttgacataacttaataggaagaccaaaacaggccatagcataacaaggtgtaacttgaaccacagttttcaaaagaaaagactttatcttagagataccaaaaaaagcaccatttttgaatcgttcaaaacattaaggtagacctaaatatttacttatataaacgacttatcatccaaacctagcgctgaaagaagaactgattatcaaatgagaaagtattattaaagtgaagtaattgaccagtacactgaatgatgatagagttataaaatataccactcacatatatagaatatagagttatataagtaagtacctgcgccactgaggaacaaagtcttatccaatccaggaggcttaaccgccgggggaaattttgcagcttcaatctgaatttcggaggatgtcaatggtgacagattcattttcaaactatttctgcaaataaatatactctatataagtgtgatagctgttgactactgctatatttttactatatataaagtgttatagaaagaaataaatagaaaaagttgataggatggttttaaagggtatgtgaattgtgagggcagacaagagttatataatggaaggaggccacaaaatcaaattgttaggtgggattggaggagagtagatgagatgatcattcatgagagttccccccctcccctatatgaatatgaaaataattaaatgggagttgataacggaataaatgggtgtgcaggtgcttggtttgagaaatcactagaacctaacactagctaacaacgtgggcttagttttaccagtcaacctaccaaccaaacatcagtcatcctcttactaggattcactcctctctacctaccaatactaaagtaaacacacttcatcatcctccacctccaaaataaattagggagtgaaaatttgacacaaaatatttactacttgaggtaaccgaatattcttccttccggatccctccaaatcttcttctgtttcgattgtttggagtcggggtttttctatgaaaactcttattattaagtgagatggggagagaaaacacatgaagactaggagaggcataaaggagtcacatgtgactttataatttctctaaatagtgtcacttcataatttttctaaatagagtgaaacctttatttatttaggaatatatttagaatcaaataaattatattctaattaagaggttattctttttattttaacaataattaagaggttataactaaatagagttataataaaaaataataattaaaatactaaaaaaatatcattgtaataaaaataacaataaacaatccttaatactataattatttttgagtaaatattataattatttttgagtaaatataatatttattcatatattacaatttgaaataaaattattaattctacataaataaatttataaaatatatgtaatgttttattaagatgtaattattcttatatagatgtattttttattaatacgagacttaaaaaatgtataactaattacaatttgaaaattattcttatttataactgtcccaaattgagacttaattttttaatagcaaattataaattattctgaatagagtattcttagatagatgttctactgtagtattatttgctctctctttaattctctcattttttttttaatttttattaaatttataaatattatt

SEQ ID NO: 298697 - DNA, 1887 bp, Cannabis indica
agaactatccaatcaacccaagttttcataaaaccaataaaagttaatgtaagcccaaataaaaagtctaacaaggacaaaatgctcactgttgctaatgtcttaacatcagcccgtatagctcttgatcattgactaaaagctcaagataacacatctctctctcacatctactctggtaatggtgatgatgagctgagctttagactaatccggatacaaatacaattaagattaatgttgatgttgctatatttgctagtgacaataagcacgaatatggtatggttgcaaggaacgattaaagatctctcattgaagctaaagcttagtgccataacggtgtctttgcctctgaagttgcggagattatgggaattaaagaagctttaagctgggtcaaaaaccaaggttgccaacatgttgaacttgaatcagacagtttagtctctatccaagccatttgcaatcactcttctctttgctccatctttgggaacctggttttggattgtcactcacttctgctatctatgcctttagttaaaattcattttgtaaaacgataagcaaactgcctagcacatgttattactaggatgtcacgatcattttctggttgtagcattttagtgtccaatgcaccagcatctatgctggatattttgtaatctgaatgctaaattaatgaagttgctatttcattaaaaaaaattgtataagagggccaattcatgagttccataatagtattttttttttgaaatcccataaggcaatcaaactcctaaagcacacgattgtaccctaaccgaagacacaaccccatgctagcatgaacagtcgaagccttggccacaaatggatgataccgaccatcgaaacgcaaggtagcagaagccaatgttgaaccatcattgtccctcacaacagtaccaatacctattttagacgctttggaacaaagtccaacatcacagttcaccttcgtatatcaccccctaatttcacccatttggaccagacacctcaccacttcaagcaatacttgaaattactacacatagtggatttttttttacttacatgtattactacatagtagaattttacttgtatagtaataattcatgaatagtacctcaaaggatcatttggtaggtcgtataagaatcatattgtattaaataataaataacattatgtttgaataaaatattgtattgtattaattattacgacaaaaaaattaaaacaatgtgattcgtattatttaatacataacaaatgacctgtattaggttgtattataatatttacaaagggcctggggtcaaccccagtcccagaccctgaatccagacttgaactcggacttcaacccagactctgaatcctgaacctcgacccggaccctagactaggtttcgaaccccagacccaaacttggaccccaaacctggacctccaacctggcctcgaaccatggattcagacttgggccccaaaccccaaactcaaatttagaccgtgactcgaacttagaccctgaaccgggtccgggtcgaggtcaagcactcggacccagggttgggtatgagttcgggtcgggggtcttggatttgagtccaaatccacgaatctagggctcgggtctggatttgaaactggggtttggggtccgggtctagatctggggttcggatccgagtacgggtctagggtttaaggtccgagtcaagtagggctgagcatgggttgggttagccgggttgagggtattttaatgacccaatccaatgacatcggccaagagatatttaacccattcacattttaaatttttataacccaacccattttttcttttgcgggttgggttgggtt

SEQ ID NO: 298698 - DNA, 3514 bp, Cannabis indica
tttcggtttttatgaacacccctaggaggaagaggctattcaagcaacatagggggaagaggtaacaaacctgtttgtcagatgtgtgggagctggccacactgcacaaaagtgttatcgcaggttcaatataaccttcacaggaaccacaccagcagaaaattcaagcagtgactcaagttcgaagaatcctcaagcaaatcttgctgaaacccccgccaccactgacgtttctggagcctagtttcttgacacaggggctactcatcacatgacaaccgactcacaaaacctgcagaattcaatggattacaaaggaaaacccaaagttgttgttggaaatggtaattttatggctatttttttgaattggttcaaattccataagctcaaatattcctaatcaatttctcattctaaaagatatcttacatgttcccaatgtcacaaaaaatttgttgagtatttctcaatttactaaagataatcatgtcattcttgaatttaatgatgtttgttgtcttatcaaggacaagacaacgaggcaagtattctaaagtgtaccctcaataatggcctttacaagctccaagtgtagccctcaaagccaacttccctgcctcaaaatcatctcaggtcaagtcgtcaagaacagtagtgcacctgctatttttaactgtaccaccaccagcaatcctgttgtagataagtctaaatttgtttctacttggaattgtaggcttggacacccatccaagcaaattttagccaaaatccttgctcatcccaatgttaaatgcaaatatgtaaacttttgtgatgcttgtcaagtaggtaaaatgcatcaattcagctttaaacctactaaaaataaaaccacaccaccttttcaattggtccatattgatgtttgggggccttcatttcatgtttctatggataattacaagtattacctaagccttgttaatgattttagtaaatttgtttggatattttctatgaaagccgaagtaaaagcatcattactatttcaattcaatgcctttgttgagagacaattcaacaccaaaatcaaatctattcaaactgatttaggtaaaaaattctctcctcttaaaaaccatttgcttgctaatggtttaatgattagaaattcctatcctcacacacaccaataacaaggtcgggttgaaaggaaacataggcacgttgttgatgtaggtttaactctcctagctcaagctgagatgcctcttgaattctggcgggaagcctttatttcagccttttacctcataaatagactccccaccccaatcaacatttacctatcaccctttgaaaaattatttaaaattgcaccagattacaacttattaaatttttttgttgtgcatgttttccattgcttagaccctatcaagcccataaagtttcatttagatcatctaaatgtctattcatagagtatagcatgactcaaaaatgttataggtgtctccaccctagtgggagaatatatgtggctaggagtgttaaattcaatgaagaagaatttccttataagagtctatttcaaacttcctctcccgaacacactagtactgcccctgtgatccaatctaatgaggatcaagtccccacatcaatcacatctatcagacccacaccaaatacctctaatactcaaaaccaacagtcaaactcttctcacaacaatcatcacagcacgaccatttgttcaagaacagatttctagttataataaccaacatacatctcagcctcactcaaacaaccaaactcagaattccataaactctcacagtgtcacctcccatgactccttaccctctcaacctccctcaccccctcccactcataacacccatcccatggtcaccaaatccaaaatgggcatctttaaaccgaaagtatacttggcagatattcaaaatgaaaaagaaccaacttctgttaaacaagctttggctaatcctatatggaacagggctatgaatcatgagtttgcagctttaaaaagaaagaacacttgggttctggttcctccaactcctgatatgacagtggttacaaataagtggctgttaaggatcaagtataatatagatgggtctgtcaataaactcaaagctcgattagttgctcaggatttcaacaaacttctggtgtggatttctttgagacatacaatcctattattaaaccatgcacaattcgaatagtcttcacccttgctactcaaaataattgggacatacaacatgttgacataaacaatgcttttctcaatggccagctcactgaagatatatacatgacttagcctcaaggatatattgatgttgaataacagaactatgtttgcaagctaaacaaggccatctatggcttgaaacaggctcctcgagcgtgatttgatcagctcaaaacatacctgttgcaactttgtttttacaattccaaggcagataccagtctattttaaagcaatattcatggacaacttctgctcattcttgtgtacgttgatgatattgtaataacatgtgctaatcaagaacaggttcaacatataattcatcaactacatcagcaattcgacttaaaaatgttggggtctgttaactactttctcggctttgaggcattcaaacagggtagtacatactacttaactcaacacaaatacaccaaagacttactcaaagaaccatcatgttggaagccaaaccacagtccacacccattgtgccactacaaaaaatgtccattcaatctggacaaccccttgcagatcctcaacaatattaaagtgtcataggagcattgcaatatctaactatgacaagaccgctcatttcctttgctgttaataagtttagccaattccttaaggctcccaccacagaccattggggagcttgtaaacgtgtgttgagataccttgctggtacaacacatctaggcatgtgcttctcaccagcttctcaccttgatcttcaaggatatactgatgctgactgggcgagttcctatgatgattgaaaatctacttcaagctattgtgtgtttcttggcttaaacctgattagttggtgctctaaaaagcaaagcgtggttggtcgatcgagcatggaatcagaatacagagccctggctcttgctacttcagaactcatatggatccaatccctcctcaatgaactctctatcaatgttcctcagtgtcccatcctttggtgtgacaaccttggagctggatctcttgcctcaaatccagtctaccatgcccgcacaaagcatatagagatagatctccatttcgtctgtgacaaagtgcttgaaaacaagctggatgtgcaatatgtcgacaccaattatcagcttgcagatgccctcacgaaacctctgcctgtaaatcaatttgtgtactttagggacaagttaacacttcagtgcccaagtgtaacttgaggggggggggggg

SEQ ID NO: 298699 - DNA, 5035 bp, Cannabis indica
aaatataggaataggaatgagaatgtagataggaataggaataggaataggaaataaaatttaaaatagactaaaaaaaaaaattgaattaaaaaattatttattttttttccttgttacattggaatggtcattcatttcttttaaaaatggaatagtcattctaccaaaatggtggaaagagtattccattggaatgccattccaatactttaaaatgcaaccaaacaaagaaatggaatgaaaattgtttcatttccattctattccatttcattacctccaaccaaacgctacctaagggtcttctcatcaagcaaccgacgaaaaagaatcttcaacttcgaaagtcttttttcgagttgcaaggtctttcttcaagttgtcctctagagccttagcattatcagcgactccttgaaggctggacacactactctctaagtcgctaatagcttcctctaagtcaactaccttgctcttcgcatcagtggttcgcttctccgcagctaaaagtttatcagcaagttagacaactttcttgtactcgttgtctatggtgtaagcttaatcgacacaagtctaaaagtaaaagaagtaagtcagagaactataaatgtaaggaagcaagctcaaaagaagacaaaaaatattatttaccttgaagatatcagtgaagcatctttgccaagatatcagtgaagcatctttgggctggcatgcagaggcttggtagtaaccaacttccttcaaggaatattctcaaccttagacccgatcaaggcatctccaccagagaggagccatgtgccttgtgcacgcagcctgtccaccaactccgagctactggggtttagattatcggtatcagcctccttcggagtaattttaattggagaagcaggagactcctcatcaacttcaatgacctttgacttccttttgttagaatcctggacaaggggagtagctttagtcacaactgttttgccccttttcctagactccttctttgcaggacaggaaaagttgcaaggatagcttgcacgacttccctaactgaaggattggcctccttcggtacgattgtcttcctctttgaataatctctcataccagcaaggaaactcatgttgtcttcatgaaggaaaagaaaagtgtttagtacaacagaaaaaatacgaaaagcaagataatatgttatgacggcaacaaatggagtataaatgacctactgattccccaactctctctggtacactactaccggagtgaacttctttctcgcttcgacattaagatattctctctgaatagtttggaacattttgaatggaatcctccccatcagagaaattctcatcttttgacattgctcaagactaatgatggtttcactttgtttgtcctcttcgtcatcttcaagaggtatcgtccaagagtcattagaaaagtgagcatccaaataaactcgttggcatgtcattatcaaaccaactttacagtgatttttagcggtaaacaaagtcctctcatctctctcccatgcttttatgtcattaagcatgacatttgctcttctcttcatgtcaatcaacgaagcaagtctcttactcgaaacgggtcccgcaaacgcgactcaagctccggtaattgacgaccgacgtccagagtcaatcatcaacagtcaaaaatagctgaaatgtattttttcactttttttgaatattttattatatcttatagtacctcctttcgtataaaaggagagctcctctagttcattttacacattcagaaaagtacccatacggtcaaagtatctctgtctagtttttctttctagaaattagtttattagttatttttcttgtaatcattcttgtgagaataaaaatttgaagtagacgtagctctattactatcacgacacagggagtgaactactataaattattgtgtctactctcaattttacttagttacttctaactttcatctcgtctatacatacgagcgagttgaccagttttcggtcaattatttttacatagcttcttgtttcagccgtttcttctaacaagactgacatgtaggagaaattatctagaattgtgaagaatatcattatgttacattatagttgttatataaaaatccaagatcttagcagtcaatggggttgatttctgtcacaagatactattcatctggcttaggaagttctgatgttttaaatgctctaatttatgttagtttacttattgcacataccaagtcctattggattatattctactttttttgttcttttttgataccacggtctcctccaccatatgtgaggatccctaatactgttgggagggggtcagtctaagacatatgacccttgtgacctcgtctctttcaaaaaaataaaataaaaaacattaatgttatattatagcccttaaggaatagaaaaagaattgcatgggatccatttttatattaaaagtaacagaaacatgaagagagttttctcccccttttgggggtttcccatattctttgtcatggaattgacataaacattgctaatcatattgataatattctctcataattcagacacttgaaggagtaagttttgccggaaatggaataactgctgctggattaaaagcttttgatggtattctgcaatcaaacatcatgttaaagactctagatctttctggaaaccctattggagatgctggggcaaaggtttggttattattttctattgcatatttggaagacctaagttttaccttgcattattgtgtgcttgagagtataattggaaaataagtaaaatcaaatgaactattgttgcatgcagtattctcaaccttaactaacttaatggtgtatgggttggtcttttccacagtgcctaagtgaaatactggtaaataatactgggatcactaaacttcagctgaacagtgccaacttgggggatgaggtagttatttctagctgaaaaaattaagctccgagttatgtcatccgctgtcaaagttacagatgttaaaagtgtagatcttctcacagagatgtatctaaagtggtgctcacataccatgcagggtgcaaaagctattgctgagatgttgaagaaaaattcaaccttacgttttcttgaactcaataacaatatgattgaattttccgtaagcagattggtctatatattctcatattagcttaattctatttattcaagttgaaggaattatgttaataaccttttactaattactggcagggatttgcaagtttggctggagctcttcttgagaataagacaatacgagatttacaacttaagtaagtggtctttacactttctctatctggtgatatagcatacagcccaagagccattgtttccttttctcttaatttatactattctgttatcagctggatatgttttctaatgattttccttttaaatatcggtgatttaatgttaagtggcaactatggtggtgccttgggggctaattctttgtctaaaggacttgaagggaacaagtctctaaaggtaatgttccatttcctcttacttttgtttccttgttttgtgatatctgggctttacatgtctcactttcttagtgtgtgcatgttcctgtacctggtgcattccaattgattaaatacaaccctaatttgagaatcataattattttatacctgtcaggagctgcatttgcatggaaattctattggagatgaaggcatacgcacattaattgatggtttaagctcacataaaggttttaatttcctatataaatgcatttctgactaagaaacagaaatagatgattttatgttgattatttgtatgcacttacatgcttattattacacaggtaaacttacccgtctagaaattggcaataactcaattagtgcaaaaggtgcttttcatgttgctgaatttattaagaagagcaagagcttgacaacgttgaacattagcatgaatgacataggcgatgaggtattgatatttacagtatgcaagtaactcatcttttgttgaccgttattttcattgattgaagttctgctgcacctatcctgtttcattaactactgtgtttttcttaatagtagggaaaataagagcaagtggtctttttgattgtttgctttcttcacaaatctatattatgcggaatgtacttgtttcttagtaacaaattttaccaaaatattcaggatgcgccttccctccatagtttactatttttgattttcagttcttgaattttcagggagctgaacgaattggagatgcattgaaggaaaaccggacagtaaaaagtttagacttggttagaagaactctagtctgtatatttagtttatgaaaatctcttccttattcatacctggaaacatagtaactgattttacaggcaggaaacaacattcatgtcaaaggagtcagcgtaatagcaaaagctttgaaagacaattctgtcattataaccgtatgttcttaatcactcaactcattattttttaatattaatattatggatccacgtaatgatactgtctctgacacagttggaacttggttataatcccattggtccagaaggtgcagaaagtttatgtgaagttcttaaatttcacggtaacatcaatatgctcaagcttggctggtgccaggtaaaatgacgtttttgaatttacacaaatcttgattctagaatttgtaccaggttctgaagtttacaaaacataaaaaatactatattgcagttaggagcaaaaggagcagaattcatcgctgatatgataagatacaatggtactttatccaatctggacctgaggggaaatggactaagagatgaggttccttgctagacaataccattttatctctcttaaaaatttatttaaaattgaattttaaactgcacatgtgataaaacttaacaaaagtcgacataccctgtatatatatatatatata

SEQ ID NO: 298700 - DNA, 2220 bp, Cannabis indica
ttaaatcgcaacaaaaaaatatataacaatctacatagaaatcaccggagtaaccattttaaaaacccaaactataaatttaaaaagaaaaaaaagtatatggagtaattctcctaaatttaattgtaataaatataatatttaaaaaaaacttaaaaatattaaataaatcatcataaataagaaaaaatattataaaaaacttaaaaaattctatataaatgaaaattaatttcttaataaaaaatctaattttttgataaaagatctttgaggagtaatttatgtaaagattaaatttatgtacaattgacaaaacaaatcctataaaatagttttttttaaaaaaaaaaaaataccataaaaattaatcaaacttaaagttatcaattaaagaaaacattaattaccttctctctatgtgtatatatatataatcattatgtgcatatactcatttctcactactctcacaaaattaaaccaaacccctcttataaccaaaaaaaaaaaaaatggagcaacataataattcttcaaaaactcatgaaagtaagattgagttaactcaatctgacctattactcatacaacattactacatccaaaaaggtcttctcttcaaaaaaccacaagatcaaattaccttctctcatcaatggatccaacgcttaaacagatctttcctcaaaacactcgatattttctttccactctcaggttgccttgtcatgacccaaaacgacgacgttcactccactaaatcattcttcattgactgtaataacggagccggcgcttcatttgaccacgtggcattagacggcgttacagtgtcagatattctcgacccgatttatatcccaaacgacgtcgtttactctttctttccattaaacgatgttcagaattaccaaggagtttcgaagccgttagttgccgttaaagtaacggaattagttgacggcgttttcattggtttaagtatgaatcactccgttgctgacggtactgtattttggcttttcttcaacacttggtctaaaatctctaacgacaacgagaacgacgtcgttttagccaacactcctcatctcgttttcgaccgcgaacagttttctaacggtaacgttttcccaattcgtgtaccgttcaatattctaaatcacataataatagaaactcccaattcagcattaaagcaaagaatgtttagtttttcccaacaaagcatagccaaactcaaagcaaaagccaacgctgaaatgaccgaattacccttcctaacaacaaccaagatttcatcccttcaagctgttatggctcacctatgggtttccataacccgaaaccgaaatctcaaacccgaacaggaagtgagctacagcatcgtaatgggtctgaggcaaagaatggagccaccattagcagaagggtattttgggaatgctgtagtgtttgggagagtggagaccacagctggaaagctggttgagaggaatggattgggctgggccgcattgcagatgaacattatgattgggtcctacacaacggagaaagtaagtgagtacttaaagagttgggccgaaagcccaaagttggcaacattcactgcagagcccgggtttggattaatgactggtagttcaccaaggtttaatgtttatgggaatgattttggttggggaaaaccagtgtgtgtaagaagtggtaaagcaactaagtatgatgggaagttgactgtttttccaggagttgaccatggaagcgttgactttgaggtttgtcttcgagctgagacacttgagtccatggcttacgatcaagagttcttggacactttatctatgtgaaagtttgttgatgagtttattattgtgatgtaaatcttgatgagtttgttttcatggaattaatgaaaaattctaacaattatatattgttattattttggaaagaagtcccaacacaatttaaacattaagatgaattaaaaaaataaaaaatttagtatgaagtgtaaataattcaatgattaaataaaggagaattatcttatattgtctttttattttttctttttaatttacggtttgggtttttgaagtagtttttccaatagtttctatatgggttattatactattatttgttgtgatttaaaatttctatgtagtatcagtaaaaatattgaaaaaattgttatattattttata

SEQ ID NO: 298701 - DNA, 633 bp, Cannabis indica
aaaatcacgtaatacgcctatggtagttagggtgttacagaatgagtggaataatgaaggccccaagtagtatgtcctaaaacctgatttaagagatatgactaattctcaaagagaaggcatgcaaaaccataaaatcctcccctaatgaggtgatatgcagaataacattaacacttggtgtgagggtaaacaactcatctaggatacagttagtgaaaggatcacgactgagttggtagccttaagaatagaaatggccaaggtggccaagagacataagggggcaagttagactcatatgaagatgatcgagagccttgtgccaagcaagtttaaaacacaaaattatccaaggagtttgagatgcttgaaatgacctaatacaatagggatgctgatcttagtgaccattagtcctagttcactaggttaatgtagtctaaatttggggccgtcacgtcttcgaatatgttggcatcagattgcctttgttaacaattagtgaagacgctgaatgtttttgtttctcactcaccttatgtgggtcgatttaatagtagggatgcaatcatgctgggattttatgccctaaataaaacccatttcaatctaatctgatttgttaccaat

SEQ ID NO: 298702 - DNA, 1681 bp, Cannabis indica
catgtgttctgatccatgcagatgtcggccggccaaggacgccttgtttgaggattggacaaccatgggtggctttcagtggggtctggccaacaagggtgttgtacccctaggctagctggcctatccctagaataagggttcttggctgaccactacactaggtcttggggtctcgctagccactatggcctggaaccctagctgacaaaggccaaggctccaagtgggtagctaatttttctccctcttttgacctcagctagggtcttgtgatggccttggaggcatatacaactgttaccttatgcgtggtttctcttggaaactctgtgtaacgctaggtagggagtccgttacagttaattatacagcttaggacttactacgtcttaataaatgtacttaagacagtacttggtcgttgatcgaccttatacattttgttttacctgaaaggtacccttgggtattgactaattgtttgtagctttgttaggttgctaacgtccccttatttcctaaatgcaggtagtactaggtgttgaataaggaagatgacaatctgtgtaggtctcttgcttatttagtagttatggctagaacaaaacagacctccgtagggcacctccatatgaccctcacatggccagggtggccacaacgggttaaattaagatgatggaggagaccgctcagccccctactgatgttgagccatagatggactaaggctctgataattttggtgtagaatttgatctagaggaggctgctccagtgagtaggaggaggtataggacttgttttgtccacccagattgtcccttgagttgctattgttggaattattttaccaggatctagatttactaataagtatgtttcattaacatcctaatatgaatttctaaaacaatgaaataaacacgtataaagtttaagaaaccttacattgattgcagcggaaaataatgactccttccgttcagatctctagcccttgattcctttttgagaaggatgattccatatctgagttgaagactctcttagaggagagatagagaatggtttatggcctggagattatgcttgtcaccaagaacacagagaatattgcacaagttgccttcatctccagactgcaatctaatcttgataactacaagcaaaagcttcaagaagctcttgatggccagtaggccattagggaggagtacaccgacctatcttctaaattcacttatgagttatagttgtgtaaccctaagctcatttggcgtacatgggcaatgaggcttttgtggagagaatgttggactgtagaaaggcactttttgagagccggacggaggtagatcaagtcgctgtctatctaaggggttatcatcaggaactcatggtaagggactggctgacccacctgtggagatggtggctagccatgatattgtcgggcaggccgaggagcatcctgatgatggggccggcctagactctgccgatcaagattctgcggctccaaatttaatttcattagtagtatttgatattatgtgtgtataacataacaaatatttatatgttccacatagcctatggctttttatgagtgatggccatttagtctaagaacattacttacatttatgttctatgtggtctgtggcgttttaga

SEQ ID NO: 298703 - DNA, 3585 bp, Cannabis indica
aaattaaaataatttataatataaaaaacagtgttaaaaccgtctatttcacgcacatataaaataaaataatcacgtactgtttgaatcttttttttgtgtgtgttaaatatttcttaatgcctggattagaaaaccatgcatgctaggattacaagtacactataacttcatatatgtatccttagaattgccaaggtaattcatattacatagtaactttaacaagttcatgttcatcaaagtaagggttttacagctgttgctttgctctctttcgcgctaggaaacgttctttagcggcagccacagcatcttccccccttttatgatgggtagacgactttggtggctctactgcccctgtcccgggatcagcacttgaattttctggcactgttgtgtttgaaattggcttcacatcaggggacttggaacttcttttttcaagagaagcttccctgtggtgctcctgctcgtgctccaccttctttgtcgacgattctggtgacaaccgacttttatctaatgtttcaccagccactccttcgtgtttgcctggattccttaactccacctgcttctctgatttctttttctcgagagcatcatttgcgccaaaagcaacattttttccaagattgaagtaaaaatcggtcaagtcagtcttcttggtaaccttaacacagcaagatgaataaaagttacatcaatacttgttctaaatataaaacaagtcaagagatgaactaaacgaatttcatttgacaccacatcatattaacacatttacctaccaagtgttgtatttccatttaatttctattctgtttaacatgataacagaccaaaagccgatttaaggaaacacctcgaatcaacccttgtcaacaataactcatacctccctttattatccactaaatggcaccaacttgatttctttttatgcataagtaaaaggcagggcaatggtttgtagaaagaaaatatacataatatcctggaattttttacttacatcatctttttcctctcgtagctgacggagtcgttcttcctccatccatttttcctgctcagctagcttcttcttataagcactagtgacaaatttatccttatcggcaaagaggtggtcctctttacttctctcttttgaaagttttctttcatatactatctcctgctctttctgtcgtagttctgctttcctaagaagattttgaatatattttggctgcaacagaaggttggtaaataagattcactaaggaatcataactggaatcaaattcaccatactctcatagttaccgagaaaaacaacctagaaaaagatgcagaagctaaatagaaaacactaaagaataaataatttaacaagaaaatttaatcacaataaatctgttaagaccctgtaacggttagtatgagatagcatatagagtgaaaaggggtctatgggtcattgtatgaaaggatagtgggtgagtaaattcggttattatgtataggagtgcagggagagagagatacggtagcttagtgaattgattctcaggcctctcgaatagcctagggaaacttgtgaccactttactatttctgattcaataacagctatctctatttcactacaatatttctacttaattcttgttgttttactgtgtttgtgttacagttctattggttgggttcatagcatgatccggatcctatcaaaatcccaggcacagtaattcattagattgcatttataatggctgctcttctaactgtctgtctggtaagtttaatactcatgcattcgaccaccggaacaaaatctaaattgtcatagtatcttcccaaaaacaccatgacagcatgctctaagacttagaatgtacatgatgtagaatacctttctctcttcgcggtcttgtgtctgaaccttggttgtttttgacttcatttcatcataaactccatcataatcgaatgccataggatcctcttcaagggctttcctcttctgctcctcaatcttcataacatagaaagaacaaaaaacaacaaaaatagccattattaaaccgtgaaaaaaagaaatatatatatcatctgcaaatcaaaaaaagctccaaacaaaaggtgctaagtacacactaacatccttgagagacttgtttttcgaagcatggcgagatatttctttctcaacatcattgtcatcatcatcaccaaaacctaaagcggcagggcgaggaggcctcgggggcggcttcttttgctgcggcctcaagttcaaaccgtacctgctcatatttcctgcacccccacctcacattagctaacctcctaaaatatctcactttagctaaataagacaatatacatttctaacaacggattaacagttgcattacaattctcctaaactaaagaaagcattcgttaattacagtccacttttgtttagcaaactaattgaattcataaaaacctgtaaaccaattatacatgtaatactctgaagaaaaaaaaaattaagggcaaaacgaaactttagcaagattcatatgaataaattgtttctaccaataatacaaattgtcctattcagggtcagagctatggaaggtctacttgcccccaatgagattttttctaattgttactttcacttacagggatcaaagctcagcactgaaatttgtaatttaaagacataaagaaattaaagagaaagagtatgatacctgatagtgatgaaccggcgaagtgaatcggccggaggacctaactagatcggcggtaaagtgagaaatttaagggtttctgtgataatttgagaaggaaataatgggtaattgatatttcagtactgaaagcacaagattaaaaatttaaaataaaaaatttagggtttgtgtgagaatttgggaaagaaagaacaggtaattagattggtgggtatcgagggagaaggagacaggagaagggaggacgcccctggctctgtaaaagagagttacttacagataataaccataccaaatatcaaaattgaaattttactataacaagaaaataaaataatatttaaataatatcaaaatgataaaaaagaaaaattctataatgcattctttaaaaggatacatctctatttatatttagtattggaaataatttttagtcaatttttttttataaattatagttatttaagacatcctgcaacattttaagaaattcgaaaaagtttaccacgtcaaaaattgcgttcaagcagtgtgttgcacgcgtgactattttattttatacgcgtgtaaaataaactgtttgaacactgcattctatattgtaaattattctgaatttcttaaaattttgtagaatatcttaaataactataacgtatatgaatatgaaaaaaagttagactaaattttttttttgaatggcgaaacaagtaaatggtgcatctgtacatttttttttaaagggatgcattctagaatcacccaataatatatataataaaaaattgggaaattctacaatgcacccccttaaaatagatacattgatgca

SEQ ID NO: 298704 - DNA, 1651 bp, Cannabis indica
aaaaaaaaaaaaaaaacaacatggcacatacaattttgacccttgaatttatacaaatccaaaatatatggtttagattttgagtaaaaaataatgtaaaatacagtgtgtaccgaacgggaccaatataactgatcgttggcaataatataaaagcagagtaggttttataagatcctattcaaatgttttcactctgtcgtcgtctcttctactataaatctatcttggataccaaaatataattatatatttgagtagtgggaacaactccattcactaaagatagaaaacacatattaaattaaatttcattatatacataaatgaagtagatcaatatcagagtgccacatacacatatataatcgaattaaagcaggttccaataccaaaggacttagtacgtactacttaaatactctgaaattaattgtttataatgtcatgatatgacgtaacaaatctaactactccattaaatttacgcaccgaattttgcctatatatatgttcatggccagggacatcttatatatatgcatcttaataatcgtataatttacaaatatggcgattatttgtgctatcaagatcaagagtaccaccttccgtttaatgctcatattatttctttctatctataatagtgctggtttaatagttgaagcaagaaacttattaccaggtattacatatttattatgcgatactgcttatatctttctgcatatgataacaaaatattattggccaagatatttttaaccgcgtatcttgcacatgtaaatagtagctgtgcgaaaacttgtttatcgttttaactcttaatattgaatcccacataattcaagtccaaaaaaaaaagtccaaaatcatcacaacgcacatcgtcgtataaaaataattatggttgtaatattagtacgagacaaaagcataaaaggaatgcaacaatataaaatttatttgagaggttatactatatatgttccattaaaatatatgtatatatggtaaccctagaaatactttctttatgatgcagtggggtcaaagcagaatttgaatcctcatccgcatccccatccgcatcggtcaccaccaccaccaccaaaaccagcaccagaaccacattacgcaccatatcttccaaaagaagtgtacccatcagaattactgccatcgagtcaatatatagcatccgcttgaggttgcacgcagttttacatgcataataatttctgtaaacatgtgtctatgaacatttattgctctacgtagttttctattagctagtattaaataattaatgcatgcatcttgtgcatgttacacaaaatattgtctatatgagtgttacgtgtgtgtgtgtgtgtgaagatagaacaagatattagactcaacaacaaatagagactagagagttaatcattgttagacgtcgtacgaaattaaataataaaatatatatactgatgtttactaaaaaaaattaattatagatattaattttaaaaatattaaaccattatattataatcttactactaaaaataaaacgaaattttaaattttattcttaattaacctacttaacagaaaaattaataatcaaaaatacatttttaccaatgtataaacatgttta

SEQ ID NO: 298705 - DNA, 5635 bp, Cannabis indica
tatactatcctactctacttaaaaaactaacatttaccacaatggctcatctacccctttatttactctcttctatcatattccactacttttggggtctaacattaccgacaacctaaatttcaccttattctcaaagtgaaggataatagcccccatatccattaacacttggaatatgccacttggtaaattcccaataattaattatccatcccctgtcgaaaacccaacaacaaacaacttctttgcaactaagtggaggtataaagaatacaaaccacagattggcaattgagttgcatgggaagctttgattcatgtgctagtttggtgtgctctcaccctctataaaagaatccacagaagaatttgaacataactatattcaataaccaagtgctcatagcagactgcctaacccaacaagaacttaataaaaaaaggaaaagaaggtatagtaaaaattaggtagaaattcaatcttgctcccttactccaataggttttctgtgaggaagaaatagagataaaatcattgttaaatccgtgtctaccatgtaataaacatgaaatccatgattgtctgatttcaaaattatagccttcccaacttctcatctgcctaagccgaataaattgtctgattgtattaaagaatctttgtcatcttcaatggaggaacttcaactcgtacagtgtgtccgacaatggaggtttcttccacacctcaatcggcatccccactgttgataggatgttatctgataagtcgttcttctcaggcaacgacggtatcaagtaaaagctttctgaagccatttatgctctccatctaacccctctttctcttgtgtatgctccagtacgggtgaggacgaatcagtaagcttttcctcaccaggctgtaataaatcatcttcaccattaaactcggttctttttacaaagaacattgttggttgagtattgtgattcaactcgtccacacccaccatttcttatggagaaaaaagatgatcaaaatgtcgatcgatgccattctgcaacttgtctctctcaggtacccgatgaacatgcaaatagtcttctatgtgactgactaattgatgccatgatggagaataacacaagatcgagtgctcttggaacaattattaaatgaaaattctactaatagtagcagaaaatagggagagctttgtattattagttgatattacaacaaatgagagttacatagcaagatcccttgacatttgagaggcctaggctctccatgatgcaattaataaattacagcaaaagagaggtagttcctagaacaatattaaatgcaaatgctactaatagtagcaacaaatagagaaagcattgtattttaatgatgttacaacaaaaaagaattatagagcaagtccctacacattcgagaggcctatactctccgtgatgcaattaaattgttgtgatatttctctttttactactttacccaatactatcattactaatactgttactcttccaaatagttctaccattagagttcttaaatctggtgacattactttttcaactgaattaactatctacaatgtcttatatgttcctgatttccaattcaatctttttagtgttccaagctatcttcttaccaccactaacaccattgtgttcactcataattcttgcatacttcagggtacacagaacaagaagattgggacagctaaacgcattggcaacttatattttctacttcaatctgccaatactcctaatcatagtaattcatcctattactctaataaatcatgtaacagtgtccactcatgacactctagacttggacatccttccttgtccacataaaagattatcaataaacaactacattttgagcatattgttttttcccatgttttatttgtcatttagctaaacaaaggagattcccatttaattctcaaaatcatattgtagaatcttgctttgatttaatccatcttgacatatggggtccctttcatgatcatagtattgagggttatagatattttttaaccattatggatgatcacagcagacatacttgggtttacatgttacaatccaaatttgatgtgcaacatttaattccagaattctataaccatgtctccacacaattctctaaaaatataaaagttgtaagatgtgataatgcaaaggacctcaatatcatatctttttatgttcaaaaaagtattcaagtgtataactcatgtgttaaaagacctcaatagaactcaattgttgagagaaaatattaacacatgttaaatgtggctcgcgccttggtttttcaatcttccatagccttggtttattggccacatcttataaacactgcagtctacttgatcaatcaaacacctactcccttattacagcttttaacaccatttcaattgttgtacaataaacctccagcagtgaccattaaagaaattttaattgtcttgcatatgctttattactagccactacaagacacaaattctctcctcgaggacatgcctgcatattcattagttatcccaatggcatgaaagcttacacacttctcgatctttccacaaataaaatatttcactctccagatgttgtgttttatgagcagatttttccacttaaggggtctttaaatttccaacaattggatgctttacttcctgcctcaatgtcacctgctcaaaccaccaaactctcggccatttctcattctccaacacaccctgtcactacttctaaaccaatacaactacttctaaaccaatacataaccctgctggccttatttataaactagtgatgtctcctactgcacctacaccagcaaaggcccttgctgaccctaaaccagcacaggcccctgctgcaataataccccctaaggtcattcagcatcctcaaattaccaaagcaggtcgacaaacatccacacatagtcaccttaaagactacatttgtcagtcttctactgctcaccccttggttaaatatctcaagtatgaaaggttgagcgtttctcttagaaatgctatattacatgcctacactgaattcgaaccaactacattcaaacaggcatcaaaattcactcaatggttaaaagccatggacatagaactctttgcccttaagaaaaataaaacctgctcagtagtctccataccacctggctgtcaaccaattggtaataagtgggtatataaaatcaaatacaatgaacattaaggtgaagttgatagatacaaggaatgcctagttgctaaagggtattcacaacaacatggcattgattgtgttgaaacctttgcccgtgttggctgttgcaaaattcaatactcttaaacttttcttagctttggttgctatcaacaactggacacttcaccaaatggacatagatattgtttttttacatgggaccttaatgaaaaggtatacgtgacgtgacacttcccaaaggatatgtacatgagggggagctacctccaaccctgtatgcctattacacaaaagtctttatggccttaagcaacctctcaacagcattattatacgcatatatgtttatatacactaaagactagtagttggaaagtaaaacgaatttgttgttactgcataactagataaaggtcaggtggcataaaagaatgacatcaattggccaagggatatagttttacttttcatttttatgtctacatatatttatctcgctatctagaaaataaagatgagaaaacaaagtagaatattaccagtgtcccaactttctgttattgtagccaattccattaatgtcattaaattggtggtagtcttcaaactcgaattcagaaagcttgttgagcctaccaagatctagaggaatgctaccttcaaatctattgtcagaaagaaacctagaatacgaaacaaaattgctccagtgagctataaattacagaacaaagtaaagatcaaagatacagtagataactcacaaatatttcagtgactgtatcatgcctatttcagcaggaattgttccattgaagttgttatccctcaaatcaaacagctctaattccctgagctccccaatttccttagggattgatccagaaaagtgattcttgctaagcacccttaaatgaaaacacaagaataaaataatttcattaatatttaaaatatattagcacctctaaaggtggcacaagaaacctaattagatattcatcaactaatagaatcaactccaaaaaatcaaaaggttgtaccttacatagatggagagacccaactaaattgaaaaagaaaatctaatagacccactctacaattaaggaacaataatgcagaaatggttttaactcaaaatattttatatcatacaaaatatttattttatatttttgttatacatattttatttttttagtacatttagtatttaaaagcacttttgtttattacatcaatgtgtacttctactaccttttatttattgccacaattcacatataattcttttgagggtttttttttgtttatttgttttactaaacggcaccgaaataaaaaaatttacgaattaatcattaattaaaatttcatagctattaaatacaaaataacattaaaaacatttttcaaatataatatacataaagtggatacagcttagaattaaaaataattattaattttaaaatacgggatcaagacatgcacactatacactaataatgtatataaatcccattaaaaatataatgtattagttactttgttaaaagatgtatagtaaaataattcaaatttatgatagagtgatagagtatactgttatttgaaaaataaaaataaaaagtttttctgaaaaataataagtgaagtcaagtgcaacacgggatagtccaaactaaaagatattgcataaataacattaaaattagaagttataatgaaaggaccaaaacattattaattatttgatgaaaaaaatatatatccagatcagagttggcaaagtaggataaaatgttatgctgtaataagaaaccaagaataatttcagcaaagaataatgatatttttgcatggataaatcagttactaaaagaaagactttaggggtaaaaccaaaccatcatgatattaatttttggagaaatgctaagggcactggtacggagcaccataagagatatcatatccttattgatgcaaataaatattaaatcttacaaccttatgcctaataggaatgctctaattttttgcttattagttggttattagcttgttctttagtctttaatttatcaatttacttcaataatgttgtgaggataaaagtaacctatatcaatatcatgacaatgaaaaatcctattttacacaagttttagcaataaatatataatgaagtcattgaaatccttacagagcggttaggttactaagttttgcaagttcaggtgccaaagtcccttccagtgcaagattactcatactcctacaattaataacgcgatgaagacaaaattaactaagagcagtaatcatcattagcttatgtatgtgtgtctct

SEQ ID NO: 298706 - DNA, 1890 bp, Cannabis indica
attaaaataaatttagtttttatttagggtataaaacacaacatacttccacttgcactgatataaaacaagaagtatattttaatttatccaatatatttctaatgtagttgatggaaatgtgagtgtaaaaagatattttaggttgtcttcagcatcaacctatattttctattacatctcccttatccataatatccccgataatgtggaatttcctatttatatgcttactttcttatgggacctggtttatttacaattgtcaattgcatctttgttatcacagtgtatattagaagttattccattcttgagatgatgccaaaatttatatagaactccttgtgtttgaataattctttagctgcctcaaaagcgattatatacttagtctttatggtagagcttgtgattctggatttgcatgtgtaatcacacctccacccccagagtaattaccatcccagatgtagactttctatttttagcacaagtttgaagatttgagctgttgtgccctaaagggtataaaatacctctcttataatctatgcatttagtttctagtcctctaaaagtatttcaagatttgttgattgttttctaatgttccagtcttgcgttaggtagaaatctagtcacaactaccactatatagtagatctctattctaatcgagtgtgcaacaaagtgtacataagactttttactgctaatgtgtaaggaattcttctcaaggtttctgccttttctgagtacttcggggaatacaccttagatagataaaatctgtgtcaaacaacctaaatccatagagaagtgctctagaaacttttcaaccaaggttgcttgcatgagttcaaggaatcttctttcagttttcatctagatttgaatgtacaatcattattttacatctgacaatatcatatcgaatgacttagacattatctacataaatcactaggagtaccacagttttgatttttcacaaggcttattaatcttttgtttgaaactataagtttcgatgatcacatcaaatctatgattctaggattaggaagttttcttaagtccatgaatgaacgtcaaatattccttaaaggaaagttgtttcacgtccatttgtcaaatctcataattgagaatgacaactatggacacaagtatatggatggttccgagtatggtgacttaattaagactttactcatagtccacaccttctttctgggtgtaacccctttgctacaagtccatctttgtgagttttgacttgtccatcaacacatcttatacttcttgtatatttgcttgcttcttatgattctaaagtcactcactgctactagaagattttagaacagagttaacgcatgaaattcatttccagtttcactacaaattttagttccttattaggacttactatttttacttgaagaataatggtttgtcatcactaggtttaccaaccaacaagttaatttcactgtccaaattataacaacttgggttccttaaagcccttccactatgatgtggtactgtaacagtctgatgagaaacaatagtaatattttcctctttgttttagtacggcttgcgttgattcaatatagagagagtgggatcatcatctacatgtgtagaagatgataaaatatctataggagtcaattttgaaagcttctattctactacaacttaagttgtacacaatttgagtgaaattccgtattttaatattccaaatttaattatttaattaagttattaattaaatgcagaattatgaaactggtactgaaaaccgttttttcgtagttacagaatacaactctataactccaaaagaaaccagaaaaacaaacagtgcataaa

SEQ ID NO: 298707 - DNA, 2991 bp, Cannabis indica
ttattatttaaaaaaatacaattttgaagcatacaaaaattattaatatgttcctctatggctctatctttgttaaataataaaactctatatttgtaaaatgagacacacacaataataatatgaactcgattttggtcaaactgttatagaaaaaaaaattgatccaaattgagtttgagtattataatattatattttacaaacacgtagagtctgaattatcatttaacaaaatagaaaaataaattaataagttttacgaaaatacaaaattcaaaataatatttaaccgtataatttagttcacgataattattattattaattgtggctataattatcctacaattttttggtgtatcatgtgtgtattgtgttatggtgtcatcgatcaagccctaccataccatgtcgctctcctatatacctacacttatttaagggctcatagctttcttcctcctactacttgtactaggacttaaagccttggcaacaaagagaagagactccatcacatttttgacttgttgttaattaaatactcactttatttatttatttctttcttatgaaatttccaaatccttaattaacaatttaagggtcagataatatgagtttacatacttccaaaccatgataatgatagaagaacaaacaattcctcctcttctatatttcttttggagactttttctttataatatatattatatagatatatttatatgtatattacttttatattttaatataaagggaggggttggtaaactttcaatgcatgctgcaaataaacaaataaaatatagttaaggagtaatacaatacaatgcatacaccatgttactatcatatacattacttgaaaatcaaataagatttactagctaaataacaactcatatcgtataattagatattagaattatgatataagaggtgacattttctagcatgtataaatcttttacatatatatatatttttaaaaaatatatatattatgattttgagatttctaaaattatgattgagagattgagattcaatcaaccctgccattgatttggtagacaaaaatacatatacaggtagaggacaactttttccctacattacccattttaatatttgagagttggctttaaaatcagaaccgaaaatataattcgttttccttacaaacactacaagaataattggtatcactaatggcactattactacaagaatattgaacaataaaaattattttgaacacttagaaagagaaaaaaatattaagttattagtgttttatagaaaaaaaaataattattattattgtaaaaaaaatgtcacattctattccaatgtcaaccaaacacggtaatgttgattttttaggtttatcattcccttcaccactctccaagcaatgttaaatctattcccatgaaatgaaacctgcataccaaacaacggcccctaagggtttgtaggttgaaaaagtctactggtgggtaaaataaatttaaatattgactttgggccgatttggggagatccactgttggggacatctgttgtccgtacacggaggtacgattgatggtgacagctaggaatgcacacagggcggggaactggcgaggagtgctccccatccccgttaaggattttaattctcatccccgcttattccccatcagggatggggcggggacaaggcgataaatttcctaatagaaaaataaataataaaatttttaatatacaaaaatattaaactacataaaaattaaaatattacacattaattattattcaataaactaattattatgcaaaacacaacttaaaattcataaaaaagatactaatatactaaaaaaatgtaaacataaattataaattataaaatattactagaaatataagataatactaaacggatccccgtcccgtttaatatttggggacaaaaaataattcccgtccctgcctcgttccccatttagacggagaatcatcgccctgttaggggcgggtccctgcgggctccattcttgtgggaaaaatgtgcatccctagtgagagctagggcatgagtcatcagtatgttgtgagaatgtcacagtagtgggtgttggcccaaaaaggtgatctgcttgttgtgtgtctttccaaggcctgacacatgcatgggacaaaccgctagattcttcaagattgtaaaaatattatataaactatataaaaaaaatatcaatagaaaaagaactaatagaagaaaaaatattattaaaaaatagaggaaagaaagaaaaactttttatatagtttattgcggttaaactctcttaactatcactctacttgcacttaattctataaggttaaattttgacggtaattggtaaaaccctccaaactactgtatgttagaaatcatcacctcctctaaacttctaaaaatttctagttacatatttgttaattgatttaagacaacttattgtaattgccaaagattagtagaaaagtctagataaatgtaagaaatgactagaaaataattttctagaaatttttagaaacaatagtcactagatatttctagtttttgggtcaagcctaatactagaattctctagtaaattgaagtggcttcatcaaccaaccatgaggcagaataaatagacttttggtctcatggatgtgggtgcacaaaaaataagtgaagtcttagtgtgtgctaagttatctatacccaagtgtgtgaattcttaataagtgtctaaagacaaaatgtcccaaaagtatgagttatacacaagtgtgtagtaaaggtgtctagtaataaaataaaaaagtaagtgtttggtgtatagtggtctagtaaaaagtgttcaagtcttggtgtaattacttttacaataataaagtaattatattttcacgtgttgtggtgtccaacaagtggtatcagagccggatcga

SEQ ID NO: 298708 - DNA, 1587 bp, Cannabis indica
atttattgtgatttcttctttatgaaaatatttgttgtctccaaataattaaatcataaatgtggtttgattttatttggcttaataaaataaattacaccaaataacaaataagatttgaccaaatgaattgttaattagggataatgtagttgaaagttgcccctttgaatacattaatattgcataattatatatatttagagagtaaacaaaaaatgacaatataaaatcaaaataaaatataagtgactatattaattaattaattaattaattatatgtagatgaataatataggtggttaaagtgagtacttttgatcaagtttgacggctgagatggttgcttcaaatgaggagcaaagttttgacaaggaatatttatatatatgtatttgtattggtattgactttaaatattatataacatatattacaacacataaatacacaaatatattataaataaatatacaatataagccacctttgccttatcttgtttgaaattttgtatagacattattgctagttattattatattattatttaatataaatatacataattttattaaggaactatatataaaacttgtcacatacgtaccaatttccttctatatattgttattttactttccattatacaactgaaaaaaacaagaatactatataaaatggttgctttgctttgtaagctgaaatttgttacaagtttttatgtatttatttatttattgctattgtccttgaaaacccataattaaaggaatatatttgtataaatagaaacatttggttggcaagaaagttagtttatatgaaaaaagaagtccaaattaagaaaaacactacacttgtttctttgctctattctatagtaggaatgtgaccatgatatgagtatgatagagtgatttctttatatatgaattatattattgtgccatacatttttctagaaaatatgtaaaattattttatttattatataaaaaatatttacaaaatacacacctaaaattataattagatcaagtgatcaacaccttcatatattctttacaagactttttgatcaatataatatttagtaaatatagattttcttttaaattattttatgaagctataaaacttgttattaaatgattacattgaaaaatactatgaacttattttatctaattaatgatggtaactccacatattaacctctatttactttcttattataactctaaacttaatttaaagttttttctcaaatacccttagcacaaaataaggctatctctttctatatattcttctcttttactattttctagagtgcattactttaaattaaaatataagaaaattccataatttttcaccaataaaaatgtgtatgtactatacatttagccacttattgtggtggggctcatgctcatcataatctattcatctcaataaatgaaattaaatacctttcaaaaaaaatgaaattaaatttttgaacttattaaaattgggttacccataaaattattgacttagtctcacccttgggaaaaaaaaaaacttcaataatgtt

SEQ ID NO: 298709 - DNA, 1289 bp, Cannabis indica
tttttttttttttacattttaacattttacatgcaaagtggattaggtgtacaaagcaataggcctatgaaattctgattaaacttatctgtcaatttaccgtagcaagaaaatgcttctgttttaatgaaatgacacatgctctcctacgttaaattcaaagcgatgactctttctttgagtaaatatataatacctattttcttatatattaaacttactttcaatgtgtaaataatataagaagagaaagttaaaaaacagagcataaaggatatatagtgtttggtccacttgaggaagtaaagaataataatacactaaaatggttggaagaaataaaaggaaaaaaaaaggtacctgaaaatgatggcaagaatgaaagtgaaagctggcacaagattactaatggctgaagcaagagtgggagaactgtaattgatgcctgtaaatcccattatctgagatgaagacctattccattaaattaaattacccatcatcaataatagtaataataattgaaaaacaatttgatgggttaattttaattgattagaaaaataggaaaagaaaaaaactgtagtgtacccaattaagccaagaagaagaattttcatcattatggggaaagtgagtgggggtagtactcttgatctgtaaacaaattaatttaatgatgaagattgaattagtattaagtaaacaattaataatgaaattagttagttaaattagttattaccttgtggaaatgaaaggagcaggaagaagaacaagagcagctacagcataagcataaacgacaaaaacatggtaactcattcctcgtaaagttgcagctttgaacagagtgtttagtccaacgttaatgcattccattgttaccatagccgagaacggcaacacatcccggtaacagtatctttcacccaccatctttctatctctctctctctgccctctcctctcctctcctctgttctgttcacttgtataagaaacagagcttgagagagagagagagttgtctgtataaatatttatataaaaaactaagcctataactatatggtaaacaataatggaaatttgtaaaccccagggttattttggtaaatttatgtttttttttatttttttttattttttataattgtgtagtttatatatatttagaatcttttatacatttttagaaaattagaaataatttattaactatttacttaatacatgtataagaaaaaataaattttatttttaatattataaattatttaattttt

SEQ ID NO: 298710 - DNA, 1515 bp, Cannabis indica
ttttttttttttttgtattgaatagattataaaattatgaaggaaaatccagaaaataagatctgtgaaaaaaattgtattttgcagttatgaaaaaggtaaaataaatcatataattttcactatgggaaaagaaagagaggcaatttaaatttactgtcccttggagtgttttgctgtacaataatttcatgaataagggcccaaaaatgatttgtaatctttattgtcgtggtaaattgcagcaacaacagtagatgagtcagagttaataaagataagagtagatgagtctgaactattctcctcaaaagctgatcgtaagtaacaaagcaaaagagtacaccataacaattaatatacaacattggttgataatatttaaaaatgtgtattgacatctattatatatagttaatgataaagctggaatttaaaatttagatttattgatgtgtgaaatttgatatagaaattagtacactaatagcaaattaacttttgtgaaatttactgaaatatagtactagattactattatagtaaatcaattaagactagctcaagtgacagtaagtggttggttaatttggtggtgagtctgtgggggttactgggatcgaatcccatggaaagctgagctcattaaaggacgaaaggttactagttactagttgaaatgtggttactagattaataatactatgttagtaactattgggctgttaattggtaacgggtttctatgatgttatttttatattctgaaaaaaaaaaaaaatcaaattacaatcaaaaactgatttttaggttttgattattttatgaaattgggtttcacaaaatgaaaagatcaattaaccatttgcaattcataaaattaaccatgtttattcgaccttgactgttggattaatctttttttttaatagaaggagataactttattaacttagaatggccaaatcagccaaaacagtgtccttggaaacagaacttaaattggaaactgaaaaattacaatctgaccataaacaagtattgtgaacaaacaatgagcgacattattaacagatcgtttgacaaaacaaaaatcaacattatgaaagactttagtaaaactttacaatcttcaattaacaaaccaaaaattgaaggcaaagaaacagcggcctcggcaacagttggttgaacatcaccaaacttgagttcagagaaggattttattaaaagaccattattctgagcaatacaaacaactaggggtgttcatccgattcaatctgcactttttgggtcaaacaacatccaatccgcactaagtgcggatttcatattttggatccaatccgatccgcataacagtttaaatccaatccaatccacaatagtgcggattggatcagttatttttgatcggttatttttttaataataaattatttaatatttcaaaaaaaaaaattaaaaaagactattgtttcttgatctctaataataatctatttccatctc

SEQ ID NO: 298711 - DNA, 2780 bp, Cannabis indica
ttttggacaaggagcgtgcctaggcactcaaagatgaagtcgaacgactgatggctaatgacttaataacagaagcattccaccctcagtgagtgtccaatccagtgttggtacctaagcccaacacgaagtggagagtttacatcgacttcaccaacctgaacaaagcttgtccaaaggactagttcccactgcccaaaattaaccagctggtggatgccacgcttggccatgaagtcctaagttttatggatgcatatgcaggttacaatcagataaagatgtatccacctgatcaggagcatactagcttcatgacagacctagtcctatacatctacaaagtcatgccccttgggctaaaaaacagaggggccacttatcaaaggctggtgaacattacgttcacagatctcattggcggcaacataaaggtgtatgcggacgacatgcttgtcaagtccaaaaaggcttaggggtatgtggaggacttaggcgagtgcttcaaaatccttttgtagctacaacatgaaactcaatgccctcaaatgctcttttggcgtaagctcaggaacattccttggcttcatagtcaacgtaaggggaataaaagaaaatccagaaaagatccaagcccttttggatatgaaatttccaacaactattaagaaagtagaaagcctaactggacgctttgctgcactaagcagatttgtgtccaagtctaccgaaaaatgtatacccgtcttcaacattcttagaggcaacaaaaaatttgagtggacagaggaatatgaaaatgcattccagaagctgaagaagcaattggcccaaccgccggtgttgtctaaacctatagaaaatgaagagcttggtctgtacctagcagtcacagagcacgctgttagtgctgtcctcacaagagaagaagacggtgtacaacaccttatatacaacatcagtaaaaggctagtcaacgtagaaaatcgatacccactcatggagaagttgacctacagcttgctcttggcttccagaaagttgaggccatacttccaggtacacccataaaggtgtacactaatcaaccactacgataggttttgtagaaaccagaagcgtcaggctgactagtcaaatgggccataaagcttggctagttagagatcacatattaagtgttacaaaaatcgataaaagttgttacaaaaattttatagtatggcgattattaaaaaatccaaaattatcattagatcgataagaaacaatagatactttgtaagcacaacactattagagagttattctcaacgggagctattagaatcgatcatgtatgcactaatgataatttagcagatcatttgatgaaagtactagctagagagaaggtccataaaatttcaaaaggaataagactaattcccttagaatgatgagtcacctgtgatggtaacctaacctaaagactggagatcccaataattaggttcaccggatagtaaaaagttatgcagttatatgtgttgatcatgatatatttatatgagaagcatgaagttctgaagagagataagaggacgagttactaaaaactcttaatgagatctatactctatgtggagtagagtaccaagctacaggagtactcttgatatactaacccatgtgaatgtagaagtggggtcgcttcttatggaattgggagccaaaatttctagagagttcattatacaatgatagacgtgcatggccattaaagcacagactttttaaatacacctctgaaagattggtgtgtggtagggtgttagagatagagttcaagactttgagtcactctagtaaaatctgaatcgtattcactatgcaaatattaaaatctaaagatttctttgtttaagcacagtcttatagttttctaatattgcttaagaaaaatatttttaaaaattcaagtgggggattgttagaacttttgagtgaattatacaaaaataagagaagtgaagtttgtgatattacaaagagtacctaatgggatagaaacacttactcataggcgtatataaggtggaaatgtgagatttgtctttcggccctaagggtcacccacttatgtgcacatgggtgaagactcacacaccagaccattgtcatccatccaaccgtgttgtgccgagctgagctaagtcgtgcacgcttcaggcaaagtcgtaaaacgtcttaaagaaagcaacataatctatgactcggcaaaaattatcattcagaaaattcgctcctattttattttccgacataacatttactttttcacctgaaaagaaattcctacagagattaccttttaaggaagcaaaaaatactcatctatttgctttggaatcccaataatactaaattaacaagttaattggattcctataatcctaatctacttgagaatgaactcataatctgcttatttccatttgttggcctcatgtttatcttcaaatacttgatagggaaggagtgttagaattatttatttgtggactaatataataccataatcacaatcattaactatgtgcccaatatttattcactaccataatgggatggttaataattaataaatgtattagaggcacatgggagcaccctaaaactataattggcccattaaattatagtccaccactaattatactcattaccccaataagcctaatataaccccttagggttaagtgttgtatataaaaaagggtaatatgtgtttagtatga

SEQ ID NO: 298712 - DNA, 2016 bp, Cannabis indica
tagtagtagtctctctctctctctctctctctctctctctctctctctctctctgcattttacaatgtaattaggactgaacacttgtaccaggtttgacctggattcgaccaactcgcatagacctaacccaacacaaaaattaaaaaacctgttaagtgcgaacgggtcgagttcaacccagtagacctttcgggcgggttttgtatttgatttttaggtgatggggtttcgggttggattcaggcctgcgcgcaaactcggtgaaattatatatatagatatatattacattatatatgtagtatagactatggattatagattttgaatttttgttcacattttattttgaaactttttagtttttactatcataaatataaagtttaatgaatgacttatttggtttcggattgccttttgtactttggatttggaattaatattttatttttctctaaagaatatagactaaggtgttatgtgttcaatttcataaataaataaaacggaaaaaaaataagcatataaaatttgggttaagaaaagaagagttgatcgggttgaccaggtcaacctgcgaatttgcaaactcgtaacgggtgggatactattttttaaacacgtcaacttgaaattcggcaaacctgcctaactttcaactctagttgtaattatagcgcacattctatttgtttttcaaaaattctaaatcaatcgtcgaaaaacaatgtttaaaataatcaattttaggggttaacaaaaatgatatgcataagtgcattgatacttgaagtacatttttgacattatccattattcaaaatttctaaaaattggtaaattgtatcttataattataatatagacataaaattgttcaaggtataatttcttcaaacacaaaaagtgaagatttgtttcaaatagtacccctagtataaaacttttcctagctagtaattagtatgaagaaaagaaatcccaaaaatgtaactaaatagcttaaaatgtgaattgagaaactcttgtgtaatagcataaccattaaccactatgtataagtataacttccactatgtgtgattagtagcataggaagaagagtaagtaaaggccattgagctccacaccagtcagtcaacgtttgacttacaaatctaaatgagtagtgcgccaaccaagcagagaagcactagttctactaccactacttacttagttgagaagatgaggttatttaatcccattctcactttccactctcttccttttctttcttttctcctttcaccatctccatctttcctactacatagccatatatcctctccacttcctcattttctctatagtggtctgcaaaccaaataaataaacaaaaatttatttttattttgtgattgaaaaattagaaaataaaagtgttctcaaacgacatttatatattttatccactaaaatttgagtttagcgggtgagttgccaaaaattctttttattttattggttttaaggtaaaagtttgcaaaaatataatgtttttcaaagaagttattgtatggattttttttttttttggaaatcaaaagtaaaaaaatatgagaaaacagtataattacctggttacgttacccccttagattaccttaatctattttccacatatttttaaactttctctaaaattttccctataaaataattttttgaatgaaaaaaacatatttttgaaaagattgaataaaaaccctcaaaaattgaaatttcctcaaataagtgtcaaaaataaaaattgaaaaaagaaactgaaacacaaagaacatttgttgttaggcttagttgctgggcctaaacttggaatccggataaattgtgggcttgtcgaggtccatcgtagtaaatgtagtggtttgcgtctctcagtttcatgtaagtagactcacggaaatttacattttatactaacttttattatttttttacaaaaatactgccaggtggtatttttta

SEQ ID NO: 298713 - DNA, 2186 bp, Cannabis indica
ttttttttattattttattgtaacttaatttgaccttcttccttataaaggagagctcccttagctcattttaagcattccttattctttctaaatggtcaaagtttttctctctctaaaaattgtgaagtgaagctagacttagtcattttttcttgagttctcttgtaaggcaattatctattgtgataataaaatctctaagtagacgtgactccattaccatgacaacatgaggagtaaactactgtaactacggtgttttttttttttttttgtttcatacatttgttgatcgctacctcttatcaaacggtatgcagttgatcacttttcagcgtcagcattttgctactttcattgagagcaccgctcgagtctcgtggttgcctttaaatttttttcatttgactacgcacttcattctaaaaaggaattcataagtacgagaacctaaggacttacaaaagaatagtgacaacgagatccactagtgtggactgagatgtacagttggtgccacctcaagaggtggatcgagagcatgtggctgaagaccactgcctaggccgccaacaaaggtcagtaacagcacacatggttctgtgccaccaggtgagcctcatgtgtacctcaatgagagtctgtgggcctcaaagaggaacacataaagcgtgaggaggatcctgcgctcaaccccgaggttaagcaactaaaggagtctgttgctaacttgcaacaaaatttgtgagagtcgatgaacatgcagtgagaggagttataacactggttccaagagcaacggactagcattgatgctcaaaaaatttcctagaggaagatgagggccaatctggctcaatcgatacgcgaggcgtatcgagctattattaggacggtactagggagagtgtcgtccacttgaggaaggattccacattttccaactttccatgtagaccaacgcttagggtaaaacctgaatgcatggaatgttgcggctactaatctcggtagcacttccactgctcctcgagcagtttgcactaatgtccctactggggaagcaaacccttggcaaaattccaaaaggcctcaaatcagaaatgagtgatcccctattaaggaagaaaaccctcgacgagagtctgacagtcctcagaccaaaagtgaacgacctcttaattgggaagcaaaccattaatgagagtccaataggactcaaaataggggtgagcgaccttctatgggccctctacctctagtggagcaagccaatcaggaccctactaggagtaatctgaaccgtagggaaactatatcaccatatagagctatctctcactggtcttcttattccaggccacccgatgaccttactaagggagagggacctacaatagaactggtaaggtccatttagaggttgagcaatgataatggttggttcaaagccttgagcttaaggaccaatgaaccatttcacacccaaaagtatttctgggttaatctaggtgctttacgtcggtacttttcccgagtgcccaacgagatgcaataggagtactttccacatgtgtatggggaagtggtgaacctgagtaatcagtttaactctgtccacacttacgaccctgaaaaaaattgtttcaaaggaaatagtctctatagtataacgagtaacatcgctagacgtggtcactcgagagatgactctgtcatcattcatgagaaatcccccaggcttccacctaggttgcttgggcaagaaatggccaatagggccaatgtcttcaacttccttaagaaaaagaaggacttgaggaacgatctcaatcgaaagtggttggtggaagcgagagcttctagcaatgacactgttatacaggtagctaaagctccaactagtacacagaccaccaaacgcagagtaggtagggtcaaatttgttactttggctactttggttagagaaatggaaaaaccaatgccgatggagcatgagttggatagagaccgatgcttgtcactctctggtcaagtcaaaaccttgaaattccctctaagcagtgtggcacctgtacacaggtaaatgtttggttttatgccctaaataaaacttatttcaatataatcagatttacttattaatatagataagaaataacatttaatgttgcatggtt

SEQ ID NO: 298714 - DNA, 3029 bp, Cannabis indica
aaagtatatctcttgaagtccattaagtattctcaaaacttgtttgttgtatcctaatgagctaaatttaacacaaaatcttacatcattaattgaataagatggtcttataattggtagtagtgttttgaaaaacacatagcatgaactccttcatgtccaatgggctttttagaaacgagcccacagggtcatgggtttctgataaatagtgggcccatatataaagcccaagcccaagaagtgatacgagtatatatagagtggttaggaacccttgttgttcttcgtcgcctgctcaattctctcagtagggtttaccaaaactacaaccctcacaggttcgataccctaatctctctctatttttcatcttacatggtttgtagttagggttatgcttcttcatttccagtttttcaatgaaaactatacaatttttttttttattaactacatacaattagggttttgcatcagatttattggtatatatatatgtatgtttgcttagtcttctttgattctctaaccctacctcactcttactcctgccgccgctcccattttttctctttctcactcgcacactcacagatctctctctctcgtggtcccttgtaacctctgtatgctcagttgtttatcacttttgatgtttacagtttaataacatcattttccattattatttacttttgtgtttgtgatttgtaaagatatttgtgttctgggatttttttgctttgtcaaaaagtttaaggcttgtatatatttatatcaaaatgatttgaaaaaaagagcatttatctatgattttcgtccgatttgaaatgtttttggttatgttaaaaattttaagtatggttgttgcgtgtcagcattctttgtttgggtttcagtccctttttttgctatcatgtaatatattgaaattgatattgtgcatttaacaattttcatgtcattttgtgcacccctctcctataatttttaattattatttatatgttttgttgattaggaaatatgaagtttaattttatgtctatgtttcagatacaatggcggttcccctactcaccaagaagattgtgaagaagcgcgtcaagcagttcaagaaaccccaatgggacaggaagatatccgtcaaggtttgtagttcaccaattattcctcatttgtaggttttattatgacttaatcagtatgcaagtatttgtaggtacaagtgtttatcttctcatctattttgtaaagacaatgttgatagctttgtttattttaacattttcctgttctggttttcccttttgattttagttaatgtgtgttcgttcattgtgatatgttttcccgagtttttgatgtgtatttacttatgtgtatgtggtgttaatgttgcacagaccaactggagaaggccaaagggtattgattcacgtgtgaggaggaagttcaagggtgttactttgatgccaaacattggttacggcacagacaagaagacccgacactaccttcccaatggattcaagaaattcgttgtgcacaacaccaaggagcttgaacttctgatgatgcacaacaggtacacatttgcctttcactttcactgatattgttgtgtggttgatctctatgaaaagttttactaaccctttatcatttacattctttcaggacatactgtgctgagattgctcacaatatctcaacccgtaagcgtaaggagattgtggagcgagctgcccagttggacattgttgttaccaacaagttggctaggttgcgcagccaggaggatgaatgagcatttattatgcttttatttttgtttatttactttgtgagatttactcttaggcacttttggttgaaaggtactttgtttttaattttgcagtttcttttggatgattaaatgttctctagaatctcagactcttgtattgcttgctcaaataccttaaaagtaatattttcttttttgccattttcaatatgatttttgaagcaaggattgttttgatgatattaaacgcccaatatgatagagggttctgaaattttaaaatacttttcagctaaaattcaccaagtaaaattcttacatcaaacacccgacccaagagtctttttaaccataaattaccttatttcaagtctgttatcttagtacactgtaattttcgtttagtgttgtttgttttgtgtcgtgttcacagatttgagatgtttttttgtagcaaataactatacgtttaaagcacattgcatcatcaactcatataaactaaagaaaatcaacactaataattcatctctagtaatgatattaatcattatatatatattctatgttgtgtctggtgtgattgtcttaatttccaagttctaacttgttatttccaagttcaagacttaatatatcatcttatttgcaaataatgactcgtattgctaacaggaaatagatgtgtttagagaatttctattatatataaaaacaaaaaaaatctacaaagtatacacgtacaatcaatcgtctaagaagttgaacatagttgcaaaaacgttacagaactcataaatctcttaacaggctattattgactaaataaaatggtaacaatgagaataaccaaatttctttgggcaatatttagatagtttcctttcaaaaagataaaaaaacacacaaaagaggacctcgttgttcctaaccagctaatcaatctggaaaagcctccaaaacgcaccccttggcttggatactcatgcaggaaaggaatacctaaaggaagctcatctcatatatgagaatccaccataatcggaagctctcactcaatggtaagctaaagggaaggctctccacttaccccaaaggagaaaattacactctataccttttttatattgtccttttttatttttaccatcttttttaaaatctatcatttttacctcttttttaaatattgtaccaattttgcccttgtcacttcaagatactctccatgtga

SEQ ID NO: 298715 - DNA, 7975 bp, Cannabis indica
cttagttatatagtagtgatatacctgtaaacttttactaagacagtatgctgcatttgtttcttctttttgcaagtaaaccttacggctgttttttgtttcatgaagtatgtgagacctggtgcagcaccaatacctggagcaactacttctggtcctggaggagtgccaggtcaagttcgtcctcctatcagtatgggtcctatgcctggtcggggaagaggtgattggcgaccaatgggattgaaaactggtactcctatgcagaaaaattttcattctgggtttggagggccaaattggggtggcaatacggcaggaagaggatttagtggtggtggaggactagaattcacgcttccttcacacaagtaaatttattttctgtattgctcattaacttccattgattgatagtgccattagttatcataaacttaaccaggtattctagcatagctatgtaagtgtcatgctgaatggcctggtgaacttgttggctgggaaattcaattgattgggttaacttgtgtggcagtgttggctgtcactgtatgacttgttggctgggaaattcaattgattgggttaacttctgtggcagtgttggctgtcactgtattttatgcccatgcgggtctatttgttcctttgttgacataattaacttgcatatatcgatgctcaatgaaagtgatggaagaatccatttaacctcataacttattagatttgcgactgtagaggctatgaaactatctgatgcttgtttgcttgccaaggttgtagatatttttgtttgcttgaggcttgtatttgtttagatgttaaaaatttataaccgttctgtgtatttacttcaaacctcttgcatatgcaagatgaggtacatgagtttttatttgctggaggcttgtgtatgtttagatatctttttgtgctttaaaaccgtacattttaattattagtggcaagatgaggtattttatggagatattatttattaaaagttgctatggtgctatcagaaaccaaggcatgtatttttgtaatccatcgtactttggtaccactgaagcaatagaaagggagggaacattatgctttgtagtagggtccctttgaactctttcgtgtgtcactgtcctcttttattttagtaatttagtttcatgtgcaaagtctaggatttataagatggctgtttctcagggttacttatgctatctgttgacgttgcaggactatatttgaggttgacatcgatagttttgaggagaagccatggaaatatcccagtgttgatatatctgactttttcaacttcggcttaaatgaggatacctggaaagattattgcaaacagctggtaaattttatcaattatgaatggtgtcttagtacgtatttgaggattcagaagagtcctgaactttatttttgcaggagcaactccgcttggagtctacaatgcaaagcaaaattcgtgtttatgaaagtgggcgtgcagagcaggtaatgaagggctcgttgaccaatggccttttatctcctttatcgagtcgagcataaatgcttgttttgtacccatacaaagcttataagtatattctttaaatgcttttctcaggagtatgatcctgatctgcctccagaattagcagctgcagcaggtattcatgaagttccttcttctgataatgcaaattcgggaaagttagggcaaggtgatttaccaaaagggtctgctcgtgtacgtccaccattagtatgtccttatactcattctatttgaagtctttgtttactatcttaaattcttaccttctgtttgttgttaactattattcaattaatgtcttgcaaattcttgagtggtccacactaaatatacatgtggcatttttttctctccctgggttagattccgaactcaatagtttaattgttttctatcagccaactggtagggcaatacaggtggaaaatggttatggggagcgtcttccctctattgatactcgaccagcccgaaaccgtgattcagatgcaatcattgaggtacttgaaccaataattccctaatcctatctctacatttgattattaagtttatgatgattgcttcatactaattagtatctgcttttggggtaatagattgtcttgcagggctctttagatgatgatgtctctgctggaaatgatatcccaaacagatccgacaatgatacaagcaaagaggattttggaggtgtagctgacaccgcaccagtgaaccctgagtgtagtgacaattttccccagacttacaatgatcgaaagagagagcctgttgaaccaaggatgccacaacttggttctgtttctgatgatatacctgatagaaatggagttttacccttccctccaggaccaccggtccgtaatgtcgcttctagtgctaatattcgagaatatcccgatgatgacccttctgctggctatgaggaaaggtatacattgctgaattggtgagtatatcttaacaataatttctagaactttcccctggtatctttttatgttttctcttctatttttattattatttatgaatatagactgatactgatatgcaatatattaatatgaattacgtggaaagtttacatccatcttcgttgcaccatttaactctcctttaaacacaggcgaatacatggaagaacacatgacagatctcctcgtaagaccttgggtggaagtggaagagataaaaagtaccttaataatgatccagaagagtcggttgagagcatggacagtaaaaatagccttccgttgtcgtctcctgccgcagttagggatgcgcaagaatcaagttttgagcaaagagatgttgatgatcaagatgagcttgttctggctgatggaagccctggaacggaaaaggatgagacaacctcaaatgtattagccacaactgatactcctgaagatggatcaacaaagaaacagacaataagttctcgatctgaacagccttttgtccaagaactagatgacggggaagactcgaaggctgcaagaagtagcgacaacagcagagcaagatcgggaagcagcagagattatcaaaagaggcgggatggggttgaggaggaagttatgcaagggcattcaacacgcatgggaagtgtcaagaggcactttgatgaaaaagaacagggcgtccataggagaaaccgtgatggaagacaagaattggaaagaaatcgcatggctgtaaaagggagagaagatacttattcttatagagaatttgatcctaacccggtccatttgcacatgagagctgatgggtatgacagaagaaaggaaagggacaattctgatatggtttggcaacaaagagatgatgatccttacagcagaagaataaaaactgaggaaacaaggaagagagaacgtggtgatgaaatgcaatcaaggcatcggagtaagatccgagaaagcgacaggagtgacaaagatgaacctatccatttgagaaaacagatggataatggcagccatagggtttattatgagaaggatgttggaccccgtcacagggaaagagaggatagtcttaagggtagatatgaacatatagatgattatcatggcaagagaaaaaaagacgaagaacatctgaggagagatcatgttgataaagaagaaatattgcatggccatagggaaaatatgaatcgtcgaaagagagaaagggatgaagtgttggatcctcggaagagagacgggcaacaaagacatcttgatgatcaccactctgtcagacataaagatgaagggtggttgcaaagagaaagaggtgaaagacagcgggagagggaggattggcagaggttaaaacagtctcatgaagaaattatacccaagagggaaagagatgaagggcggagtgtcacaaggagtgggcgtgtttcagaggacaaaggatgggttggccatcctaagcttaaggatgatagtaaaggttctgataaagattaccaatataaagagacattgcggcatatcgagcttgctaaaagaagagacagaattgaggatgagggttctcaccatggagggaacgaggatatctatgctcgtggaaatcaattaagtaatggagagagaagatccagacaagaacggctaagtatccgcaatgatcgttctattaatgtttctgaagacgtgagggttcatgacaaaaagcatagagagagtgcaaggagaaataaggaatttgagggtggtgataacagcactttagtctcatcaaagagacatcaagaagagcatggcattcagagtaatgagacggtatgttccttgagtgcaagagtgtagaactctgaaaaggaataaggtttttttttctctctttttaaagcttgaatcatcataaagtattccatatgctaggaagtttccttttgtagatgaggaaattcataaattccacctgttttggaacaaataaatctgattggggagggttgggatatactattattggttaaaatttctcagatgacagtctcctcggcccaacttaggtgtctcaaattagtaaaataggacatgcattgctcattatcctcagtctgggttaaccaacttctctcttggacatatggaatcctgcttttaaaagatcacattttctccactatatatatatgtatatattatttctatatatctaatatctatatcacagtcaatctatcatctgtagggaagcttagttcttgatcaacatacttttgtaattcagataatggaaataatcgaaacattttatttttctacaatgataaacctgtaaaaataacaatacaactatttacttttatttagcaatcataatagataggtgattagatttaacattgtcaatgtcatgccatcgactttaatagtaatgggcatgaccttgtctttaattggtatggttgtgggttggtaaataagatgataccaatgtttactttctcgttaaatcaatacctgtacttgtttaacaaaagcttgaacatggttttttgggatctattttttagggtagtcgtctgcttacgatttatacgagaaataaaactttagaatagatagcatgagtagtttgacatgttagaaggggaaaacgaataacaaattgttttgatggagtatgttgtaccctaaacttggaatcaaggctccaatccttgccggctatacatataatattttgttcatcattgctaaactgctgttgtcaggaatgatttctgacataaatgcagacagaaaggaatgatagaaagaaaaaaaaaaggttcttattgaaggggacattattgtaattattagtttgtgttgattacaaacttatgattgtcaaatatgatcttctgaaaaacaagttcaattggattgctttatattatacgaggcctaaagagtaagttgtatattagctttcttgttttggccagcatcacttataactgcacagaatttgatttcttgttttccttttcgttctcacttcttaatattcttatttctttttttatcatgtcgctgattttagttggagcaagaatgcatttttttatcagatcatatctaaagttttaagcttcaatatgttaaggtcctgcttggggcttctctcattcaatatgctaaggtccctgcttttttctttgattgggctttaataagaaaatatcatataaattggtattgttgtccttgtattaaattaacaaaagtgaggtagaaaggtgggataataacttttattaactagttagagtaaatacctagttcatgtactgattggtagtaataatttatggtttaaattgactttactttagctaatagtagatgaggtcatttctccattgtatattgtttggctgtgacaccctttgcctacgacactagtgttttgactgcattcttgaaccctatgtgttaaactgtcggtcctcgtttagaagtgaaccatatgagattctaactgtgggagatggtggggggaaggatggtaaccacttttgcttcacaaagactgcgtcaagtcggtgaaatggaagaaataaaaagggggatttgcatttacagattttggaagttacccttcagattgttatcagtctgcaatcttcaacattatattcatttattttctttgatgtacttctgtgtctgcttcttatctatccttgaatatttttcttcttgtttttattattatttggtcttttatagggtttaaaaggcagcaccgagcaaggctttggcgagcataaaaatttagtgcaacatcctttgtcccgaaaacaaagggaaggcgcatctgatgacgagcagcatgattcaagacgaggtcggtccaaactggaacgatggacaagccataaggagagggatttctctatcaagagcaagtcatctactttaaagtttaaggagatggataagaataacataagatctctagaaggcactaaacactcggatgaaccttccaagccagctgagactcttgatattcaacacccatcggctgaagagaaagatgcagctgatccagaggctaaagacggcgacacaaaaccattggacgatcgtcacctggacacagttgagaagttaaagaaaagaagtgagcgcttcaaacttccgatgccaagtgagaaagaagcaataacaataaaaaaagtggagagcgaagcgctgccttctgtcaaaagtgtgactttagaggaatccgagattaaaccagaacggccggctagaaaaaggaggtggatcagtagctgaatagaatcgaaggcattcaccctgtctgataaattctgggtataatttctgccttctcagggaatgtcatatcggcctcattttttgaatctggaaccctgcaggtccacggttaccctgtgtttgctttctatgatttttttgggtttcttcagatggccatgtacctttgcagtaactatatttttgcttatatcagggtgccccttatacaatttaattatctgtatatactgagcaatgtaatctttaactgatcacactgaaggtggcacttttgcttttagcaaaaatttatattgaaacacctccacacaggtttgaatcgacgactcgtgttgcgtggagaacgaccacctgtggatctgttgaggaagatcaggtttccagggattgaacaatggcattccaagcttgaagaactgaatggctgatttcagtgaagaacttttgaacaaaaagacaagcttgagaggatgtatttgaagttaatttaactgcttttcgaattttatatatacttgtatcactagaactcatattttttctcttattttttggctttgtttatgtatcttttttgtctatgtttttggcagaggcctaaaacaccaaattattaggaaatcaacttgtaacgtaggataatttagtttcaaattcacaattcacaatctactaaaacaaatttatcggggagaaataatattaatcttctttctggctgcactataatatttctttcttttcttctttattacattacattatactatatactatagcaacttaatttaagttagctcaatcaatttatttataatttatagaattacactcatatcaataaaattagaatatattcattattggatactttcaatatcaaaaattaggggtattggtggtgcgagttgtagccattgtttttaaaacaaactgcataagtaatttttataatttcttaaaccgcaattgcaccgtgagattttaaaatcgcaaaaaccataatgtgaaaatacggtgcggtacagtttgagcgatttacactatcatcattatgaaacattataataaaaaatttaaaaatcaaactaataaaattttaacaatacaa

SEQ ID NO: 298716 - DNA, 1719 bp, Cannabis indica
aaagaaattcaaaaattgttaccaacgcttattaatcagataactattaactatgttatttatttatttttgaaatggctaatctaactacttttgccatatggtattctttcacttagaaatggtcttcaataatattttgtatatgtgctcattatgacaatatatgatgaccttaaaatcaacggacagggattcgtcaaggctaagggatacaaatccaggccgtccactaaagagcccaaacggagcaaaattaggacagtccacagcactatttttgtctattcttctttctcaaaagccgtacaccatgaatgataagtcaccctcaccagctactccgcatacttcttcgtactatgactataatacccatatcataaagctctcataaatggctaaattaaagttatggaaggataatttgggaataaaaggctgtcaatttctgttatcgctattaaggccacgtttggaggaaacttttaataattaggagagagaaggttgtgattgtgaattgtcaacgtcatgaacatgaaacttgcattgcatgcaacgaacacgtggcgacgtagcaacgaagtgggccaaaggatcagtcttataggattttggcccaaaaacagtgcacaatagccataacccataagtgcatgggccacaggtgcaagtactcctgtccttctgacccgacaaagcctagccacacgatcccccacgtgttcaacaagcaccctcaataaacttaaatctcccatgttaacttgtcgatctatcaaaataactcattttctaatctacagaacaccctattctttgggtaactttgtaatactgtagtagaatttgaatcccaattataaaatttaaaatcgcaacaattatactgtaaaaaattttaaaccatatttttttgtgcaatattatacggtgcagatgatttatatacaatataaactatttgatgaacaacccacctaccaaagactaggctacaataagatcaaatgatataaaaatatgattgtgcccggtttctaaaataattaagctaaagttcgttaaaaacttatatttgattcaatatatcaaatcttcttaataaaaataactttctaacctaaaacacaaaaactaatgatccgcactatcatcattttgtatttggtgatcataggcatatcttgaaataatttcagaagtttgaatctcctatttctcaatataaaaagaaaaaaaaaacagttacaccctaaaaaaaagtaatataaatttaaaccacaaaataaataaatacccaatgaaaaaaagtctcacattttaaaatcaaattacaaaaataaattagccatcatgttaatgttgtattgtttgttaagacaactcaattcaaagctggtatggtgacacgtgttcatctgggtcgccttattgaagcttgtactgtgtgtcagtatggtaacatgacatttgagttggttaagattatgagaattcgagagacccttagttagattaaggaaaaaagtttgtcaatgatggttcttgagacaaattgcttagtagtagttgaggatattcacagtcaatttacgatgacctctttctttagtttaattgttaacgactgcatataattttgattaattaggatttttactcatgcccctgaacttttaaggtcgttaaaaatgccccatgaactattgagat

SEQ ID NO: 298717 - DNA, 3921 bp, Cannabis indica
aaaaaattattaaattttcttatcatgcatttgaatgttttttcttctatttcaaaatagaatagtcattccagtaaaaatactattctattaaaatgaaattccaatactttaatatgcaactaaacaaaataataaaatgaaaattatttcatttcatttctattttattttattacctccaaccaaacgtcaccttaaagatctctctattcattctctattataaagagtcattatttgtatggttggaggctatggcggacatcaattttctatcatatagagagtattttttgtgtagttggagctagtggtgggatttgaatccttaatatttatcatatatgtaatttaatttaattattgcactaaatttaatattatgtctgtaaatatcatctttattataaatatatatgttataattaattaaaatgtatatatttttttttaaggatcatcttgcttttatgtggatccgttcttcattgaaatttcttatttaaagacttattcattattttagctaaaaaaaatatatttagagagcataattaaaaatgaactaactagatgggatttgatttgttgtgaatctagctatgaaggtgaaaaagggttggtgtcctgcaaggagaaatagcagtgagctcagaaggggttttgttaatgacaagtgtaagctctattaggttgtagcttatagggactcaagaaaaaaacctaaagcaatggatttagtcccacatcgaaaatagagaatgattaatgtaaaaggtgataagataaagatggaaagaatggtaagtagtaagcatgatccttcaggcagaaacgggatgtgatgagtggtctaatcttgctatgtgtgcaagatgagtgtttgccccaagcctgttacgacatgggacactcttttgaaccatctgatccctacttttaattcagttttaattttttaaaacaatgttttgattgaattagttaagaaatagttattaaattttttatatatataatatgaatatttgtttgatctgtttgttgctgtgggtgtggtattactattctgttattttctaattttttttttaaaaatttcgttagtacaaattttgttattttcttaaataagtcacgattttagattattggatctagacagaaatatttaaaattacagttttacaaacattaagtacctgctaaaaataaacattagttttatgccgtttacaaactgctaaaaataaacattgattttatgccgcttacaaacttaaaacattaagtacttatgtcgctatttaccttttatatatagattattatttacacagacaaatagccaaaaaatgaatttttttttttctttttctgtttccactaaccaagaaataaaaatctccttacattggattaaccaataatgttcagaaggtacaatgaattcaattttgttgaaatggtatacctataatgtgtacacaaagcaattcagaatgaataagaagttgaaagtcaccataatagagtctagccatcccaaaatttcagccttttttattcacttcagtgtctcatttcttcgcctttgaaaacctgaggcacctatatttttctccactaacagtgatttcaagagctccatcttgattatcttgattcgatgcagttcccatcaagacgcttttctccttttcgaggttttctttctccatctttagtcttgcttcttgacgcgcaatctctgcctgagacgacaagggaaagggaaaatgttaaactttgaatggtcaaacaaatcatactctcatgtcacacctgcactgatatacaagtaaggtgttgatagatggagaaaaaaagatttttgagtaacaacattcaccagagaacaatcacaaatgatggaatgagtgttccacctatatatgcttcttctgattatcattatcaacacttttcatagagtataagcaaactagaaattagtataaaaatagaactggacaatattatgcatctcaatattgcatttctgaaacacaatttccaatgaacacagtagacaagaaaaataaagcattatgttgaagttttgtcttaaaaaaatcatcgatattaaggctagctcaagcaggaaggtgagagagtagtctaaagttcaagttcaacaaaaaaaatgtcatagaaaagaactatgaaaaaatcgatcagtttccgtgaatgagtagtagaaaaatgagaccatttattgggacacttgatgcatgaaactaaacgcatgatcattgattattaagcttcaatcatttgttgttcaaagaagcacaccataaacctaaatactcaaacacccctttttcaatcagaagaaagagatacgtgcccaacacttctacccaaggaaagaaagacaaattactcactctcttcataagatgtttgcttcatctttaaattagtaagataaacaactaagtcgaactctgattcaaggattctcaaaaataccatacaacttatccaagaaggtaagcacacggtcaatcatgtaatttgcttccaaaagtctggggtttgggcctttcctaggcacctctatcgtgttcttaactaggctccctccctaacccgggattagaaaattatagcaattgctatgtaggtactctggagcgactcgaaccttagatctgtcagcaaatcacatgcctaaattaaaaggatagtttttaaagttaagaacataatctaatgatgggaaacaacaaccttgaatccaactcttctttgctatgaagctaatagaaattgatcacttcacattgcccagtatgagaattggtccttttatctaacacagaaaagaattacacacgtattatcatattgagctacaaccaaccaaatttaatctattctcacacttcacattaacgaaccatggtggtcattactgtaaagaaactaaatcaaaatgcttaacaacatggccaaacgtttacactaagcttctacgcggagctcaactcacaataaaaaacaatcactgagtgcactactactcatttctccataacatgtttgattgatttccataagcaattgaaaactacaaaatgaacttgctgaagataatgaaaaatagtagtagtacctcgcgacgagagagctcggctttccaggcagcctcacgctcggcaacctcacgttcccgctcttcaatatagctttgcatctctctctctttcataattcggtcctgaatatctgcgtccagagcttccttcagctcctgaacgaatttatccaccaccgctttaatcctcaaagacattcccaaaccaacactccgatcccaaaataatctgaaattgtttcactaaatctaacaattcatgctccagattttgtggtttcgagctccgtagaccgattcttcttcactgcgctagaaaatcatgggttttggatgaacagagaatctctgttgagcgaggaagaagatggtgaagtagagaaacttgcgtttcagcttgaaactacgtcgttttgaatcgagtctagtttactgtagtcgtagctctgaggcgaataatgagaaaaattaatgaaagaatgaataaaaatatggaaaagaaaagagaatgagtgtagaagaggacaactcaatttgggtttagtggacttgggcttttctgtccccacctacggcccactctacacagatctcggcccacctcacgtaatctctcacttttccctttgctaaagaaaaggtgttttggaattattattgggaaatttgaaaaactatccataaaacactctaaaattattttcctaaatctatatctattaaaattgtccatatatgactacatttgattttttcccataatacccctccca

SEQ ID NO: 298718 - DNA, 2454 bp, Cannabis indica
gtgataatagatctcataagattattgttatcacttttaaaatatcaccatatataacctatgatcacatatttactataagtactcttcgagagtgtatgtgtgaaattctaaattttggatgagggtttctagaaacttcatattaatccaacttatcgaatcattcatgtgtgtatatgcaacattgttcataccaaagtttaaaattttaataaaatatgaacataatacattgataataataataataatataaattttaatttgcgataatgattatactctaagaccatgtatctatttcattctcgttatctaaaattctttatgcatataaagtacttcatgacttctttacttacaatttaatctataaacaaactataaatattgtttaacgagattttcgaaaactctatataatagaatgaataagaactaagaaaataaatcaactagatgaaatagagatagaaatttttacgttgtttggatattaatgaaccctagtccatgagtcaattgcattgggctaagtagccttgaagtattacaccaatgttcttgacatgcttaagaaccctagctttttgctatagtgcttgagtcaattgcattagatctgaaagtaattcttagataaaacaacaacaataaataaaaacaagaccaaagaacccacaccaacgggagagggagaggcatcccgccaccagcaggcttttcccaccgaagggaacgcaaaacccaaccacccctccatcttagcccgtccccgagcttcaaaagaaaagacagagggccaaaaatgccaacaacgaccaagcgaagaccactaacactgttggaggcccatcggagtctcctccaaaactcaaccgttgtagaccactaacccccaaaaagctcgacctccccacgatgacaactctaaaaaagcatccatgtcatcagattccccatgcttgtcgtgcaaggaaccatggacaagacaaccaccaacaaacaatccctcagctagagaacactaaacacatagctaggccggcggctaggtccctagccgagaaaggagaaaggaaagagatgaaaccctagcataaataaataaaattagaaagaaagaaaagagaaaactccgtgtatgtgttgccacccatcctttgactttttttatttttctttgagagtcaagatcataagaacaatattcaaataagttttccaagtacaaaaagattacaaatgaattttgatagagtttctgctaacaagagagagtggtcttccattgttgtgatagactcatatttatagtgatatttcaaacatacaacaataaatattgtataattattactcaatcaaatccctctatttaagggtcaatcttaaaccgattctccaaagatttgttgttgttttctctgatccaaactgcttattgaccataccttattgagtagtcatttatgtacatggctgatgaattattgcttacttaatcagagtctgtactctcatcgactaggcgtcagttggcctccctaaataaccaacgactaaagacatcttttggccctcttggacgatcgccgaccaaatgcttcaggtggttgctcattctcttgaaagatgtggtacctataacctgaccaaccaattaaattaatctaacctgtcatgccacgtcattcatgccaaaaattgagataacaaataggggcacattaatgaatatatgtgtacaaaatacatatagaatgtggaatgtcaaagccactgttcatatcatcagtaaatttggtctttgccgccgtgttcatcatacactgaatgtacttcttgaggctttttcctggctgttgtttaatgttcgtcaaagaataacttttaggtcgaagtcttttacagctatgaattgtttcttgaacattatttgcaaatctttcgaattacgaattgatttggggtataaccttttccaccagtcttctgtggattttgacagtgttaataaaaaggcagaggcactttgcatcatcactagtttttgctacctgcatcattcgactatacttggatagatggtccttgaggcccgttcttccttcatacaattctatctaaggcattttgaagtgttccggcaactgtacattctatgattcttttcacacatggttccgtatcttcctcctccgagtcagacacatttccattttgctttcgaatttttttttttctgtcagctttgtcattctcatccctaaccctgagtttgccaacacaaaagctccaaccacccaagtcacaagtaattggtagtgtcttaacatgataattaaatgtcaccccacacataaatttgatgttgtgtaaaaaattacctcccatactcttaataggataaaaaccgagtttttgcaaatgtcaattatatatacgaaa

SEQ ID NO: 298719 - DNA, 2257 bp, Cannabis indica
ttcttcatcaattcttgccctctttggtagagacctctccatgacatcgccaacactactcattctcttcctcaatctccctccactccattcaccaccaccaacacccttcttcacatctccatcttttttcttcaattcaacactcttcactctctcattgcccaattccatttggctccttcccaatccaatcttacttagttttgattttggaatccaacctgcaattctctcatcaccatccaaattcttactcttcaacctttcacttcttaccctaaatttatgcttagcagtctcaccattcccaacctctacagcctcaaaggacttccgacagctccggcaaaccaaattatgtcccaaatacttcctctcaaactggtgtaaaagctggcatcttgagcacgtcgtccagaatgtctcaccacttactggaaattccttactttccctgatcttttcatcttgaatctgatttctcagctttgtatcgtactcctttcgttgtaccttatccgaaagaacccgaaacccctcattcacgagcttaaaggtctcctcagaacccaagtagggattcttgtcaggatgcagaaggagagctagtttcttgtactgttttttaatagtattaatatgacaaaagggctcaacttgaaggatcttgtaccaatcatgggtagtggattttgaagcagcagagaggatctcaaatgaggtaaccatggaagagaggccatcaaggttcggacagagacggtaagctcgcttgacatctttgagagctgatttgaggttggcggccttgtatttagcctctgctaaagctttaagccgtttagctttttgctctccatcttctccccctaatggctggtttttgcatacaaacaaagaagatggtgcttgagaaagacttgattacataacaaccttacattctgcttcattttaacatttatgcatatatatatacatataaatacatggtatatgtacagaagctatcgttaagtcccaacaggcaacaggcttcttgtaaggcataaggtataatatgaattgttacatgagcataatgacgacagcctcactcattgtcaatgagaaacagaaattaagaaagtgtatgcatgtaagagcctatgggacaaagcacaaacctcaggcgcataaagagaagagagtcgttcattgtcactgccagtatcatctacaaagctgtcatcatacaccttcttgtccatcctattccattcaagagagtaaaaccttaaacttttatttaacaaaacaaaagataacaagcttgtaacagatagccatttaagctcccaacaaacacttaaagagaacaatgtcagcatgtaaagaatcatagccagcatcgcctttgaattttacattggtataccattaccagctaatcaaatttttcgatttgaccatataccaaacaaagtacatgcttaaattttatgtgtgtgcgtatacatattataaaacaaagatcagaccaaaacgaatccagctcaaaaaaccataaacctcaaggctaaacattaaaaattcatcactttttaaaaaaataaataagtaaaatattaaataattctacacaaaaaaaaaaacttattaacggaaaatatatatataccaacataccagagaagctgatccatatataaccaaaacaaaaattttttaattttttttattatatttataaataaggtatttttacgacattcccatagaaactcatatgacaatcaacgtagcaacctaaaattgcaaccaaaatccacataacaacctacatagaaaccaccggagcaacctaaaccgtaaatttgaaaaaaaattaaaaatagataatatatgggataatttcccttataaatatcaatatatcaatataaaggagaagtatgagatggtgatgtggcgctctaaaattactctaaataaatctatatcctctctctttaattatctctatttttttaattttttttattaagtttataaatataaataataaaatttctatttttatatatatttaaaaaaaaaaaattaaatatctatccctacaccttctccaatttttaaaacatatataaccctaaacatatatctatatatcacttttttattctttttttttttcttattttgttttatatatctctctcagcctctttcttcctctttttagttttttctatttttttcttttcttttattt

SEQ ID NO: 298720 - DNA, 3275 bp, Cannabis indica
gcatttaatgcaacatggggaagaacatctaatactttacattgatagacgtgtttgagggtttaaaccatcatttcctgatttcacgagaccccatacatcaatccaagactgcataaatgagtcgtcaagtcataaataaaggataagtcaaatcccaccaaatacctatagacagcctaaatacatcccaaaataggcaattattccctaagatcagatttagaaaattgtgcaaagcatggtgcatacaaacacgacaatattggctttttatcaccattatgagccaataaataccccaataatgtatagaaaaggggatcggtcgaaaaaagctctgtaataaatactctaattgatacagtgactcgtggactaaggcacattaatgccccaaccacgtaaaaatcttctcttctaacattcattaattacttcatacagctctaattattggttgctaaaaatctcgatcaataatttagtgctttcattgagagttttaggaagcttaccaaaagaaaaagtcgtagatagcctcataatataatggtgaagataagaaatacttcacatctacaataaacatatgacccaaaggatcaagaagaggaagagtcaacttctaaggtgattgttggaggaaaatgagacaccaatgatttagaatattcaaaacaagaagaatatgaagactgcgatgatgactaatatatagaactagttgagctaaggcaaaaggatattgactatgaggctgagttggcagaacagaaggaacaaaataagagaatgcaagagatattgattcccgtgaaaagggaaatagaaaatgcaagcatccaagtggatccaactgcagtcccatcagtacaagagaggactaaggaagagccttctcagcccgaggaaggccaaaaataaaagaataaagaacctagttgttgggatttatgcccccaaaagcaagtaattaatggataatatattagagaatatatgaaatacaattataagataaatgatgtatcaattataagagtataattatgaaatatctcaaaatttcttattcatatgtagaaagtataatcttgtaaggatgtacaagagaatttagattatacagtatgtataaaacaagtcggtagtatattaaagtattaagaatcttgaatagagagctgctaagtatggtttaatatatactatacttttagttggtgtaattttgattcagatcacatatgtagagggacatattgtaaaggtactttgtataattagattatgcatgactggaccgatatgtaacaaacatctttcatcaacttatcatttaccatgaaaagaatttatcatatcataatgaagatcattatcaacctgaatcttaagtatacatgaactcatgtttatgttcattatgttctttgattcagagttataaccttgatcgagcacttgtgcctcaaattccctacgcattctccaagagtggaaactattcgaggaaaccagggggaagcaagaaaatgctacaatgtagccaccaagcaagttgtcctcatagtccaacacacgaaagaaggatgcctagtggagatacaagatgaactggatctgcgagtgggagccaaagccactcttgaacctatgcaagaagtagagaaaattcaaatatgcgatcagaatccaaccaaggctttaaaacaagaagtggaaaaaatattgtccaaaatctttattcgagatgtatattatccggagtggttggctaatcaagtactggtaccaaagccaaacgggacacaacgagtgtgcatagacctcactgatttgataatcttaattgtatacaacaccttcacttagatgtcatactacattggtaatctgaattgagattactttgcactgaataacaggcatcagtgaactatactagcaaccattgattaaagattcttaaactttaatatgttgttgactattttattcatgtttatgtgatcttagttctccgtacaactacaagtcacaacctcatgtatgaataaggaattttctgatatttatgtataaattattcaattttcaatattaataacttaacattcatgcatatattaaaatatttaaattttattcataatcagaaatgtatttagaggcttttcagagcataaatcataacatcctcaactctaatttgtatatacctattccacctttcaaagataactaattctttgtcaggtagcaagattccgaatcctatttcataactgtctcaaggcctacccaatttatccattatcctagccgccacacatgagcatgtagcttcaaaattaaacaacacaaagtaaatagagtaattgactaggggctgacatggcaccacactgagggactagcttcagcatttgcttgggtaatggcaaaccagagctagagtgggttttgcctcttgttttggttcttccttatttagccgtggatagtctctcttgaaataccctactagatcgcattagaaacatgtcttacagttacattctcctagaatatgcttcttgcaatgagggcactcttgataagtatagtgtcctccaagaccacctagacctagtttcctatgaaacctctttctctatcttgagcccattgatatagatgaagctgtcctcttctgattatccaaggaacgagcaccacctctaccaggattgaaagtaagaggagcagtgaccccaccaacaactgaagtctctagggactcttgaacaaaatctacaacgctcttggctggagaagcgttcatcacatctagatctcctagaataaccaacggtccttgcatccaaatctcccatacactggccccatatggttactaggaataaactattctgctggcaactttggagctaaagtcactggagcttgaggtgaaggcacaacaagagatccatgttatttcaatctctcctcctctagtttttgaattctaacttccattttaacgaacccttggtctaaatctggtggagcctgtagtgaatccacctccataaattctttcacaaaatctatcccggccacatggatgaggagaatctcaatctttgaaatcactagggctgagcatgggttgggttggccgggttgagggtattttaatgacccaacccaatgacatcggcctagaaatttttaacccattgacatcttaactgttaggttttatgccctaaataaaactcttt

SEQ ID NO: 298721 - DNA, 5037 bp, Cannabis indica
tttgtcatttaacaaaacacatggtccaattggtaacttttgtaaaacagagagtccgaaatggtatttacccaattaagtattatatcccatataatttaagtgataatttttagggaataccaatcactataatattggtattgttgcctaataataatattctaaattaaagagaatcgctaaaagatattatagctacgaaaataattttagaaaatattgttaattaattaattattaacactacctataaaaaatattggatactactagtctaataataatactttaaattaaattatatgagaatgaatatttaattatataataagaatatgacttttaacatttctttttttttcctttattaattatctaaaagataaaataaaataaataatatttatatttatatattataatatataattatatatattatgtatagattcagagtgagaggaagagagagaagtggtggcttttttgggtcgtcgtcgttttcttcttcatcttcttcttccttcaaattccaattggaactggatttgaattgatcttactcatctgggtttttctgggtcatgctctgtttcttgttctgattcaccaatgaagaaatccacttcgattcctcaatcgaaacccatatgggtccttccatatcggacccaaagcgtaactgagctatacaatcttggaagaaagcttggccaaggtcagttcggtactaccttcctttgtacggacaaatcaactgggtttcgtttcgcctgtaaatcgatcccaaaaagaaagctcctttgctctgaggattacgaggatgtttggagagagattcagataatgcaccacttgtctgaacacccaaacgtggttaggatccgtggtacttatgaagattcttacactgttcatttggttatggagctttgtgaaggtggtgagctttttgataggattgttaagaaaggtcagtatagtgaaagagaggctgctaagttgaccaagaccattgttggggttgttgaggcttgtcattctcttggggttatgcatagagatcttaagcctgagaatttcttgtttgatactgttgaggaagatgctgctcttaaagccactgactttggtctctctgttttttacaaaccaggtttggtttcttgttctttgattctttagggtttttttttgttatataatatagttttagtctttacttatgattttcaagaaagtttggtttcttttttattgttttttttttcaggtgaaacgttttctgatgttgtgggtagtccttattatgttgctcctgaggttttgcgtaagctttatggacctgaagctgatgtatggagtgcaggggttatactttacatcttgttaagtggagtgccacctttctgggcaggtatataattatatatatatatatatatatgtatatatatagagagagagagacagagggagagtagattttgtaatgcattttgtggtctcggtaactattggatcaagattgagtttgatgagtctaaagtacatttcactttaatcagattacataaaacaaactatatgtatcatgtatatgagaaatgtgtatgtatatacaaatatataaagagagagagagagagtggattttgtaatgcattttgttgtctcggtaactattggatcaagattgagttgattacatcaaaatcgagtctaaagtacattccaccttaatcaaattacataaaacaaagtttatataacgggatgtatatgagaaatgtgtcattgattgttgtttttgaatcccgtgagggtatgcattgtgtggtttccataactattggattaagattgagttgatctaatggttggaagccgaagtatatcttattatagtacataacggaatgtatatatatgtgagaaatgtgtcattgactgttgtgtttgaatcttttctatgtcacctgcagagactgaaatggggatctttagacagatattgcaaggaaaacttgattttgaatctgagccatggcctggtatttcggaaagtgccaaggatctaataagaaaaatgcttgaaagaaacccaaagaaaagactgactgctcatgaggttctttgtaagttttgactttgagtttagggaatcctaaaacaatggatgagggaggcttcttgaaatattccactgtgtggttaatcatattgctgtctaatcaaactagaattatcttttactttcaggccatccttggattgtagatgacaggattgcaccagataaacctcttgattctgctgtgctttcgcgcctcaagcaattctctgctatgaataaactcaaaaaaaatggctttgcgagtaagcgattaacatgattgtaatgctcatttagttaagcagagcctgaatattgcactactgaggttttttgtagcttggaattatatcgaagcttacatggttcttcatttattgggtgaataaatattttcgcgctttaagagaaaatgctcatgtttcttatgcacaaattgttgggtattacatggttatgaatcaatggtttgatgtagtatttactttgccaatgttcaaagttggaatgagggttctttactcagttgaatcccattagcattatgtgaaacttgttgcattatgtgctttgatcatggcatctcacatagattaattttgtcggaggaatttacttgtaggtttttcggtttaaagcctaggaactatttgtgttgttaatgttcttaagttggatatctccctttcgattgcagaacactaatttctcgttcgcattcaggtcatagctgagaggctttcggaagaagaaattggcggtttaaaagagttgttcaaaatgatagacacggacaatagtggaactatcacatatgatgaacttaaagagggactaaacagagttggttctgagctcatggaatccgaaatcaaagatctcatggatgcagtaagagaatattactaatttcaccattagattctaaaacgggcataacattttgcttaacattttgtttgtgagttatttgcaggcagatattgacaacagtggaacgatcgattatggtgaatttcttgctgcaactgtgcacttgaataagctggaaagagaggaaaacttattgtcagcattttcatttttcgataaagatggtagcggtttcataacaatcgatgagcttcaacaagcctgcaaagagtttggtttgaacgacttccacctcgatgagatgatacaagaaatcgatcaagataatgtatgctttttgttttgttttttcgatagagagaaaaatgtgttaagcatttaaaagttattatccgaaattgcaggatggacaaattgattatggggaattcgctgcgatgatgagaaagggcaacgggggaatagggaggcgaacaatgcgaaaccagatcaacttgggagatgctctaggattgtctaactcgaactcgagctccagccatggagatggagatagagttcctaatgttgatgagtgacataatttagtaacttccaccttaagagagattgagaagagtttttggtggagtgggagtggatagtctttttgagaatgttattacaacatgaagagaaaccatttctatatatattatttggttaaatcatggtaattgtaatctagactcatttctttaattaattggttgacatattatattatgcttttagtttctctttttcttcacatatcattatgtttatgttggttgtttcatgataatagatctcaaagcaagaaacaatactagagcatgaggcactcatgaagtgttgttttataataatttgtccatttttaaaataagtgagatctaatattgagttcacaaataaccatacaagaacattagtaggcaccatgtgtgtccttttaacatttctctactaataaatcaatcaatgtattaagtgggctttgaagttgtagtaatagtagtgtattaaacccaaagattaacataacataattacaatataacatcattattattattatgatgagggtgaattttcacattttactagagccaacaaggtacttagaatgccttccatgagcaataattttgcctgtatttttcttcctaagctccacactcacaacaccaattgctttcccaaggagcaaagtcttggcctccacctcaatttcctcctgaatatccacaatatccaatccaatcatataatatttattattattatttctaataattgacaaaaaaaagcttcaagctttaagctgtaaagaagaataagaatgtcaaagcattaatctttaagaagaaaaagtagacacccacaccagcatatgcagaatccaatccaatcatatttattatattattctcctaattattaacaaacaaaagcttcaagctttaaactctaaagaagaataagaatatcaaagctttaatctttaagaagaagaaacatacactcatactagcataagtagaatccaatccaatcatattattatattattcttctaataattaacaaacagaagctttatctctaagaagaagaagaagaagaagaagaagtagacacaccagcataagcagaatccaattatatcatatcattatttattacttttctaataatagcaaacaaaaacttcaagctttaagctctaaagaagaagaagaggaagaatttcaaagctttaatctttaagaagaagtagacaatcacaatccaattaaatcatattatattaaaatcccaataactaaacaaacaaaagcttcaagctttaagctctaaagaagaagaagaagaatctgcaaatatttcaccattaactataaaaattaaagctttaatcatttacttacaccagcataatcacaatccaattaaatgatcattgttatattaaaatcccaataactaaacaaacaaaagcttcaagctttaagctctaa

SEQ ID NO: 298722 - DNA, 4963 bp, Cannabis indica
acagtataaaagaaaaaaaaagagggaggacagtataaatataatttctgccgtattgcagtaaaattgaaaagtattaccccaaatccagtatttttgaaaaaagccctatatatcaaaacttatcatctttttcccatatttttgtatattgggcctgatgttgttaatatattgggccagcaaagagaaagtgatggtattgggctttggtttaaaattcattttgacttaacgttgtcttcttctctctttctctctcttcactgagaaactggaatgagtgtttttcagtttcagtcttcacactcacacatctcccttttccctccattcctagggttttgaacaaggttttcttcaaactcagttcatttccatccccaaatctcgaccccaaaccctcgaattgcttccacattcttgttaatagagcaccacagacctcaaaattcatggctttttcgttattttctacgccacaacaacagcaacaaccacagtcatcgccgtttcagactcagcagcagtcccagccatttcagcagaccagtcctttctttctcaacctcagcaacaacaacaaacgcccaacaattcaacctcaacagcaacagcaacagcaatctccgtgtttcagcagccacagcagcagcaatccctgttgtttcaacctcaacagcagcagcagcagcaacaggtgcaacaacaacagcagcagcagcagcagcagcagcaacagcaacaacaacagttgtttttgtttactaacgataaaactcctgcgacttatagtaccaagtgggctgatctccatcctgattcccagaaagttttacttcaaatcgagtatgttgtgttttgaagtttgaattttgttgggttttcgttttctcttgttttttaagtgatgggtttaattggctgctaagaaaatttcggtagagaatgctaagggtgctatattttgatgaatcgtttctgatgttgttggactataaagattataattttacatgaatttgtgttttggatttgagaaattgggatattgttggaaggttcattggagttaactagctatgattaatgttttattacatacatacatatattatctacaattcaaatattataataatgatgtgtgttttatacttgaaactttttgtttcattagtttattatgtatttagtatattcttgattcgatatgtgtcattttaagtttcttaagcaatgtatgtgattagggaacggatactggaatatagagatgagagccagaggcttgatcagtgtagtcggctttatgattcctcggtttccaatcatggatttgagcaagacgcaagccatattgttcaggttagcatttcgacgggttaaattccttccagtttgtttgttttcatttaacactctatacaagtgggtttggacttgtaatttactgttcttatgtgtctgaactcatcatgaattttccagaatttcaatcttggttttgagttaaaaaagctgaaaaagacagccttctctgttatttatgagaatgatatgataaacgagtagaatgttactccttaagtcttaaaactagttttgaactctatttaatagattatcgctgtattacttatcataggactatcatgttacaattaagacttaagcttgaatattgtggtaatacaggaactcagcggaattagtactgatgtggaaagacaaaaagctttgctgttggaactaatgacagttgtgaaagatatgttacgaagtactgaggttgctgttcgttctttcatgatgctacgcccaaggtttgttcatccaaattcaggaaatgcttctatagccacggcaccatcacaaccttctggagcaacaggctctagtagtcaacaaattgctacatctattgtccctgtttttgatttctacaatggaattccacggaagccctccccttttctacagcaaacagttgctaggtttgaaaagtatctcaatgagtgtcgtcagtggattgaagagttagagcaattgcttttcttagactctgaaaagagcacttgcaatgcagcatctttgttgcagtctcttccaaaagttatgtcaaatgtccatgatttttttgttcatgttgctgctaaggtattcaaaagcactttataattgttacgtgctatatcaaaaaacatattcgtatcatatttggtactctgctttataccatttcgaggcttatatgatctacttgctgttcttttactcaaaagttcatacatgtgtctcttgtgtttaaagtatgtagtttccagaagttaatgatttgtctggcctttcacttcccaaaccacatactcatctgtacaaataaggaagagcatgttgtgattttagatgataaattacttgacaataaatactttgatgtattccttaggtggagagtattcatcagtatattgaatccatgagaacagcttatcttgctgaccaacgccgtcgaggtgaggtgaacgatccatttcttgaggctgatcgacgtgaaacagcaagacaagaggctgctgctaaaagggtacatccaacatcacatttgcctgcaaatccacaaccatcaactcaatctacagcattggtcacttggggagctcaagcgacatccagtacaccacagacggttacagttgctccagtagcttcatcagggagtgggctttcactcttcagtacaccttctgccccatcttcatccatgccttcaatgtttgcgacacccgctacttctgctccaacatcctctctgtttggatcatcttctgccacaccccagacctctctttttggctcttcatcatctttatttgggtctagttccaccccttccctgcttggtagtactgctccagtcttttggttcttccactcctgccggtaagttcactattttcaacacctatttgcctcaggtacattcttgtcctattttacctttacattaaaatgtatatttagtaaacgaaagtgtttcccctggcccccgtaataaaatgtgtgaaaagttgttgtgttgctgagggcattatgtgtgtccaatattctgataattcttagattcaagattttttttttagttagtgtggtctaaatttaaatggaagaatgtgacaaaaaaaataatctaaatggaagtagaccaaagtagttttgataagaggacatgtgaatgtaggggatgctaagtgcagattcatagagtttatgatattagtccagaagaattgatatgaatagtgaagccaacactatattattgatgtaaatgttgatttaattttaactattataagaaactgtgatcaagttgtttagtcacatacacactggtgttagaagctagatgacttggtctttaacagtgtgtgaaggggttatattaaattaaatttacttggactcaagatattaattatgcaccagtattcttaatactatggatcttaaaattttctgctgtagtattttaagatgaattgttgatcttatttcacatcgattgggtttcattttataaggctttttttcttggccaagttatcttgctcaactaagtttgttcttttccttataaggtactgcaatgggttctggggctagctttggtgctgcgtcggtaagtgaattttctttgagctttaagcctgtcagtgcctcttttttgtcagttacttttttatttgctttttcctgaagcatataattaacttgtgaaaactctacactagtttacattacatatggataaaccatctttgtgttttacgtcttcttcacagaaatcatctaagccgaaatctcgaactggccggcgttagtcattaatgagtccaggtggtgaaatctagaaggacctttgtatatgcatataatcaaggaaaggtcctttgctctctaatttagccaaaagaagtggtgggggtggagttctttgctctctttattgtttgaagttggctattttgtatttttgagattgaggaaatcttagcaattgagttcaagaacaatgaagtataacttgagatgcttctggacaagacattcaagttcctccccagtccatttgttcatcaaaatttcaacaaaagttaagaggtgttaaataatcctcagatgatttttgatgtaaaatttgttcggttgcctcatttttttgaatgtcaattagtgtaggggctcattttttttgcatgttaattagtctactgaccttcacaccaaactcatcagataatgtacttgggtagtattgattgtaatgttgattgatgtcaaataaactcattttctgacattattttttttaattacttttttggtttaattctattcataggatgctgctgttattgaaatagtttttcctttcaaaatagttctttgaaatttttggttgtacctttgttttggtagagtaaatcaagggaaatgaatcgaataaaaatgagatattttagtgaaattccttaagttttaaaactcttcaaacattaaataaaaaatatttttttaaggaacaaattttcaataacttgcctatcttctctatgttttgttgctttagtgcacttgtatgtggctaaattattcaataaattgaatagttatggcgaaaggactcaattaaagtgtgtttttcaattatttttgggtcatccttgagccatccatgtattaaaagtagaggtgtttataaaatagccaatcaaatccaatccgcacgatctaacctaatccaatccgcacgatctaacctaatccaatccgcaaagtgcgaatattcgcacttgtgcgaattggaaaattcaaaatctgcacgtgtgcggattggatgttgattgacatgtaaaaataaccaatctaatcaaatcttcacatctttataaaaaaa

SEQ ID NO: 298723 - DNA, 1700 bp, Cannabis indica
catttatgaaaaaagcccttaaaaaaataaaaataaaacatatataataaaataaatttgatgtacaataataacgctttaatgttataatttaatttttaacaatttcatcaacactaaaataaatgaactttttttttgtttcttgtctaatatcattatatctaggcttatggtaaaaacaagatttaaatgttgacaaacttaagagttgtaaagaaatttatgattacaagaagaatatatgataataaattatttaataaagttaattatgattaagcttcattttgtaatcttaaaaaatggaaagtgaaatctttattttctttttaaaatacttttcaactttaaatcattctataccaaagttgaagtgacttattgtgcatgttctagttgagtacataattattaaggtttgaatttattggttaactttcatattaagatcaaataaactacaaataattttaacaaaaatataaaattactaaatatatatgataatattaaaaattccaaaaagttttcattaattattaacattataattgcacattagcacatgatataaagaaactttcttttttatcttttaactatagaattatcatttttgttcctattgtagtagtgtcttttattttcaatgcatacataattaaattacatccctaattatgtttatatgacatcgtatattataattatattagaaatttatcttatttaaaaaataataataattttagcacataaaattaaatttagatataacccattataagtaggatcgatcttaagatatatgggatctaagacaaaattaaattttaagattccgatatatagtttaattattttcaaatcaataattttaatactttggtgtaattgtaaagttttttgactgtatttgttgtacattcttattatttaatattttatctacacactaacaattttctttagcacaatttcaaaattttgagtattcagggacctgagatgcacgtctagctcgctacctatagagtcagctatgattataactacaatataattataataaaaaaaaattattattgttagaaaataaaaaatgtaccctaacaaaataaacaaaaatatgtctaatatatatacattatccaaagtaattaatgaaaagaaaactaactattaattgacattgtatcaaaattgaagatttggtgacatggaccacatttaagaaaatattcgggccctttacgctttagctgataaatattggtcactttcacattttcaattttgtcaactttttttttgtaccaaaacaaaaaaaaaattagtcataaattttaactaaatcaattgtaatatgtatcgttttacaacaattataatagtagaataaataggatttgtctcctttaaatatgactattttttttttttttaactttttttttgttgcaaaaattgttggtgaattataaaaaggttacttagtaatttttccctccgaactttgacatgtaccaaatgatgccccatgaataatttttgccattaaaaatttctcctaaactattgagattgttagatttaaggacttttgtctaattttagtaaaaaaattctaacatggatgaaagttcaaggggcatgatttagtacatatcaaagtttaagaggcatgatttggtaga

SEQ ID NO: 298724 - DNA, 2957 bp, Cannabis indica
gtgccacattatcatttggttcccaatcttatgggaacacatcttcatagtcactctccacacattgatcatctgatcggtcattttctacttggtcatctgctacttgggatggttatggttttccttccttcgcctttaataatgccatcaaattggccatttgagccatgaaagtctctttcagctctttttgattttccaaaaaggatcgcctcatattgagatagttattcaagaactctatctacaacaatataaaggcagcttgttgggcctcaagtttattcaacctctttgttaggtcattatcgttggatgtgttggctgcggcagaaagagcgattgaattagaaaactcatttggttctggagctggtggtggtggaacaaaatttgtctttgtcatgacctcattaattgtcttggcttgtgtttgaaacatagaatcctgtgtactatcgtcgttcaccgtctgatcgatgtccatctcaaaataaagaagaaatttacccttattaatggacatgaaatattcctcttcactgcctaggaaaacaagcacttctttatgaccatttgtaaaaaaaaaacaaaaggacaaaaattaaaaaatgtcacaaaattccataaaatatatcgcaaataaatgcaaactatgtcgctataaaagtgcgacatgtcgcaagattagcaatatgtcgagaacaacaaaaaatctacaacaccgtcgctaataaaatcgcaatatgtcgcaaacacgtcgtgtataactaagtcagcatttaaacaaaattataaattaaatctacaacaccacatcgctgataaaatcgcaatatgtcgcaaacatgtcatgaataactaagacgacatttaaaacaacaattaaacataattataaataaaatctacaacaccatgtcgctaataaaattacaatatgctgcaaaacacgtcgcaaataactaagtcagtgtttaaaataacatttttaatgaaaaatctacaacaccacgtcgcaaatctatatcgttttatgttgcaagatatcactaaaacgtataaaaaataacaaaaaaaagagaaaaactacaacaccatgaaaaataaaagagaaacatactctagtgttgaacaattgtgcgatgtcgctcgcctttacatcctgtttctgttggccctttgggattttctaatttaccattatggaaaacttggtttcgctgcatttaacacacttttttttcactttctctgtggcttcatatgctcataactgaatggcaggtacatatccactaacaatatactttgtctgatgagtaactttctcccccttctttttgtcaacattatctttgtaatgttgtatatccttattcactacattaacttatgaaaagcacactcgccccacaaatactttaagaagaagtcaaggtcgttgacaacaaattttaacatgttggaccaaacttgggcaatgtcctctttcgatatcaacacaccttcaataaaaagcaataagtccaagcttgtacacatcatcttttacttcccacctttccagttagagcaacagtaaatccaactacatagaactcttccattcgaaatacgtcctgactagacagtcattggacttggcttctatttcttcctctatatgggcactacccataggtaagccagtaataagtccaaacgctatctacccgaatctcatgtcatgtttgtccacatgaaaccataccccatcttccttttcattatcagctttcaccttccgtaagagtaggttgtgaaccaatgccctagaaaaagtcaacactctagcttcccataaatacccaaaagggatagccttaatcgtaccaatcaactcaagctccttaaacttggtcttgatatctttaaacctatttgaaccctgataggtaagacatcttgtgaaatgttgagaagctggaagtttaagtttagaagccctctgcaaaaattataagcaaacatattaaaaactaaaaaaattcatatcacaaactgtgtcttaaatatgtcgtgagaagtcataaaaatagcgaatctagtttagcaatattttcacgacatctgtttaattgtaaagcaactttgacaatatgttgtgttatgttgttattgaacatgtcgtaagacgtcgcagaacatattgctatatgtcgctgattgtcattatgcataaagacattagaacgatatcatggaatattgccacgaatatcactagacgtcgcaaaattcatataaactgataaagtaaacagaacacatacgccattaggggatatcaacaaatattgctatcaatgttgaaaaatgtcgataaattgagaaaaactatggaattgaatatgcatcatcaaaatttaaacccaaacacaaaaaaatcaacataaaattgaacaagttttcttaatctcaaccataatcaacaaaaccaacacaagtttttaatacaaaacctaaaaaaaaatgaaagaatcactcaaaaacaaacaaaataaataaataaatacaaacttaccaaatcttgtgagaatcatgggtgggtggctcgggtcttgttatccacgtaaacaatggtaaaaatggttgtggacggaaggactaggtatcggttttggggcttcggtatttcttgtgggtctttgtggtcgattcttctcgtggttgggtatagaatgctcatttgggggtaggtgtgggtgagttcgccatagtgaaagagagagaaatcgagagggaggggtttggtttatgagtcgtgggttgtggccggagtgagagtgtgtttgagagggagggagttatagagttggagagagatttttatttgaaaacgttaagagtgttagagatataattacaatggaagaaaaatcaagatacattataactctattgtaaaataa

SEQ ID NO: 298725 - DNA, 999 bp, Cannabis indica
ttttttcaaatttttagtctattatataaattcttcgagataaattaaagaataactcttttttgtatccattaattaaaaatactctcatattatattttattaaaatatatctattgaattatccaatataccttcattttctacttaagtctagcatataatttacattaatctaacgggtataataagaacattatctataaaagtgagtatatcttaaagaatatgagaatgaaagtaaaaattaaaacaaataaaataaagtgggtatacaatataatttcctcaaattttttatcatagaaaatcacaccaaatataatttattagtatttttggtaatagattatggatcgttaatttattatttattatatatatttatcttaattaatgaattaaaacaaatatgggattatttattaattgaaaaggagacacaccgatatctaatcatggttgatgatgattgacttaaaaagtcatataaaagttaaaatgaaaatgatataataaagttgaaaatgtcgacataataaacttgtataacataacctttcctatcctaaattaatatataaaacgtgcacataacctaacttttccactcttaccatttcgttattattgtaatactatgttctatgtcacattcacatgaaacattacttcaccatgtgaagtgtgaacctttccttaaaaaaatatatattaacatcaaaaaaaatactaaacatatcaatagattatatatttctttcttcttgatcttcatcaatgattgaatgataaatttataactagatagattttattatttctttcctactgaagtaatataattaaagaagactctattacattacatgctattatgtgacttttctttttccttctcctttatttgtaaataataaaaggtgtaaatcttttaagtgtttgcggtgcgtgtggtgcggtttttaaccattttttaaaccaacccacacatgcggt

SEQ ID NO: 298726 - DNA, 1688 bp, Cannabis indica
ttggaggcattatcttcctgctaatggacatacaaaatccaaagataatgtcgttgacactttcccgagggttgtccaaccccaactgctaagggaacctttgttgtcaagttttctgtgactgttgcaatgcacactactgaaaaagttctgcccagacataaaatgatggcacgaacaaagtagaccactagaaagccttcaacatctggcccacatattgctcgtttgtttgctgtagttggagtggaacaagcctgacctgcggtcgaagaagaaaatgttactgatggggacattgaggtccaataagttgaggaccaaggcaaggtccatcctggtactccctctgaggctgaaggagaagaaggagaggaggaagagggggtagtctgagtgctgccttttggtggctttaatgataagggagaacctacctctaaaacgggagatttcttggaagctatctaggactacgtagaggaggagtacaccaaggctcactccataaataggaggggtctaaggggagttcaatgggtttctccaccatccgtcctaacattcaagagattgaccaatattttttaggatggcctccttgggcaggttgagtgtttccttccttctcctgggatacttgtaacggaccttagagagggctactatgcgtggtcgggtcctcacgccaagcagggtgcaatgttgccattgcatccgtacttcaaggagattgccaactattaccacatcagtccaaccccaactcaatcccaagggaattaagtacttatctaccctattcgtgctatacgcttctcaagaatggggttagacatccgcccacaacaccaactggttgtttgacctgaagtccagacccaagcagaacaagtctgggtacttctacttctccttgatcaaagaaaagtagttgagtggcaccacaaataccgatgtgtccaagattggtggttttgtagaggagtactattttgtcaaatgcatggacactaatcacacaagcttttaacacattccctcgtactgtcgacctcccttcacactagaacttaggaagagggcctaagaaatactcaaacttcccttggatgctcagaatatttctctcttaactactgaggccaattttatcaagtataaactctatctgactaaccatggtcaaggggccaagtaggcagtagaagaggttatgttcgatcaagaagaggaaattgtgcccaaacaagaaactccgaagaagaagaaatagaagaaagctcctcaatatgaccaagtacctgtcgagcggcctattaggatcagagatggtcttgaggaggtttctcatccttccgtctaggtggaagaaaagggaaaatctattgtggtcgaccaggaagaagaagactttttagatgaggatgccccttccttacttgtttcagagggttcccttgtacatgtgcaaggtagactattttctcctaactttgtttacacttgctttatttatgcttttctaacatctcttttttacttgtgcccagttatgtctcaaaggatgctgtgtgcactaaagaagaggtcaggtgataccttcggccaaaagtctctagtaaaatgtcctaaggttgacgatacactaccaaagtattgggttttgtgtcctaaataaaacccat

SEQ ID NO: 298727 - DNA, 1611 bp, Cannabis indica
tgagtttttctttttttttttaaataataataataataataataataataatggaaaatatctctaaaactaaaatcaaaataggaaggtaataaatgagtgtagtgtgggagcccccagttcctgcttatcctcttttgtcaaagataacaagtatttatgtttttatttggctcattgtgtgtgtcaatggtcacttattaatatagagtttctagtttctagtaactatacctatatattaatatatatttatttatccatatttctgtagtttcctatatcaaataatttgtaattatataattttattttattttttttaataaaaataccagttatttattaaattgaaaaatctgttataagtgtggcaactaattcaggagaaagacagtgctcttgaaaaagtataacctggggaataataagaagcacgcacaagaatataagcggctttgttagcagatcacttaataaaacataaagaaacatggctagaaaattttaaaaaagacttttacaatctgatgaaacaaccaagtcaaattgagacatcatagaaataaaactagaaataatttgaaaacaaactaaactatctgtctccaagatcacatcaaaccacgtatgacgaacactccaagaaattgctagcactatcatgggcaacacaactcataccgaaccaaccttcatgctcaaagagtgcaccgtcaacattaaccttgatctaattattcactggtggaatccaatgctcacttcttttattagtagtcgaaactaatgaacaaagaatcattttgctttgactgagcattcaaatactgatcaagaacaccttttgctgactgaacaactgctcaagaagaagtcgacttcttatcccaaactaccttgttctgagctgcccaaattctccatgttaccattgcagcctcctagagcatgttcactccaaccttgcctgataaatctctccaccatgacttaaaatcagtctcaccccagcttcctatatccactgatgatcgaaaccagcgagaccgagcaaaagagcaacccaccaatacatggaaagtagtttcaacactattattacacatagggcaggtagtacttacgacaacatgtttaatcgcaagttgatcacaagacggcaacacgttggtctcccaaaggaatacagcaccttctggggaactttcaaactccatagctgcttccaaaaactagaaacatcatccgttgcaggaccattattcaactcatctaagtacctataggcactttttaccgtgtatatagccgacccctcaaaggaccaaaaccaaggatcatctcaaatagaagaactcaattgattagaaaaaataagctcctgatcacaacaagttgcgagccacctctatatcccatgcccgagagtccatcctgaaaagagaagccaatttttttatcacctaatagggctgagtatcggtcggtttttttctatataaaaatccaaaattcagttttcggtctggattggtgcaatctgaaaaccgacagccaatctagaacttatcttaaaaccgaccgttttgaaccttggtttggtcggtt

SEQ ID NO: 298728 - DNA, 3919 bp, Cannabis indica
aaaaaatttaaagttcacgcgactctaaggtttggatttaatgcttctaacaatgaggttaagtatgaagccttaattgcaagattaaacttgcactttaaatgaaggttgagtatcttgaagctttcagtggttcataaattgttgtttgccaattcaatggagagtatctagcctgaggtggccatcttaccaaataccttgtttacacttataggttgttgtccaagttcaaaaagattgtggttagctgaatacctcgtactaacatctcatacagatgccatagcccgattggccttaactcgtgaggccaaattactcaatgtaattcttgttgacatactcgataaaccaaccattgatcgagaagaaattatgtagataaacgaagacaactaggttacatgaatgacccctatcgttgcatatctaaaaattgggaagctttcagaagataagaatgaagtcaagagattatagtatcgagcgactcgatatgttatttataatgaaaaactctaccgcaaacgttttaatcaaccccttctaaagtgcattaatagtagcaaatgcgactacattttttgagaactacatggaggtatatgcagtaatcatactggtagaaattctttggccctaaaaattatgcgataaggatattattagccaacgcttcgtgcagatgcaatcaactttgccaagagttgtgacaaatgctagcgtattgcatcatatgtccattgcccgccaagtaacatgaactctatcactagttcgtggtcattcacaatttggggaatatatctgatcggagaattttccaaaggcaagggaggggtcaaatatgtaggtgtcagactcattcgttgagatcatgacatgtggtgtttggagaccgaaggtcatttaatccaacggttatccaagtcacgcctgcacaaaccccgaagggtctagtgacgtggcactttggaaagataggaataataaatgcaatcatccttttaaaattctcgacaagacaaccaaaaatcctcgcgatgttacaatacaactagcttgtcccttaaaaatatagttttgttgttgacaaatagatgtcatcgcaaaactaggggcatgtgttatagtacactttttttgtcttgaaatatgagtatagtcttgtgagaagtggacacatggactcaattctcgatggaaaaggatggcgtgtcaatataatggctttcctagagccaacctcgcatgactcaaacttgcgagaagatgcgatcgggacaagtgtttagtcgcataattatgtttggcaagagaagttaatattgatcacgcatatcgattatgtgtgacgaataagtatatctctctcgcgataagtaaatgcagattctttacataagtgtggtctgaatgactaatgtgttcgatgactcgtcacaaactcgcatgttctaagtcgtcgacgcgcgaaaaacctgagtatgcgatcaaagatgaccacagacattcataaattacaaaaaaggtctattagacaaactacgacttagtaggtcatacatgttgttgcaattaagacaaaaacggataaaactgttcttacatttactcttggaatgtttttattaatttaattctttgtaataatggtcctatctgatcggttatataattttaaaagatagttactttctatataaagaggtgatccaaataaaataaaaaaatctaaaaaacaattaccaacagcggactaagcacaccaaatttttgtaattattgttctagcttttgtctatttcgtagccaaaattttgagtacttgcaattctaagtaagtactcacataactgttggtgattgttcttaatttgctcaaatactcgcattatttaatgttgtctaaattcttccgataacactaatattaaattttattttttattattaaattaaaattgtttttaataaacttataatatattagtaaaaatattgtatacttatttagttttatactgtaccaaacataatataatactaagaaaattaagtttaactttagcaaaaaattaaattaaattcaatctcctccaattcaatcatatctaatatatttcaagcgagtccaattatatgcaaaaatcgaggcctaatagtggctggctacagcctcttaagatccatattcaaattaaaggcaccaactaatttcttccacgatttttcatgaaaaacaaaatttcaaacttcaaatctcattaaaaacaaaagaggaagttatggatgcgaaagtctttatagaaaagacatggctggaatagtcaagttagtgatataaggcatggaaaaaggacttattaatctgtaattttgtattatcaattatcatccaattttctagtttgaccaatttcatacgaaagcaatcaacaggactagtggaacagtcaaaggtttcgtatttctacattctactaccccaaaatgtggcaccaaattaatgcatattctcattttacacgtttcatggtctctggaaaaagacacagatcaggtcaaatataatataagatggtgtaccattgcttatttggctaaattatgtgcaatggtattgctttaattgcttgatctctcacaatgatttaaaccaaaactttcaccctatttatttttcaaaacatcatctaaaacaaagccaaaatgggcaactacagaatatttatttttcgaagcttcacatattggggtgaacctaaaataaagttgaagtggaaccattacatatttatattatgtcaagactttaaaattttaataaaattataacattagatataataaaatatatttaagtatattaaagtgattttaatgaaattttatattttcaccttacactttgttgctatataatttaattcccatcaataatattttaattttttttttgttaaacaaaaaaaattgaaggtgtagagtgttaaacttgtgtgatctccttaaattttaaagaaatatttactgctatatcaaacaatcttaattaatattatttgacttagaaaagtatttgtataaatgctcaaaaaataatttagacctaaatactaaatagatagaaattgggtgggtaatgagcgaagaatgcacctcccattcatgtcctcgctccctatttatgtccctcatccctgcacctgcctcgcttaatctctaatgagttttggattggaaaattcctattggatatggaaactcttgtgtatccataaagattataaaaatgatagtaataaaataacacaatgtaattcaaaatgaaaataaaaagagttttcgaatttgaaataatcattctatctaatttgtactttatattctttataaattgtaaagatcatataagctagaaacataatcaactaaatatgttgatgttaaatttgtaagtacgtactaacaaattaaataagatattgacaatcgaaattgataagtagaacattaattattataacagtaatatgaagatagttgacaatcatcaactttgtacccaataatttaatatgattatacgaataaatatttagaaaattatttggaatttatgtattgggattgggtatggggtgagtagtattacctctgatcccgccccaaaattgcttcgggtatataaaattatcccttacccctaccccataacccaccaaagtgggtatttctcgcccaattcggggtggatgcccatccccgcagatcaaaattctatctcctaatcactccaactaggctacacttagcttcactcctattggcataaccaatatactatcagtttccatcacgtcattgcaactccaataataaatactaaatttagtgttaaatcaacacaaaa

SEQ ID NO: 298729 - DNA, 1147 bp, Cannabis indica
atttcaaactgcattttttttgcagtatggtgcgatgcgggcagtttgagcgggttgggcggtttgataaacacccctaaaaataagtaatgtttttaatttgacttagtttttttccccaccttctctgtcactgtaaaaggtcctttctgcttcacttttcatgataaattcttaaggttgaacaaggattaatttagtaaaaattttactttttgatgattgtgatagatagtgtgtgcacccaaattttaatactgtgtatgtttcggttgtctctccttcaaaatattgattttcatatttatactttgaagtcccaatgtcccatctattaaattaaatcatataattaactacagcacttcttttaataacttttgaagctatattattcttaatcatttatacttatatttaaagtttgtacataacttttctttgaattaataaatggtgtgtgatctaatgtgagtgatcagattgcactccaaatccaaaccctagtaagttgtaatgaagaaccgtattgatgaagcaaggaaacgacagccaaaagtgtcggcagagttttcacattgccacattggtatttccattccatataattttataatacacctgaaaatataggaagatttggcctattttaaaattacttttctacatatgaaaatgtatctttctttccttaaggattgacatatctttagatttgatcattttgtgacgtgatttaagtcctactttattcggagtttactgtggtagagagtgaagagtccgtgcatttttcacagataaaagttaaagggccagacaagaacaaatgggccccatggcccaacttctggagtcttctgtctttatttttttttgtacatattataaagtttgtacgatggacagtcttaattgttttgaggtaaaatttagtgggcctttggcccataaaatacacaaataagttacttcttatgaaagtactaccaacatcttacttcccttgtcagaatgccattgtttaaagggctatttacaaaaatatgggaaaatgaagataagttttgatatatatggcataaaaacttaattacactaaatatgacatttttttaaaaaaacttacaaatatgggaaaaaagtc

SEQ ID NO: 298730 - DNA, 5137 bp, Cannabis indica
aatattttttattaaaaaaaaatcttcatataatagttatctaaatgttttaaataagtcaaaatttataattatctcatacttctagttataagtaaaagtaaatacttactcaaataagtatccagtctagcataattttaaattaataacttcctaaaattcaaatatttttggatactaactaaaagcaattcaaagtatttggataaatttaaaagaaagtaaatatagtaattattatttttgtgtaaaagtaagtgttaacacaaattttcgttgactaaatatataactttacataataaatttactacagaatttaataataataatgagcacaagatattttacgtgattttgtagtttaaatctacatactccacgagtccgtattattagggatatttatttaaatgcatagtataaatctcagtattaataaataatagaattctctctctattttgtcgtccctcttcccatagaatctgctcctatttataggtgtataggctggcaattatttttattgggatcgattcatttacaaatgctaatgaaacgtggatatttcccactttttatttatttgtatatgggataatatctaataactacctaactgctccttgtctttatcctttaaacggttatgctgactaatgaatttatttctcgctgagtatgaattatccttcttatttgtcttgagaggaaagaatgctaagtgtagacattctttttctcgcaacactctcatattgtagtgatgatgcgagatgactactacgtcgcatagaaagcgagatggttgagtgcagttattttcaccctgttcatgtatgtgggtcgatgagttacaagcttcttgatgtctcgtcttgtaagcttctatcatatactttgtttatcttgagattgacatattgccttgtcaattatattagtttaatattattattcttatctcgcatatgatttaggtcgtcagcaagtttgaacatttctaccaactttaataattagaacaaattatttgaatcgtatttactaatacaatttaattattatattcttcaagttgatttatattctttttgtaggacacgtgtcggtctctgatgaacagtcaaattttcgagtataacaattgccccctaaaaagtactttttaattaaaaataaatttttaaatgctcttaggggtataatcgtatttaatcggttttgaaaaattgtatgctttgagttttggcggttcaaaaaaattcgaggtacatcattgatcctttaatgccctgattattcctcttttacaacgttcccagccgttagaacagattttcttcaatcgaacggtaatcacctattaggtataaaatcaaaactgcacttcacatttgacatttccttctttcaaaccttcaagctttttgcaaaaacttcaaccgtttccttcctaaacttgcatgccctcattatcattcacatttttctatgtatttcattcaattgtacctcccattctagacattatcacgacccaacttttcaaccttcgaagtttcaatcacgaagttttcctctgtccaaaatttttcgtcaaaatagtaagtgacatattcctttttccttattgatatttcatctgtcttcataatttctattccttggttagtgtttctctatctgcattattttgttgtttgggtaattttaattttgtttgtctgaataattctaggtctagaaaatttttttaggttatatgatttgtagattttttgggctgagcttgtgttctatttttatagtaattgggatattattagttatgaatatgtctcaattttttctagaaatcataatcccagaatccctagaatcagtttgtcctcaaatttctaccatcaaattcagacccgaaacacataaatccccaaccattcttgaagtaaataatgcaaaaattaggggttatctctagaactagccaagatgaaacctctagtcgttataggcaattcttacaagagataattaagggtaggctccccctgaacacaacttacaactttcatcgaactctgctctccaaagagcaactcttctcaaaatctcaaaaggtgttgagttggaatcccattctaactaaggattcttgtggtttcgaaggatctagctacaagataaccaggaatagagcgagaagctgcttaactgaacctctaaattcaatttatattctcttagcgagaccaatgtttttacctgaagtcagtgttacttttttaccaggtaacttagattttgaaattatggccaaaaaagcacacaaaatcaaagacccctcaagaccctatagtcacctttgaggctgaactgatagagtctaaagttagattaataggatcttatgttggggaagtattaaaatcatgtggcatcaaatatgagcaaggatgtcgggttaggtctatcactgagggggagttcaattgttatcctcctgaacgtgtattttgagaagaagggtgtaatactagcgagccatctaagataggcgcttggagcctcgaacatataagagctggagtagtacgccctgttaatgattatttcaaggatttctgtaattacctcgatattgccccattccagttggcaccaaattcatataggatattcacttgtttaaagtctttataccatattttgaagtgggagtgcccgaccccacttgaaattctttaattttattctgtgaagacctttcctgcaaggaagcgaggagcatgtagtttttactacctcggaacccatactaattatcataggatcattgtaagtctacccaataaaaaagaattcaaggatgaattcttttggacttcatgtctctttcccatcaacacaaccaaattctaaatcatacgtaagtattgtcttttctcaaaaatttggttttgagttttaatccattaaatgtagactttatcttactaattttgtttatatgttgtattgacagcgatcaccaagaggcctattccaactcctaaaattgaaaaaaggcataggattcttcttggcctttcttttgggttacgagcagctgatttcttgttgcacgagaacaacttgaaggcttgtgctctccttggcagcaaataatctactggagacttcaaggtcccaaaattctcaaactagcaatactttccagttcctactaacgaataggatagagactatgtggcttgcacccacaatttgaagagcacaaccccttgggaagctaaagatgatgcctcccaaggtaataacgtttgtacttgtggatggtcctcgactgtacttagagttgagcgtactactttagttaaatttaaggatagtcagtacaacttgtacatttggaattgtgtagatcgcattcctgattggtttgacagttggtatcctaagcatcatgtccaattaagttgaaatagttcttactttgggactgccaaacaatatggtactaacttcgatagggcaagccatccagattgggacatgtctcctctaaaccactttggttttttcatgattattggttataggaagtttagtaattattttagttcttcatcctcgtctgatgactatggtaattttctttagtgggagattatctcaccgcatttttcttgtttattttgtacaagtgttgatattttatcttttgtctcgcagacatggatctagatttcaaagatgtgttgtgcagtcctactggccccatcaagaaatccaagaagcgcacaaattcaataggatatgcctctggatcaacttagaagcctttgaaaggatcaaaaagattgccaacaagaagcgtgcctcgaaccaactcaccattgaactagaaaagtccctagacaatttactgccccaactgttgtaagctctggtgaacaagccctagggtctgttcatcaagtcaaattctcgagatctccacccgagatggcactgctagagccctcttgcccctacctatctatgctggcacagagggttcgtagatatgctcgatgcatgctaccaataattggtgccattataagaccttcgagcaaggtgattgggatttaattaacaacgacaaactttcaaagtcttatgacaaggagttatgatctcatgcagtcagttagtttgtcttctttttttttactcattttacttctctcctgtacgtcttcctctgactttacttttcacagccatctcttctatcatctgtggctcaacaaagaggtctccaaaacatcgagatgcttaatgcctagctttgcaaatctagggaacattgcaaagtttttggctaagcaatggactgattcatagtcagagatctcaagagtcaagaaagattccaaggagcaataaaaaaccctcaaagcaaaccttgaggctgcccagataaagatcaaggaacttgaagaggcgaaccaaaaagctcaagttgatgctgagaaaaagcttgaatatcccaacgttgatgccaaagctagggttaatatgatcgataagcgatctatttattgagcttggttggccaacccttggatggatttgagttttctgggagccaagactaaagagatgcgagcattctgcgaacaaaccaagaaggatgagccaagaaatgttgaggaagaggtcgaggaagaagaagaagaagaagacccaaccaagtctccaaccatgtagacttagtcatctttatttttattttcaagcaatagcctttatgccgagacaatagtttgccccttgtggtatttttttgtaaaacttttactttgttggatggccaacaatgctaatttatatatatatacttttataccttttatcctgcatttttcgagttatgttttttgcgagcaatttgtaatctgttatgtttagagtaagcttcaattattttgaatagttcttttaagaactattttaatactttttgattacttgtatgaatagttaattctttaatcatactttagcttgcgtattattttttcaagacacatttgtgtcttgtttataatacatgatataatcatgcgagccgttattt

SEQ ID NO: 298731 - DNA, 1696 bp, Cannabis indica
gtaaaataattccaacagtttccaagatacccagatagaattcaagagctatatatattctagacttattattttatgttttgatttaatgtacaaacatctagaaatctattgggatatggtacaatgataatcagcaatacagaattcttcccatgcgaatctgatttagtaccgttaaaccaacaacactctcatcaattgagctagagtgcatggctagcaacagaagcaataaggaagctatatggctcaaaggattgactaattaatcccacttaaataatatcatactgcactctatttaataaaaaatctcatgttctataagagatctaggcatataaacataatgttacactttgttagagatatcattactgtcgaaatagttggtgtgaagatcaacacacatgttaatctagctgacatgcttacccagcctgttatatgagaaaaatttaggctatgcctaagcttattgaatattgaagaaaaataacctttgttgagaggtcactacaaaaaatcttacttttagtcacaacaaaatttgtgactaaaaataaaaaagttgtgactaattatttattactattcttatgttgggactaaaaggtccttgactaaaggtattagtcacaaaaattacaatttgttgtgactatatgtggttttagtcacaatacttgttgtgactaaaagtaaattagtgacaacttgtatctaaatactatattttagttacaagtagttttctgttgtgaccaaaagttacatttagtcacaaaaatttatgttgcgactaaaaaattatcactaaaagttgttgttttttgtagtgggtactcatcgattgatggaacaaccaattctttagttgttattacttattttttttagctcaagttatagttatattttaccaaaataggtggaattcactacaaaaaactggtaaccaattagatactaaattaatatttgaagatagattttgaaaataaccaaagataaatcatattttaactggtaaccaattagatactaaattgtttaaaagacaacaataagtagttattttttcagaataataataataagaacaaaagaaaaacagaaaagaaagaaataataaaatccatctaccaagttttcttctcccctttttgcacggggagcaggaaaattcccatattaccaaggtaagtttttttttcccttcaaaaatgggtaaagaatatgtgtaaattcttgaaataatacgtaaattttttaagatatatatattttcgtatggataaacttattttaaaagttattatttctgtaataatttctaggcctattttgtcgtaaataaatcttggtattggagtaaaaaaattccaaagaatgtatgttgtcattttcgtcactaaaaaataatagtgaaaattttgtgggcccatccgtttataatgtagcccatctgttatcctgccacactttttgtcccgatccaattatgatgcccaagttgagcccgcttttatatttacatcagagaaataccaatttattatttgagcctctagatattcagaacagaattacgattacttttcttatttattttgggaaatttacacagtttactgtgttttcccattttctttcttttatactgttacactccaaaaataacttttgtact

SEQ ID NO: 298732 - DNA, 1050 bp, Cannabis indica
tttagctttcctttttataaaataggttgaaaatagggaagctaaaggctcatattgtagtagtgagatcttggaacccaaacctggaccctaacttcgaccccggacccaaacccggcccctgatccctgcttcagaccttaacttaggactgagcatgtaaaccgttgggccgaccaacccaacctgaaaaataggccgaacatgctgtttaaaagtgggccgaataccaaatgggttcataaatagtaaacccatagtgtacaggtcggtgtacgggctaggcctttcctggcccactgaacccaacccacattaaattaaggcagaaaaaataaagggataaatagattatatacatataaaagcccttttctttctctatcataaattctaaccctaagcctagcacattttgccgcctacatctcttatgtggacaaaatctctctccctcagcctcaagtctcaagtctacatagctccatcactgtcacttccttggtagttcaactcttccaacaggacagtgacgacaccaccactacacgtcaatagcaccatcactatcttcttagctccaccaaaagaccaccacatctaaaatggtatatatattatattccaaaattttgttacacatttcaacactaactagtttcatttatcatattcttaatgttattttattttttattttttagatgctaagatttgggtttatgtttatatattgtaatattattttatttttgtttttcattttgaaagaaaaatggtattctagtccattgaaaatgtattttgggcattaaactgtgagaatgtggttattttcttcaattaaatgttccaactctagaaaaagagaacaaaggtttaacagtgaaagcctctgtgacagtcagtagtcccgtgatccgtaaggggaaacaccgggtaagctatgcaatcccacatcgcctagggaaggtcaagtgtgatgattctgaggctgtgtaggtatgggactacatagttgaagagagcttaaatggattgattgatact

SEQ ID NO: 298733 - DNA, 3616 bp, Cannabis indica
tttttttttttaatatttcttatttgggggctatggacggcgaagtagtttaagaagaaagagaaaatgaatattgaatgaaatgaaatggtgatggagtgagtttggggggaatatatatagggatgggtttggtttggagctgaagaagtttgacttgatgatgagataaagaaagggaaagagaaagggtattgtcggaaacggggttgcgtgttttcttgaggtctaagaaagcgtatagtaaggggttttaggtaaatttaagaaacatatggtttagagtgattaccgctttgtttcattggtacgtgcgtcaccgcgttgatcaataaggaatatatctttggaatgaagtagtcgtttgcggtgagctaatggaagttgcaacctttgttcttctctattattgtgctcttttcctttcctattctatgctctatgttctcttgactattctagaaatattctactccccaactcgcatttcacttccgcacctcacgcgctattctttagtttccttttgttttatcttatcctaattgttatgagtttctatttttttaatatttttattttaacatctttatcttgcagatacccgattctttgaaattaattttttaaacaaattcagtttgcttttttaggcaaacaaaatattaatgtaggtgaatgtggttagtaaaatttcatttttcaccttctattattattagtttctttatttcacggttgtcaataataggaaaaaaataatcaatataaacatgcaaactaatttttaatcaatctgtttttctaaaatatatttttatcccattttatcaaaatttaattctttcaataacatgtattataccttcacttttcaagtaaaacttgaaactatattccatgtaaccaattttctgaaatgtttcactaattttactaatattgattttttattaatttcgaaataaataaaagtatgaaaaatggattaagataaaacaaagataaaataaatttattaatttaggttaaactttaaccttatggctaattaggatttttttctctaaaactttaacatgtactaaatcatgtcccttttgttagatttaaggatttttgtcatttcattcaattttactctttcagtgatggttccccgaactttaatatctaccaaatcatgccccttaaactttgatatgtactaaattatacctctgaactttcatccatgttagaatttttttattaaaattagacaaaagtctttaatctaacaatctcattaggagaatttttaacggccaaaaaagtttaagggacataatttggtacatgtcaaagttcggggaaaaaatactaattaacctaaccttattgattattattttttagaaaaagattgattattagttttattagttttgaaatttacaaattatgatatttaattaaaatacgaaaactaaaatatatttttcttattatttaaaaatattaattttagaatataataatcaatattgataatgaagtgatgggattggtgaaagtggcgttaacgctagttaaattcgcgtagtatgataaattatgggagaagaaaagtaagtgtgaaaggctctctagtagtaggaagtagcagctagtatttttcaagatgacattgccaagtcactagaagtgaaaataaggtatgcgtggtgggtgttccaaatacaacccaggaaactaaacttgcttcgtaagcacccacgtagacttggtgtgttaatttcactctaaattaattaatgatgaatttattattattattattttttttattttttggaagtgactcaaacttaatttcaaacaaataatattctatattttacgcggcacaaaaagtgcatgccactccaacgtaactcacctatgtgaactatatcttcttacctaatcactaatactatatactattagctaatttatatatacaaatcaatagtttctggaacaaataatacatttcttctcttatatatcttagtcagctgttgtgttctgtttaattacaatttgatcaacttcttcttaaacaagatgctaaagtcttaacgtgttaaacaaggtatgttgcacaaataatgtgtatatcgcgacatatggtgttttttcaacatccgcggaaatcccaactgctcagaaatgagaatttaggttgactttttcctcagtttacactgatttttgtttgaactatataacgatgatgtcgatcgggaagtttccttggagttgtcgagtgaccataggtacggaaacttgtaccaaaaggacaatttatattgcatgaaatgcaatatattctttttctgaattaaaaaatatataaagagttaatatgttaaatgtataatattatgtacacgtaacttgtgttgcgtgtgcttgtatttttatgtaaaatatccacacacacacaactaagtggatggatgattacatgaataattttttttgtcttgtagcaaaatttggtgtggacagagaaataacaatttggttctttctctttctattggcccatatatataaatattgggaacacgattttatcctgtgatgtacgacagccgttagatggagaagttatttgatctgagggctagagttgatctaggggtaattaaggttaaaaaatagtaacgtaaagacccatctaatgtactacgaagtacattctgtaaaagtacatcacgggacaaaatcgtgtccctataaatattttatccaatatatagatatatagaattcgtttataaaattttattatgtaactagctagcgaaaaatgaacttataaatgcaagacttaactggacacacactacaaaaagcaattcttttaatgataaatttttaattacaatgtaaatttgttatgtaatttttagtcagaacagaaaattacttataattaaaatataatttttaaatataagttgtcactaatttacttttagtcacaacaagcattgtgactaaaagcatatttagtcacaacaaattataatctttgagactaataactttagtcatgaaccttttagtgacaatataaaaataatcatttataattattagttacaactattttatttttagtcacaagttttgttgtgtttaaaaataattttttttgtaatgacaccttgaatcatgaatcttaaagacttgtaaaagttaatcaagtctttagtatttactactacaaatttgggctttagaggcagtttttaaggccttttagctttacttttgacaaaagtcgctactgacaatgatccgtgcgacgctataggattgtaaataactgatggtaaatgttaccttatggcgtcggttattattaaagaaccgacgctatagtgtacatatggtgtcggttatatacaaataactgacgctatatacaaacataaccgacgttgtaggcctaaaagctgatgtcaaattattaataattattcttttcagttcaaaacctattataaatcaagaaattttatttatttaaattataaatttactaatgtatattaaatattatttaatttaaatttaa

SEQ ID NO: 298734 - DNA, 2734 bp, Cannabis indica
aagacggtggtaaccaaacccgaaggtaagaaagaaattcaggctcaaatcttgataatgctatgcaatagaaaggaacaagggttagagatctgagcggaaggagtcattatattctgaccaatgtaaggttttctaaattcatatgtgtttaatttcattgttttagagatattcatatttaggatgctaatcaacatacttgttagtaaatctagatcctagtaatatattcccaacaattagaagcagagggaacatcgatcactaggaatttaaccattacagatgcgcttgttggagcttttcctattgtgattggtaggcatgtgtgttcaagtagagcaattctttggccacaaaatccataaaccagttacgtgtagggagccaagtcattgagttgaagttctatattctcatatgtttttttaacaaaatatttgaagaggctctattgtcaaccatagttcgagccactattttatttaaaatttgaacatcaacaacaaaaggatcattgtgaagataaattatgtggtcgaagtcttcttcactaaaggatatgactggttttgctattcatggttgttttggctttctttcttctgtgaccagtacttcatctctttgttcatattgtagggtccgagcatacctttttctcactttgttcgagtctctaacaatgtgagggcctcaaagaatcacaaggaagtttctgtccactggtggaggcaataattgattctaattattgtctggatggatggccttctaatcctgggcagtcttggcatacttctacaagttcggatcttttttcctgacgaggaattcaattttgcatttcagattattatgctcgtcaatgtcatgtctgtagtatgcatgaaaacaaaataattcggtggtgtccctcttgcttatgtgtttttttatgggaggagattttttgtacaacaccatggattgggtcattgtaaaaatagtttctatatcctcagttaggatagtggaagcagtaaactttgatgcattctccagaggatactgctcggagttgttgttgaaactacttttcttcccattaccttgctagttgccattatttgaccttttatcaccttgactcgaactattatagttttttgaagtctaactctgctggacgatgtattggctacagtggtgtgtagctgagtgtttttctgcccaattgtgtctacacggtgaactgcttctttgatctttataaatccttctgcttggtctatgaattatctcattgaccctatagtgagtctttcaatatcaatccacaattcccttagaggttcaatacctcctaagatagcggctagcttcccctctttagttaaccctttcacctttgttgcttcagtcatgaatctaataatgtaggctcttaagggctccccttgtatttgtttaacttcgatcagatcttctatgtgagacgagaatttcctaaaagaggataactgtgcatgaaactccgccatgaaggcattccatgaacagaatttacctgaggctaacatgttgtaccactattgggtgacctccactaaggtagttgagaaaattctacaccgtacataaccttttactcccagtaattccataagcatttcaaagtacttaatatgggacagatgatcttcttttcttgtgtatatctttcatgtttgcattttgaacttggcgacagataaaaggagttgatttctggtgagaaaggtgaccctctagactgatcgcgttctaggtccgtgagttttaggttggtcaagctgtaaggctcttaagttgatctatttgggcttgaaccactggatcaacttgacctacctcttgatcgacttgtgtgacttggggaccccttagaacattatcggagacatagttacttacatggactggttggacattgaggggatattttatctgtctcagagtgatttagatcatctgtttaggtagtgtacagtgcccaactagttagagactgattcacccaagggccttcttgtctggctgttatcagtagtgagttagttcagtatatccgtctgaggaagaatgttatgctaatcattccatcccaagtaatgagttggcaaaacctccccgtctaccatgcgtcctataatttgactatgtgaccttggatttgacaacctgtttgcttgagtttgctgagtattttcaactggacattcttttggctagtattgaggtctaggagggatgtagacattggtctttcggttcggatcatgtatgatcagagtgtctgccactaattattatttagttagctaataggcttgcctagtcaacacggtagcctgcctagaatggttgtgttgtggtattttcaacatgcaagtatacgtatcgtttaaacaagtaatagactcacaaatagtgaggtcgatcccatagggattgtagttaagtactttaaaattaaacttttacttctatttggataaataaaattaagaaagaaaattagaataagaaaaatagttaaagtaggaagcaataaagaaaattaacagtaaataaatgttaggacttcgatttcaattgtatctattgattatggcctaatatgattatcttccaattaccaatttctatgcaataaaaggtttactaaggtaatttattgtcttctcagatatataaacctcaattacat

SEQ ID NO: 298735 - DNA, 6121 bp, Cannabis indica
tctctctctctctctctcagacacacacacacacacacacactcttgacagtgctcacgtagacataaatatcacactcgttaacattgtaagtaatttgtggagtctacatgtcaaatattgagacaatagtgtaaaagtgaagatgaaagcttagcacgcattttattatattattgattttaatagttgtttttaacatatgaagttttataatttgaaggagaaacatgtggccttggccattctttttttaaaaaaacaatctgatggcactggcttgcttaaggcataactggattttgaccccagactttgctagttgatgtggctatgtctattgtatattgctttcatcttgtatttgcaatgtttgttgagctgccttttgctgcactttgttaacaatatattgctttcatcttgtatttgcaatgtttattgagctgccttttgctgcactttgatgtaacaccctcccttgcttgaatttgttcaaatgagattatctatcaaagttgctagttagtgtaaatacttactatcacatcatggaaataatttaaatgatgctttgggcacaatcctctcttgttgccaatttgtttccctttagtatttggtttttggtgtttcattgtggcaagtcttgggtggacgggcaggccaatattcttcaaacagctaatgctgaagatactaatagcatacaatgtgcaattcatatcatatatgtacttattgcttattgtatggatttattttaacatattgtaacggctcatttaacttttcaggctctcagttctgaaaaatcaaagcccaaaccaggtgccagaactggtgaaatgaatgcggcttctaagagtggacagcagcagcaatcctcattgcataatgttaatcaatatctacgtggtggaagtatgaagcctgataccccaaagacatctcatgggaagtttcttgttcttaaaccagtccgggagaatggtgtatctctttcatcaaaagatatcactagcccaacatataattcctctactattgcatttaatactcaagttgctgctgctcctccagttgtatctgctccgactaggagccccaacagtcagaaagttccctctcttgagcgcaaggttgctgctctggatttgaaaacaggaactgctttggagaagaaaccttctttgtctcagtcccagagcaggaatgatttttttaatctgataaagaagaaaacttcagtaaacccttcaacggttctcccaaattcaggtccccatatttcatctcctactagtgaaaaatcaggtgaagaggttagggaggcattcagtgctcctgcaagtcctcacactgttgaaaatggtgctgaagtgaatggcaatggtaatagctgtaaacaaatacagaggttttctgatcgtggagacgatgaatgtcccagtgctgctttatatcttgatgaagaagaggttaaattcctccgatcacttggatgggatgaaaatgctgctgaggatgaagggctgacagaagaggagatcagtgcattttatgaagaggtaaatatatcttctttgtatttgtattatctgttatgatggcttacaaaccatgaagatttacaataaattttttactgagttgttgagctcatgtagtacaagatagttttctcaaaactggactcttgttttactaactacatggtgattgttatgcagtgcatgaagaaggggtcatcttccttaaaagtatgccgtggattacagccaaagtttccgacgctgcctgaatctcatgctaaccctggtggagcttcgtctgaattaagttcatctgactcgggatctgatgcatgatattacttattacttcttttttccccccttacataattagatccaagaagttccaatttttttgaaagcagatggttagttcctttttttcaattttattttttctttttgttttgaaaagaaagctgatgagttgggtatgaaagaagagaggttgggttttggttggaactctgtattctgcaaatagtgcaataagttacaggtgccccagtccttacctttgctaaaacgggggtttttttaggttcctaaacagttgttagggagaggggtagtagggtaggggctgttttgtctggctgtgaaaggtgcttagaattgcgtcagttggttggtgttattttggtccttttccttttttcctttttttatttcaggagggtttgattcaaaagaaaaaaggctcatgctgttttggtcaattttacggaaaaagcaatcaaagaagttttatttttagttgacgtcattctttcgtttcttcttattttatttctttttatataaatataataattaatcggcatttacaacttgtttatgttttttcattttgctcctaacttatcatgcagctcatatttaatcatgaaatagatgtaaattggattttaaaaaccaaaactctaaaacccgctgcacttgggaaagaaataactattttattttaattgaaggtttaatgatatatggacatataagtagtaaaaagtttcaactaattatatttattttagatggtctattaacaagtgagttgctatataaataatatatattattgttcataattaattatttgaaatgattgcactaataataatgtgtaagccatttttaagaaataatattcatgttaaataaaaatgaattttgcggtaagttggtaggagtgttggcagtatgggttgtaatattttttcaaattaaattatacatggcttttataaattttgaaattgtaattatactgagattttaaaattgcaaaagttacactgtaaaaatgtggtgcggtacaatgctatttgaacaatttacattattattattattattattattatcaaatattacaataaaaatttaaaaattaatttaataaaattttaaaaatgtaaaaatatttatattttattaaattttaaaaataacataagtactaattatcaaattatttctaaaaaataatataatatacacattaaatatatttatttttatataaaaaaaatataaaaatcataataaaaattgataattttataatgtatagtgtagtacattttatttaatttaaaactgcaatgcaccaaacgatttgatagaaaagcaaactataattgcactgccaaaaactttaaactatacttttgatgtgtagtggtatactgctgacaatttatggatgaacagcctaacttagtgttgcaaatattattagtcctattaaaagagccacaaattgtagaggttgttgggtgtaaaataggtgtctgcattgcatttgccagtctcatatgatcttatccgattgaagagaaacgtaatctgctgacagggagagggaggtgagggttttatcatttatgtaatttaagtttcacctcaccaatgagtttttaatattattattttctttttaccaaaaatgaaaagctacgctcttagcaaaaaacaatgaaagcctacgctagtcaattatcactcaaaatatgcatccaaacatacaaagagaaacactatcatttaattattactattttcttatcaatcttatttttataagtatattctttcagaaatgacccattttaatattttatattatgacaaaagtattaactatgccaacgtgtattttttttataaaaaaataactaaaaataaaactattatctaatgtgttgacgctaaaaattatttcaacaacaaattaatattacgatattaaattttttacattagtttcaatttaatcgagatataaaatctctgtcaatttacacaattctctctcagtttctactatttttctagtttgcttgcttcacgagctcgaaatagtttcaagaatgtattccgataaagtttcgactagcctgatatgaacagaattcgtcctcttttttgaatgatgtgatctcctatttatagacaggagcgactgttagctcttcaccttctttcagttaagactgacctacattagttcctctctgtgtcttcccgcgttctttcttcatgttcttactcttcgaaattcctcgagctgtactcttaactctctcaggttttgctccacattctcatctggttaagctctgtattcctcactctgtccttttcctttaaatgaaacaatgtgtttattatacctgttatattgtttcattagtgtttcttatatttaataaacaaaattactttttttaccccaagatcatttttatcacatacaattgcctcttggttttacaatttttgagctcgtgactgatttagttcaagctcaaaattgtgaaactagttacctaaaataattcacacgtgtcattaatgagccgtaatagatttgatagataatcatttcaaatttttgagaaatcatccccgccctttctaatttctttgttatatttccctttttatttctattacaaattttaagatatagataaataaaggaaaaactaaaaaatttaagcaacttttgtgatattttattttctttgagtccctagttcaattcttcttctttgagtttttattctttcgccttagagattctgttatcctcaatgttgccttcttttgtcctctttttgcaccttgcaacaaagaattttagaacctccaagaacaaatctaaatccactactgagaaggcctttcccatgattgatcctaattttataatgaatatgaggtgacttttgtagagatttaatctcgatatccggttcgagatgaaattacttttggcttgctgacaaaagatgaacaaggtaagagcctagaggacctcaagatggctaatggtgaaatactagtgagtgggaagcacatggaacttctgcgcttccttgttcctcctttgttgccttatattctctccattactggagtttcaatgattcagcttgtccctaacttcgttcaaaggattttgggtctggcttccatttgttctcttaaaggcacaacatttcttactttagcagaacctcctgtctttctcgcttttatcacttggtacatttttatgaaaaatcctatttatctggttcttgatcttccgtcttcaaataaaggttgggacacctatgtttttgtattggtgggaaatggcttcccacgattattaatcttgaagtcttcaccatggctaactgacttgatatctcgatttgttggcctgctaaaaatttccttacaaatcgtagagataccttgttcaaaattgggaattatccaccactcgaaagatctaacttactatattaacgatatactgaccaaggaggtctttaattgcttgcttcccctttgctcatcttctacagttgattcttctgccatgccaatcatagtaaatatgattaatgtttattttaattagttgactgttaattactaggatttcttaaaaagggttaacgtcgctaatgattcattggttttttctgttgggaatattttaccaggatctagatttactaacaagtatgtagattaacatcctaaatatgaattctcaaaaaacaattaaataaatacataagggtttaagaaaatcttacattgattacagcagaatattataactccttccgttcaagatctctagcccttgattcctttctatcccagagcattatcaatctaaacctcgatctctttcttggttaccatcgttatactcactatgattgagtacttgacttgctatgtgcgggcatgacactcttttcactcaaggtttcgaataggtgaacaacaatgaaggaggctgaaattactaaggaataggaactctctcatctaggctgattgaatagtcaagttgacattagttggatgagtgagagcatcatgttccttatatagtgtttcaagtagggcttagggctaaattatatggattaaagaagaataaaatattgggcaaaaatccacttatgactctacactaataggaccaatttctagttagatttttaccacttattcttcttttcaataat

SEQ ID NO: 298736 - DNA, 2016 bp, Cannabis indica
agctcaattttcaacaattatatatttttaatataaccaaatttaagacaatttttaatacgaacatatacataaaatttaaccagttttgtcataacatctttagatcatattatcattaattttttttttgagaaaaaattagttcagggtcctatttacaattatggaaaacatagggtctattttataatttaacaaaataaatgatccaattgttaatttttgcaaaacacagggtccaaaataatattataatttattttgttgttagttatgtaaaaaaatacttataataaatattaaataacttaatatcaaaaagtaactaattcaaagtaattgatctaattgtagattggattggatttgaactattgtacgaatttaattagatcacaaatataaaatttgtacttagtgttaatcgaatgcattattaataaaacaatattactggattagattaacactcctaattataaactagaatacaataatgttaaaaattaatgtaaatatatggcaatatatatattttttttggggcaaatatagccataatttttggatgagatggtcttatttttccttatttcatactcataattgttgtaccaccagtggataacttctgcctttaaagctcaatttgtaagtagctcggaaaaaggaaacatttggaaaaaaaaaatgttaaaaaagaaataaaataattgatttcttgtaacctacatttcctgcgtatagtaacccttggcatgtgtaacataattaatgagcagtactactaattatagcacttgaaagccctaataattcactactcatttttgtagccaaaaacaaaaaaaaacaaaaataaaaacaaaagaaaaacacaggacacatttcagttgttgtcactacacctcacatatattaaagaatctctacatatatataagtatatataaacaattaaatgagatgagagatgtgtgatcctcaactactttcattgccaatttattttcttcaggttttgactttatattaatacaaattgatatttagattcaatttgatgaaattgtgtatttcataacgtggcatgtagaatcatgttggctggccaacaaaccaagtctatttcaaagtcaaacttattcaaatattaatgcattgcatcaaattttaagagcaattattaatttgccaaaaataatagatggttagtattaatttaaataattcaatagttgttgaaaatataaaaataagagataatgaaatttaagccatcaaagtgtgtaagaaatttacaactaatgtagctaaccattgaataactctgttcatatatcctaccaaaagttaaaaagaactctgttgtgtctgttctatgtattttagtacaaaaactacaaggaccactgagctaaaaatatatttttgaatatattcacacacactagcataaataagctcgaaataaaaaataaaaaaaaaaacgaataagaaatttgaatagattaaaattttattttagtactaaactcaataattccccctccccaaaaaaaaagagataaacacttgaattttatgcaaaataaaaaaggggtgttatgtaaaacctcacatcacatcgagcttttacacacctcaaatgagacaaatagaattttactgtagcaaataacttttttacttagaattgcaagttttgcaaccggatagtacctattgattggtgagagaaataatattttaatgggtttatttgttttgcaatttaacttttaaatttgagggatataattgtaaaatattattttttttggtgatatgtgtttttgataaatcaaaatgtattatttgcaaatgaccatgtattctaatgttttgattattttgaaaaagatatatatgtatatatctatatactaggtgaatgtacgtgtcgagccaggtattgatagttttatttaagattttaattttttaagattttgaatatattttatttttaaa

SEQ ID NO: 298737 - DNA, 1878 bp, Cannabis indica
tttgattttgcagcatattcccaaaaagtttacaaggaaatatggtgaaactttatccaattcggtgttgattaagcttccatgtggttcaaaatggaaaatggggttaacaaagaaagatgagaatgtttggtttgaaaagggttggctagattttgcagagcattatgccataaaaagaggcagcatattaagctttagatatgaggggaattctgaatttaatgctgtcatagttgatttgagtttagttgagatagactatccctctgttcccaccaatttggttagctctaacattgatgatactgacattaaaatccccaaaagggaagtttttgaagatgaaaatttggatgtgtttacaccaagccacagaatgagggaaaaaacttcattaccatgttcacggccacaaaagaaaatgagaactcaaagcaatccatgttgtcgaaaactcgagtcagaaacaaaaggcatggagaaattttactttggaacttactatgcttttcttagctttaacatatttggcatgatcattttaatttgttgcaggaaaacacaatttgcctaatgcaaccgggcaaatgaagctgtcatcaccgagccgaagggatgaagctagtgaattcaaatcgagccgaccatttttcaaggttgtcatgaggccatactgtgttcgtggtagcatgatggtaagccatttgctttaacaactttccacaccaatagtaatattatgcaaaattcaatatgcacaagaggagaatgtttgtcaaattatgatcataattgtatattacatttttgtttctatagaatttgcctagcagctttgcaaaggaatatttagaagcaagagcaacatgtagcaatgcaatacttaaaactcccaaatggttgtggtaggacttggtctgtgctatgtaagtttaaagtgtataatcatgaagtaatatcatcaagatttcaggcaggttggccagcatttgttaaggacaataatctgaaattaggtgatgtttgtgtatttgttctgcttgaggacataacttttacatttgaagttgtaatttttcgaggtaagcaagtatgatttgtccttaactacatagttttattttatttttgcatctctctttcctgttttacattcctttggtgaaatttttgcagaggacaaggatgccatggatggcgaaactgtcatgcctaatggacgtgtgactactcttcctacaccgaaaaagcaacaacaatacttttcaatgattgaaaaagctaagcttcttgaaatggctcaattcaaatctgaatatccctttttcaagattgttatatatccatcgtttctcggttcaaggtattatatggtaagcttctaacactatatgagatgatctttgcatcaagttcttttgaccataaattctctttttgcatttttggccaggaagtaccaatggaatttgctaagagaaaccttaagaaggagggtgatgccattctttcggtttcggacagtggtggatattggcctattcaatttgaaatgaggcacatgaaaagtaaggggaaagtgagagctgaattcagatgtggttggaaagaatttgccaaggacaatgagttgaaagttggcgatgtttgcattttcgagcttcttaaaagatccgaaaatttgtttagagtttccattttgtgtgctgttgatgataatgatgcataccacaaaaattgtcaaggtttattacttattattataatgtattcaaatttgatttgggcatgtgtatagatttgttaacattaagtttgtatgtgggcaggtggtggaagcaacccaaaaattgaagtgggagaaaaacttgctag

SEQ ID NO: 298738 - DNA, 6420 bp, Cannabis indica
ttgagatctagatggatctgcaaagggtgataaacaatgtccactgaaagatttttccagcgaccttatttgacaccgcacaacagtggcattttaagatgtccccagggagatttgattcatgggatgctttcactattgacttttacactcagctttcatcctctacacaaatatcgtctcaattggaggacttggttgaaataaataaaggtcgggagaatctttgaaagactatatctaaaggttcatgactgaagtcacaaaggtcaaaggtctaacaaaagaagggcagtatacaaccattttaggaggtatcctaccttgggcgacctttggagagacaccaaaaaaatatcagccaacaatatgagagagtttttggactgtgctgacggtttcataaaacttgaagaagctgtctgacaagtgcaaattagcgggcagaaaacaactgctcccaacaacacacctgccacaactggggctagtaatgctgctcaaccctaaaataacaacaataatggatgaaagcacaataatacagtatccaaccaagtaattggcaagaaggaaaaatttaataatccccctgcacaacagtatcctcgggaaaaggaagagaagttcacatgcttcactgtcctaacagacactcccaaaactatcataatgaccacacaagccattgttccgcataagaagcccctccaatgaaaaaaagacatcagtaagagggatcccacaaagttgtgtcgattccataaagatttctgccatgacactaatgaatgtaagaactttaaggaagagatcgagttcttgataagaaggaataatgcccaactatgttggtatgtttaacccgaccaaaactaggcacatgtccaacaaaataacgacatgttgcccccaccggttgctggccatttataggtcatcatcagtggaccccacatcattggggattcaaacaaagcattggatagatatgctcgtactctttgcacgagtagagaaacgaagtcctagatgtagaggaaagaactctaaagcagccaaaagtagaaaagcatgccatcaccttcactgaagaagatgttgcccatgtcagatttccccataatgaccctctaatcataactacccaaataaggaatatgacggtagcgcactgcataatggatgatggagcctcttccaacatcatcttcaagactgtgtatgagaagatggagctttatttgaaagatctaacaccctatacacaacttatgtacgagtttttgggccaaggactggctcctctagaatacatatgattgccattgacaatcgatgaaagtcccgcatagacagtcataacccaattcatagttattgatgtggcatctacattcaatgtcatgattgggcgaccaaccatgtatgactaaaagcagtcacatcaatttaccacatacgcatcaagtttcaaacaaagcatggtggcaggtgcctaaggggataccaacagtctgcttgacaatgttatagcatcgttctgtccaaagcaaaaaaaggaggaactgcctgccaagagctcaaatagtgagtttggctaagggcattgagggtccgcccaaggcgaggagacaaacatagatcctcactttagtacaaataactttaaactagtggaagaattagaagaagtagagatcgaccccccatgctggcctagaaactcaaaattaatcgcagtttagcgccagaaataaaatttgaattgatcaaatttctaagggttaaccttgatatttttgcttggtcgcatgaagacatagtgggaatcgatccattaatagtttctcacacccttaatataggtccaaacttccatccagtacaacaaaaacggaggttcctacataaagagtgagcacaagcattgaaggatgaggttgaaaagatgcctgcaaatagcttcatcattgaggcattctaccatgtttgggtttccaatcccgtattggtgcccaaactaaacaacaagtgacgagtttgtatcgattttactaacctcattaaggcatgtccaaatgattattttccacttccaaggattgaccaacttgtggacaccacagttgctcatgagatcctaaacttcatggatgcctatttaagttacagtcagatcaagatgtatctgcctaactaggaacacacaagtgtcctaagaggtgtaggcttgtattggtacatggaagtttatgtggacgacatgttggtcaagtccaataaggctaggggcacataaaggacctaaacgagtgttttaaagtcctttgagggtacaacatgaagctcatcccccttaagtgcttgtttggagtcaactcggtcaagttccttggcttcatagtgaatgtctagggaatcaaagtgaatcctgaggagattcaagctcttttggacatgaaaccgcccacgaatattaagaaggtataaagtttaactggctgaataatagcactaagcatatctgtatcaaagtctacagataagtgtgtttctttcttcaacatcctctagggaaataagaagtttgaatggacagaggagtgttgcctttcaagaattaaaaaagcaactagcttaacctcccatcctgtcaaaacccatagataataaagaaccaggaatacacctagaagttatggaattttttgtaagtgcagtcctcattcaaagtttgagtttgtagaggtgattggtcaactattttcatagttgaatcggtagccatgggaggcttagtgctggacggtgttttcaaactatgcttggcaaaagatttgttcgaagggggatcagagcaccctcgtccacaaccttgtctgcagcagtctgggcaccagtggtcgagtcgacagtcagggcctcttgggtaggaggatccttcttagaagacagggcattttctctttttaggttggtgagccccacttttgaacctttactagagactcctgactagaggactcaataccctttctcttgccaatccttacaaacatcttggatgacataactacatagaaaatgagcaagacttaaaaacttcaattaaataaagatgaaaatgtaagaaagttaacaagagagtgttcgtactatccacgccctcaactatccgaggggcatcatcgtaaagcatattgtgagctcttcatcatccaaagacacttccaccaaatttacctctaccactttcttccttttaccctcgacgataggcgtaggagggtgtacctcctcagccaaattttcatctatctagatgttatatcgacgatcaaagtgaacgagaggagcatactcctttgagttggacttttcctttctagtctggggatggatatgagtctttttcctttgacttgaaggatttctttttgcttgtcgcggagggatagagaccgtacaagtgaaaatattcctccatagccaaagttgaaagattcctaccctcctctagaagtttgagcatctggtgagctctactcataagctctaaggtgggtggtggtcagataatggcatggtatgctaaaactaaagatgcctcgctgaaacgtcttttgcaagaaaataatcctaggcaaacccttcgatcttagtgatgtcttgggtgccagtcagccacttgcagtcaagaagggaaaagcaaaagtaccccgagctgtggttacaagggttagatttgggatcaaaaaaccagttgatctcttgaggaaaaggctcccccaaccttaatgtgcatacacgacgtataatgccaacaagtatttcatatccttcaggttaatttgggttgggcagatgctataataatcaatcaaccacccttctaaagtaagggttgagatgaagaatgaccccttagtcagtattaggcttgctgtaccatgcacaaagacctacccttggggtcattggctagttgagttgggagcgagaggaagatggtgacgtccagaaaggccactagcatggatgttgttcaaccacttaactattattggatgactcggtctgccacatcaccttcgacttggaagttggcttaaggaccagtggccttcgtaaggtcctcctccatatagttcgcccctagttcgaggcaccatccagagggagaaagatgcatccctttagagttaaatcccccatctatttttgggggagatccttcctcctcgtcttccttagaaatttcctaaatttctagatcaccatatttgagggttgccatgtgccgaccaatatgaggatccttggcaagaacttgatgagtagtttattttgtctgagcaaaatttcttctacatgaagggatagacttggacttatgttgcacaacagttactgctaggtcaatcgcggctaaccccttggtgttgaactggtttcctagaaggaagggtatcttgcgtgcctgatcggacaatatatgtccaagaagtgcggaagaattgcctctagccctttgtcaattcccagatgtgccaaccataattctcgccattgatctggtcaaaatagttatgatgtcgaaagttaaactccgaagagtcacttgacaatccttcctcagatgatatagaagaaactgaagattcactcgaagatgatgacagactatcagtgcgaagagtcatgttattttcgagcaatagtttgagtaggtcgtcgtcaatttgatgttctccttcccataatttagcatagtccatctacaaaataggaaggacagaggtgaagcactgaattgcacggaaatcattttctcaagaaaacactttcaatacgctgaccaggaaaaatgaagatctaaccacataattcttgtctctatgatgggatttcgaaaaaaagggtttctggatttaaggaaaatccaaattcatacggtgtagaaaaaaaaaaaagaagacaaatcgtgcaaagttaaactactcgtgtctgatttaatccctaataaatgatgatgtcatctcaaagccattcatcacaaagaatctctaagttcaaatgagaaacgatggtacacacatattccaaaaaaatgagcaaaatataggattcaaaatttataataaatttatgcaagaaagagagcagaagacttactcactgtttgagtagaaatattgaagaataaagcctcttaagtcatttgtgtggaaatttagagcaatttgggaaatattttgaaatcaagaatgggatatttttcttgctatgtttaaaaattctaaaaggttaaatggaacatgagaagggtattcataggaaaaataacataataagaagggtttttgggaaataaaattgaaataattatgttttccctccaaaaagcccaaaagcctccactttcaataaaattgtctcaaaatccgtgtaaccgttagacacatttccccacacacgattctctgtgtgaataattattataactggagatttgaaagaacttgaggagattttctttaggtaggcacaaacccctaggatttggatcacgtgagggagacactagtcacttggctgtccaagaaagaaatcagaagtccacatacgaccaaatggtcttacaaggatttagggcaaatgttatcccaaaaatttacccaggtgacgtgacattagttggagtgacatgtggcaaagaatgcacaattggtggtcattttgaaccatatcatgtgatcacgttgcttagctaattacgttatccaaccagtggcacccaattggtaagatttcacaaaattctattgctaagtatttgtagggcaatactctggttggccctaccgactagtaaggcttgactgagtatattcaagatccagtaaatcagcctttgaatccctaaagaataggtcataatggttcactgcaatcaagggattcagggaataaacaaccgttattgaatattctgtaattatttataaccctataaatagtggatcatattcactgtttaaggggccatattctagactttcaaggtagctattacactacaaaaatattatctgtaatacttataaaagaatattaggaaactcgttagaccatattcttgcgatcttggtatatttcaaagaaatactaagtaaggggagtaggtcattactaaatttgggtcgaacctctataaacactttgtgtcgtttgttgttttttcttgttattaattatcaagcattttcattgtcgtttaattgactttgcaccgttgactaaaaatgaagttaacatgtataactaattataattgagaggttaattttatttataattagctcaaatcaagattttatttttttttaataataattaaaagttattcttaaatag

SEQ ID NO: 298739 - DNA, 4825 bp, Cannabis indica
ttttgtggatgaacaaaaaacaaaagggaaaaaacgtgatcaataatgggtggttaatcttatgaatggaggttacttgatattcaaatcaacttagaaacagaaatgaaaaatcgaaaatgaaattgaaagaaaatgaaaaaagagagggaagagagtgggatttgattgatgagtgatggggatagcacacgtgtatgtgcatgaaatgatgactaagtggtatttttgtaataaaataaacatggtaagtaaaaaagtttatataggcgtgtagaagtatttttataataaattgtgtaaaatagatttttcatgtaaaaatttcttatatttttgtgattaaaaaatttgaaaataacgtgttaccgaaagctacctcgatttgtaggaattcatttttagtatggtcgaatctctcttttcattttttgtttaaatcaaagaaacaaactacgcttcaaagcagcggctacagagagtcgccaccggaacttcaagaagacgaatcgctctgtactctgtagtggatgatttagttggcagacctgaggagtgggtggcggaacaaaggaagcggcagaacgaagaacgctttaggtactgaatttttgttctaattacgagggaaggacaattctcaaatcaactgaagcatgcctaaagcaatatatacatctgaattgtgatagaaatttttatatacttttgcaggaaaaatgatgaatcaagtcatgtgttcaaattcgagaatcctttggttatgcggttagtttgataaatctttttaagtacagttttagagtaatgttaataagatcaacactctctgtccatatgggcaaaagcttacattatttgttcaaaacatcctgctttgcattttgctcagccgggggctttaaggatcatgttcacatacacacaataaataataatgggtcagagtccgaaactgaatgggaaaggttactaaaacctttcgacctgaatgaacttcagaaattgcttgttccaatttccccatttcagctttgtaagctgcttaaacttccacttgatgtcgctacgtcaatggatatatttgaatgggcaggctcccaaaagggttattgccactcatttgatgtctactttgtgctaattgataagcttggggctgctggtgagtttaaagttattgaaaggttgttggcacagatgaaagacgaagatattattttcagggagtcccttttcatcttgattatgaaatattatgggaaatctggttttccaggtcaagcaactaggctactcttggatatgaaagctgtttacttttgtgaaccgacgtttagatcatacaatgttgtattggaaatactagttgatggaaattgccctaaagttgcatccaatgttttctatgacatgctgagcaagggtgtctctcccactgtttacacttttggaatagtgatgaaagcactttgtatgattagtgatgtggactctgcatgctcactcttgagggatatgacaaaacatggatgcgtgccaaattcagtggtttaccagactttaatacattcactctccaagaataactgtgacaatgaagcattaaaacttttggaagaaatgtttctgatgggttgtacacctgacattcggacttttgatgatgtaatccatgcgctttgcaaggccaatcgaattcacgaggcagccaaagtcgttgatcgtatgattcttcgaggttttgctcctgatgatgtaacttacggagttctaatgcatggattgtgtaaaatgggacaagttgatgatgcaagggcattgctgaacaaagtgccaaatcgcaataacgtgcttttcaatacattgattaatggatacgttacgagtggaagatttgatgaagctaaggcagtaatctttgatgacatgttaaaattcggttgtcagcctgatgcttttacatttaacatactgatttatggactttgcaagaaaggtttactatattcagctcttgcattggtagatgagatgacagttaagggttgtgagcctaatgtgattacatacacaacgttgattgatggattctgcaaggaaggccagctagaggaagctggcaatgttttgaacgagatgaaaaccaaggggctttgtctcaatactgtgggatataattgccttatatctgctctatgcaaatctggcaatgttgataaagctttgacaatgtataatgaaatgccattcaatggatgtaagccagacatatttacatttaactctctaatatttggactatgtaaggttagtagaatggaagaagcattgggacattatcgtgatatgtttttggagggtgttattgccaacactgtcacttacaatacattgattcatgcctttttgagaagaggggaaatccaagaagcacttaaacttgcaaatgatatgttatttaagggatgccctcttgacaaaataacatacaatggcctaataaaggcactctgcagagctggggctgttgagaaaggcatagcactgtttgatgaaatgacgaggaaggggattcattcagataatatttcatgcaatattttaattaatggtctctgtagaagtggtagagtacgtgatgcccttgaatttctaagggatatgattcatcgaggttcaactccagacatagttacttacaacagcctaataaatggcctatgcaaggtaggacgaatctgggaagctttgaatctctttgaaagagtacaagttgagggaatatgtccagatgctatcacttacaacactttaatcagttcttattgcagagaaggcatggcaaatgatgcttacatgctactatataggggtgtggacaagggattcatcccaaatgatgtaacttggtacatagtggtcaataatttgtttaaaggagctaccaaggagagtggaagttcatatgcacagccttgatttcatataacactgacaggagtgcaaagtctggtaaaattaagtggcttaaaagaagggtaaaatcttgggaaattaagttttatctggcctgttgagcttgtaaaatgatggaacgtaaagttatgtggctggcaagaagggtaagatctggaattaagctttgtcttgtttgtagagcttgtaaaatgatggaaggggtgcatggtgtgtacttcagctaacaactactctgtcatctattcctaaaaagtatgtcgtcaatctttgattgttcactcttactgtttttggtaatattcttataatcaattatcaataatatgttgttaaaaaaacatcaataatatgccattcttcatttttcatctacattgtaaaattgtattcagacagggtgaaactgttgttctacctatgtatgatttttagattcatatcggcaaatgcattgtttagataaggtaatggagtatagattatgatccagctatcagttgagagaaaatttagagttttaagaaaaatggcatcatcatggttgggatgaccccttttgttcaacttcctctctaggagaaggatacggtgcaaaatcatgtataatcagtactagacaatactattctgccatatctcaaagacttctattttgtatttagatctgattaggtagattttgatggatttaatctcttaatatgtacaggtgtgattggtgcaaggggaagaagaaccacatgaatgtgtaaattgtagaatctcttaaagacctataataagattcacataattgacatgtatagatgttttctagtactattagtagtattacttgcatagccattgcttcttgtacagaggatggtaacatttttccgtggttggaatataatgaagctgtcaaacatttcttctttcttaattgaaaagaggaagttacagattttttttctttttcccttttacttaattgaaatgttttcaattgactatcgagtagtgcatacaatactcgaatgtaagaagacgggtttatgcacatatttcacaatattagaatggagattgttattctaatgaaaaagaaacacacacacatacaattttgatcatgaatttatttatctgaatcttcatatgctttatatctatttgaaatgaattacagagaattgtgaccaaaatccttatgtaatctagttggttgtacttaaatgcttatgtagtatttcaaataattagtatttttgttctttaaagttatgacactattagaatatacttgttacaaattctctttgcactttgggattagttttcgtttcttttaccgataataatttcatatttttacaactttgactaataccatattttgcatcattttattggaaaatttaatttttttttttaaaaaaaaaaaaaaaccaatgtattcttgaaaaatcaaagaaaaattaatcaaagtttgataaaatttttgaaattagtaaaattaattaattagaataaaaaaaaattaattgtacataaattttctaaaaaaaactaagatttaatcataaaaataaattaaaagaatcaagtttatttatatttacaaacttatatattaaaaaaatacagtaaattattgaaaatttaataaaaaatataaaattattttacaaattaaactacaaaatattatgtttaatatatatatttttttttaattttgtaaaggatactattaactttttttcataaatatgtcatatttatgttttatcaattttttatggttttttttttggaaaatttacaccctatactgatttttcctattttatatcttttt

SEQ ID NO: 298740 - DNA, 2492 bp, Cannabis indica
ttaaaaaaaaaatttactttttttcattaatgcgaaacacatttactaaaaaaacttataacttttagcttttttaaagtatataaagatttaccaaattgcccttagtctttcttcactcattagttaaattattattgttatgggctatattcacacattctttcccaaaaatagaaagatctgtatacatattttcattaattgacagatatatttatctcatttggtgtgtgaatgaatgggttaagttccaattattcctatttgatcttttaattcttttcttttctcttttcacattaaatcaaataaataaagacaaaactaataattaggtggtgttgttaaagagaatagatcttacatatcttcaccgacacaattttccagctcaaattttcatcttaaactctcaaaaggcaactaaaattctcataaatatactttcatacagccaatattagcctttatgttttttttttaataatataatatttggggattttttttttcttctttccaattatattctcattattaattatgacataataaaaactaaaaaaaatgcatgtgcctagttatagcaacgatctatcattattatcaacctctgcaattttattttattttatttttaagtaattcttctttgtaaaatttttacttgtgaaaaaataaaacttaccattaatataaactatagtaataatattttacttttttttaaaacatgcctaatattaacctaattaatatagatctaataatatatataattattatgtgaataaaaattaaaagatgaacctggttgaggatgatttcagtgatgatgaagctttgattgttggtgattctgagctttaattaaataaataacaaaaaatgactctatttactgatgaactccatagaagaaagcttaaaatatagataattataaaattttactttaagaaaaaaaaacaaaaaagactgctgtgaagagattggcagcctaagctaatagagaggaaatgaattgatttatagaaaaaattgaagatgattcattttgaataattcacttgaaaagactaaattaccctcccaccaagaaaattgaattagttattttaaacataataataataataataaactatttggatttttatttttttattttttaactaacagctagcctttttttttttttgaaattaactaacagctagccttgaagattataaaatacatgaaattaaaagttgtaattatgacagttttgactagagaattgcttaaataattttgtgtatgtatatttatgataataatttttgggggtagttgagaaagtagtggtgagtggtcatcatttaatagtataaatttcatcttggaaaaatgacaagtggaaagtactcattcatactcctctctctttgcctaatctaatccaaccacaaaatatttttttaacacaaatgctaaaaactattaactattaatttaattaaattttaaatttttgtgacaaatctagagatactagatacgagtacctaataataatactcttttttactaaactttctttttctaatgtaaactaaactaatttaattactcactaatcataaaattttacctctaaatttaataattttaagcaccttaccttaagaaagttgggcctggattaaggcaggttatgcccgtacctagggcccatccaagccaaggattaaaaaatatatttttatttaaaattttatatatatatttttaataatttttgaaaataccacatattttttaaataataggctcaataatcttttctcctaaggctacccaatctcaagcgagccaaatcaaataacaaaacttattaacacatttttgttttttttgggttaatatacaaacataaattatgattttgtgttgagtaaatcatttgcatgattcataaatatatatagtggttcaattaattataaatactataattcgggattattttaggtaaaattaaacaacatcatcacattcaaagttaaaacaagctcagagcactacaaattgttcacaacattgtgaaagaactatattaaaaaaatgcataggtttttgttaaaccaaataaaatagaccacaacagctattagagcaattaacacttgatattcaaatatgagtcactattagaagttagaagtagggatgcacacggcccgaaaaattaacggagagtgttcctcccatctcatccttgataaggatttaatcctcatcgcttattttttatgggagatggagcagaaaattccctaataaagacagaaaaagagtgaagaatcccctaataaaaaataaaatttataataaaaatataaatatataaaaatattgaattacataaaaattaacatattaaacgttaattattattcaataaactaattattattcaaaacacaacttaaaatttataaaaa

SEQ ID NO: 298741 - DNA, 1148 bp, Cannabis indica
ccggataatcctcatatctatgacttcttcgacatatcctctgctaccggaaattttatgaggaatcgattttcctcttcttcttcttcgtcgtcttggcggtgttttcttaggggaaaggaagtaattgtttttcagagaaagtttcgccgtccaattgagtacccggagcttcagatccggctttcgacgatttgtagaagccatcataatagcttgatcaagcttcttggtgcatctatctctggaaattgtatctacctagcttacgaatacgctcccggagcaagcctcgctgattgtcttagaaaccctaaaaaccctagctttacgattctctcgacctggctctcacgaatgcagatcgcgacagacgtggctcacggccttgattacgttcaccactgctctggattgaggtcaaatttcgtccataaccacatcaagagttctagcatcgttatcgtctccgaggaatcgataaacgcgaagctctgtcacttcggtacttcggagctttgcggagagatcgagagcgaagtggtaaccgattcagaaaattccatggaaactgagagtgaaatcaccgccattaaaaggaatccgaaaaagtcgagaagtcgggcattgaagctagaaggtacgagaggttatatggcaccggagtttcaattaacaggaactccgactcagaagtgcgacgtgtacgcattcggagtggtgatgcttgagcttctctccggagaggagccattgaaataccagcgagtggaggaaggtgaagatggtggttataggcgcgtgagcgtgatagagacggcgcgtgctgcggtggaaggtggggagttgagaaagtgggtggattggcggatgaaagactcgtacccagttgaagttgcggagaagatgattcgggtcgggttggattgtgtggaagaagctcctgaaagaagaccggatatgggtcgggttgctgggttggtttcgatgctgtttttggagtccaagaattgggctgagaagattgggatgcctatggacttttcagtttcattggctcctcgatgatgagatagttttttttgattcatttgtacatctccactcataccaatatacaaatactttttttttttcaaaaaggaatt

SEQ ID NO: 298742 - DNA, 6085 bp, Cannabis indica
atttttactagtgataacattatatgtgacaatattatcatttcatcactgttagtgaatctatcagtgatagaagtgtggtcactaatactgtcgttactactgatacataatgtaatatagtgagtgtaccctcatacatataaaagatatatttagaaatgtacttttttcttgtatgtaaaaatgcagtaccaaatatttatccttttatacctaccgaaaaaataaggacttgccaaaccgaagaagttgtaattttataaaacacataggtgtgtatttggtagatcctttgacttttgaagactcatgagtgggtaatcatgatcaacaactccccttgaatttttagtatcagacacaaaaataaaaaaaaataaaaaaacacttaaaaaaatattcatttacaataatgtcaataccaccataaaattatagatatattaatgacacgtcattaaacacgatcataataaaaataaaaggaagcaaggttataacttggtagctagcagctaactaatcccattgatctctctccaagatatagccgacaagagcttctcattttgcaaagaaaaagccaaattcaaagtccattgccacttcctgaagatatgcaagagaaagtgagaattgagttggagctcgtgtatgcacaatcaaccataatggatctatgtgtttgggtgggtggtcatctacataagcagcattagtagccaagagtattagtactattcaaagcaaagtgacatgtgaattaattctattgactgtgaaatccataagcaaaactaaatatcttcttgttttcccttaattaatcaattttttcaatttaaatatgactctgaatcatattccattaacgaatttacgaataagtacaattgctaatagtacttaagcacataaaaagacattattttaagaaattactatacatatatattaatatatacatggacctattgatgaatattctcaaaattataatattaatatgattattattaatatacattatgaaaggagtataatagaagtaattgttttctcccatgcttctttactgtactttttttagaaactctatcttgtatagggcgtgtgagttaatagtactttatagcattgatttttatttttttaatattaatagagtacaaaaattaaattataagaaaatgaaagttttatggaatataatcaattacttaattattggtcaaactcaaactcatttggaggataattatcggtataatctatatatagatgacaaattagaagtttgattttataattattaatgccaaataattaagaaaagaatgaaagttggcaaaccgcatgggattaatttccattttgtatgagttgtccattgcttgtgtacgcataaagctagaccagactggttcaacccctgaaacaacgccttcccttcattacgtgccctcctataccaaaacactataatttttctattcatatgtatcttttaaggaactttacattacatacatatatatagtaagaaaattgttttcataaatgaattatattgaaaaatttgattgatatacatacaaaattttaaataagtgacgctcgtagtacgtatgataacgtccctatatattttatatataaagaaaaatttgatttctatttcaaatcgcatatctcgctctatatataaactcttaagaaaaccttgagaagatatgtataacattacatgttactcaatttatacacatttaaaaatttgtgtctagtactatatcaaccatatatgtatacatagattagtgcacataattaatgttcgttaattgagtatttggttatatactattatattattttattatgtaacagatcgagctgtcacataatcgcagctcatcttagtaaatatatatatatatatatatcatatatcatatatttaggtatataattgatggggtcatcccaatatatataactataaataaatatgtacatatatgattcaaagtttgacaaaagtactgcttttattataatagctcacccagctttgttccttgaacgttaaggaagattcattggaacaaacaataagaatatattgctccacaattctgctccctctccgcatcaacaggccctatattatcttccaaattaactcctctctctctctccctctctcacttatatattattaataaaagtatacttttaagagagagagagagagaaagaataagagagagagtctcatggtacaagcaagcacagctagagtttgatcatatgtcaactctctcatcagctctacaatatatttcttaagctaaattgactagaaaaccacaatattattcaaggcgttttagcataatatttatatactttcttatcaaactctcgtttctctctcttcctctgttcatctatatgcaataatctgtccatatgatctccttattattatcattcatattttctctcttttattgttatggctgttatcctcaaacttaattatataattctttctcacttctttaggctcattctttgtgtctctttcttgttaatcttaatcattaacattggatggtccggtttcaataccagtaatgtcctaagttccaaggcaagtgctacattgttcgctactactacaaatcacgatcatcatcatcatcattaccagtactactactcatccctgagcagcagtactagtagtggtaacaggaaattgctattgtcaagttccaagtttgacttttctccttttattcatcggcaacatcatcaccatcgacatctgccggcggagccagacccaggcgaccctcggatcgacccacgttatggtgttgagaagcgcttagtccccactggaccaaaccctttgcaccattgatcatatatcggcaagtaggttttttttttttttttttttttcacttaaagtctggtaatattcttctttgtaattgattcttaaccccaaagaaattggaaaaaaaaaaggccatgtctagtggatttgttcatttacttgtatggattgtacactgatatatgtttagggagaggtactgaaaaaaatccttgatttgaaagaaagagaaagaatcatagtgatcaatatctaaactccattaattaatttggatcaagttatatgtatcttcaaatatattatctattttttagtttttattggttttttttgccatataattattacgtatgtaaatggtaattcttatgtaagtatatcttaatggtttttcttattaataccaaaaagaaagaaaattttgtcactgaatcacatgtcattagtagttaatattatgtttatttatacgttaattatttctattaaatttgttatatattttattttggagtgtgaaagcaagaaaggtaactgtgacggcacggcatataaatatatttatttatcatcgggagtgaggaatgtgttgccctgatgggatcatttaattattgatgaggtctgttaagggttgactatacagcaactatacatatagttggactttaatttaggcatccaaatacaaatacagcccagcataggagtgcctctttttcttttcttgaatagacttagcataggagatcctcaacttaagtttctcaaacatttttactcctccatataataatgtatattaataattatatttagactgatttttttcttttttatgaacaatatttatgaaatggtcaatgtatgtagacaagacccataattttcatgatcttaattaattaaccattgatgatatatatgccaatttttaatataagttcctttaaaatagttaattctttaaaatagagaatggaatgactaaaataggtcatacacatcaagtaatcaagtaatgtattttacatttttttagagcaatgaactatttattactctcagtttattttattaattttttgtttgttatatatatatatttgagataaaatgctgtttgtttttatatatgtggatgtgtataaattaatattatatatttaaaaattaataaataaaatattttaataatgtaaataaaaaaaatagagaaattaatataaagtaaaatgtaaaagtgtggtaaaataaaaaaaataaaattttaataatggagtttttttttcttgaaaaagagcgtttattactaaaataaaaagttagacctcatagtcattataaatgatatccactcggatagttggcacatcaacaataccagctaagttttgagcaaaaacccaattagttacattgtgtgccgcacaattactaactctaggtataaaggaaacattacaattaaacacctatctagagaggctattacaattcaatacataattatcaatgctccataggaaaactttcctttgcaaagccttgaaagctgtctcagagtcgctctctataatcacaaaattgtgcttcctcttcactgatgtctcaagtgctagatggcaagctgcaacttcacctataagggcatcagagaaaacgagcccgttggaagcaacccacaaaatcgttcccaagtgatcccgatcgagctagagccacaacactcatcgatgaactttccactttacattgcaattgattttgatccagtcctttagtggaggggaccaacggggagcagctttagtagtaggggaagtgacaagttgggatccataatctagataacgcatcgaataatagagtcaatataatggatgatgctactcaaattattgttgtgccccttatcattgcgggctcgccaaatagtatctaccacaatcgattcatacagaaacacttcctcaacattggcacctttttgatttaaaccccaaagaaatttaaccccgtgccaaacaggcccacctaaatacataaccagaatcaagccccatggggagatctccataagtggtatgtaaaattacaagaggaaaaggtgttccatcgtctcttctcctaccccacacaagggacaagcagtatcgttgatctgcattctttttgcaatagcagtacgaataggcagggcattagagaggatgctccaccgcagaaccttatgtctctcaagcactttacagttccacaatttgttaaaaagggccacattacaatgaggggcccgctccatcacttgggctaaataggcagactttgacgaaaaattacccgagcattccaatatccaaatccacttattctttccctgaccactcgacttaacccctttcaagatattactcactatctccgaatcggagagggaatagagttttgagatgtgccactctctcgaatccaaaagcaggtttgcaatctcgttaacctgaaacaggcgattggccacaggagtaggaatgaactctttcccgtggattacccacgggtcttcccgaaccttagtatcctttctatcagagataatcctacaagcccttttttttagtatggttatagttttaacaacatttttccaaaaccaagaatcaaaatttttaggtgagcattccatgaatggagagtctttcaggtacttggcattgagaactttacagtagtgacgtttgaaccagagtgtgagactccgtttctgttcatgggtataattcatggaccccaaattctaaggatatcgacgctcaaggctagaggcctattacgtgttatattatttattaaggaatataatatttaagattaaaactgtaatacattacgtatttattatgaatataatatataatataattgggaattatgtacatgtaataatcacaatataatgtgattaggagttacatatatgtaatagttgtaacataagaggaggattactcatattttgtaacttccacatgatcactaattaagtgtgtaaagagtggttacacaaattaattttttgaaattttaaaagctatagttcaaatatagttgttgggcattgaattttatcattcgtaatgtgtataatgttggaaatattttacc

SEQ ID NO: 298743 - DNA, 3572 bp, Cannabis indica
cacaagactattttatagctaagatattttcaagatttttatgctaccgttttttgaagctagttatgtaatctacacaaaagtgtaagttggtagtactctcaattcttatatacaaaccatacatacatatttctcttatgtctacgagaattatatttccttaaaataggtatttttccccttaatatcattctttgagaaagctaagaaaatttgctgtgataacttaaatgttaagacacatttttggcatgtgcagagcagaggaaggaatatgccacatactgtaagcccatattagcttttccttttttactctcaagtattaatttcagaatttttacaaaatacctaaaatgttattttttttatttacttttctatgatttatttttctactgagccaaacaaaaacgtgtaaacaacatcttgcaaacattggtctacaaagaggtgttttggtagattctttatttgttttggtatttaaaaatgctttgtagcttattttttgtttatgatcgcatatgttatagctatttaggaccacctgtaaattttttgaaaattttaagtagattataatgttgaaaataatatttacatattttttttacacgcgactatttttcttatacgtgtggtcaataactgtttaaatcttatttttggagctgtaaattattcataattttttaaaaatttacaaatagtctttaaataaagacaacgtatgtaattataaaaataattagactaaaaagctctcctagatcctgaaacacatataggtctactagaacgatcattcagggaggtctactatataaatttcctaaactatatcgtataagttcttcttttgtaaataatatacaaataagagtgctactgttaacctcttattccaaccttttactcaatctcaatgttcgaaatcacatagcaaattttttttaacagtgtttgttatagttacaacattatttctgtaaattctttttaaacaaattgaataatttatagtatcaaaaataggtttgctatttattgaatatacgcatagtaaactaaaatatcaaaattttcaatttggtaaaatatttagaatttttcaaaattctacaaggatagcattataattttaacgaatacgactataaatttttttttgaaaaaatgatatattctaacatgtaatttcatacttaaaattgattaaaagactgtaattaacactcctcacaaaaaaataacaatgggcacttttttttaagaaaaaaaattcagttcacaaaaatgttgaaacatttgtagatttgtatttttgtaaattctttttccttttacttgtaaaatgggcccaaattgatttgcatatttatgatatatccgtccactaaaaaggcactaactttacatttatttcccaagacaaagaagtgggaactagggaattttaagcacaataagaaagcacctttgtgctgaatttatactattcatgctgatgctagtacacaaaatacattccatttctctttcaaatcttttgtggtctacctaaggatcatgaactacttgctcaaaacaacaaaagagatcccaaagataaatgaaacaaaaaactttaaccaaactaggaacatgcaaaaatctttagtagaataaagcagaactagcaaacaaacaagaataatactgaacaaatttcagtgttggatagcctttgccatgccataagcagctgctgaagcaatggcaccgatgagagcggtttgaaaagcgctcacgagaggtctgctaccggtgaagtaacccttggcatagccgaagatcatcaatgctgccaaggttacgacaacagaggcaacaacagcttcggttgccttctcgaagaacacgtaaggaatgagtggtaccatgcctcccaagatgtaagcaacagctattgttatggcactttgatatgctctctttggatctggcttctccagtcccagttcaaacctgtaacaattatacatatatacattaaagacagtactaggaaacaactcgtgtaatactaaaacccttccaagactccctttgttgtctttagtcccttaggtaaccataaaatgtataattttcactactattattgatggtttcattggacttgaaaattcccatcaagtagtattcaggacagtgtcaaagttattactatttctagtgaaaggaaagttaaaaaggatattcttgattcaaagtttttggatattgtaatcatcaattcagatataatatagttaatggttttcactctcatccccaatgcccagtcacatgggttttgtccacattccaaaagttacccaacttttaaaatacgactgttcctcttagtgggatttgatcttcttatatcagagtactagtagtagtagtgggtggcttggccatagcgaatggacctatatgaacacactcatcctgccaaactggtcctcccaagaatcttccagttcaacatgcaacaacccactatacacataacattctgtaactttttatctatcactacccaccatgaagataaactaataaagtaggtatacagtacggtatgaacttattttaactctgcaaattgattataactcttttgtttattgtgactatgcgtacaacatatgattttaactctaattacgttattattttaaaaatttgccggtgatctattttgagtcttgtgattataatgaatgatgtcttaaaaaaattagaactaagattaatttaagagaaatgctaacagacactagtactgtctaatatactagtactatctaatactcttatatgtgttaatattgatattggttcaattaagtatcgaatcttatataataacttttaagaagtattactaatcaattgcaagacgacatatctaaaaatattaggctagtcactacaaatactcaataacaatgctctttatttaaatacttaaaataaaattatatatttgtaccaataggaaaacgagaggactacacataaaactcccctaagaaacataattaatatttattattccaaaataataaatgacccaatgcatatcctaagattttggacatgtggtttttatgagaacgaggagtgcttatgaaaactttgttagagcatctcgaataacagtattctttaaaaatgttaaaaatttacacatcatttaaaaataatattttattttatatttcttctacattattcactcttacttctaataaaaacactccaatgtataacactgtttaaaaatactataattatgatatcacaaattattatttaatatatattctattttttagctacaataactttttagattcaattttttatttaaaaaatattaaatagcatcaatgctacaacatagcatccatacaaatttctagaatgacatcatcttctctgtaatagtattgcatctcaatgtttcgccatataatatgtgcacctcaccaaacatcctctaaagttttaccattgaaaattctcatact

SEQ ID NO: 298744 - DNA, 1574 bp, Cannabis indica
ctcggaaaatatgtcggtctcatcggaaaacacagaggtttccgcccacaaatccgctaggttttctgaaaagcccagcttctctcagaagtgtagtatgttgagtcagtatctgaaagagaagggtagctttggagatctaagcttggggatggcacgcacaattgaaccaaacggtaactgttgatttttttttcttttataatttctacctttcttctttgagttggtaaagcataatttcgtattggtttgtctgttttctttttttccggttatgatgaggatagactaattttgggtttgaatcttatacggatttttttgctagttttagtattgaattggaattattatatgaaactttaatgatgataatcagctagattgtgtaataggtagtaggaacaggaaaagatttttttttctctttttctaaattaaaattgactaatttaggaagagcataattatccggaaatgtggatttttcatttttttggttatttagtattaaatttaagcaattttatttattatttgttcttatcttgcatgtccccgaaattctctgatcaaattgacaaattccactttggttgtttgatatctgtagaactctcctagttttcctgctaagtactcttaagtcttaattgactttcttttgggtgtactattgatagaactcgcttttgggccatcttttttctggtttctgttagagacccatcttagatttgattaacatgtgattaaaaattcacttgcgacatgttttagacattacaagatctgatatatgttgttgattgttctattttacaggggcaacaatgaatttttttccagctatggaaagccaatcaaacacagcagcatctcgagacctcaagttcatgaatttgtttcctcaacaagctggttttagttcccctcgtcctgagcgagaagcccccaagatggcagattataggtacgcctggttgtttgttgagttaataatttaaagcttttagtgtattgaaacttaaacatttgatataactttagactgattaatgctttgttcgatatgataacagtctgaacaagcctgccacaggagagcttgaaagatcccagatgactatcttttatggtggacaagtgattgtcttgaatgactttccagcggataaggcaaaagaattgatgcttttggctagccaggagagctcccacaacctcactgcccaggcctctaaccaggcaaagagcagcaacgccttcccatttaacatgacaaagaatccatttgattctggtgtttcggttcctccaagtccgactgttgttcctaacttcgtcggtaaagcaattcaggaatctgttcagccgaccccaagtccgaatgtttgcggtaaacttcttgagcttgatttgtgtttttgcccatctttacgaatgcaattgaatttgtttgctaattgattatttgctctattgcagatctaccaattgctaggaaagcttcccttcaccgatttttggagaagagaaaggataggtaggcatcaaaacataatctgcaa

SEQ ID NO: 298745 - DNA, 4183 bp, Cannabis indica
tttttcttttgtttttcaatttaaaatgtaggcaaactcaaagataggagagaagtagcagtgaagagattctatgagcacaactacaaaagagtagaacagttcatgaacgagataaaaatcctcacactcttgcgccacaaaaacttggtatccctctatggctgcacttcacgccgcagcagagaactcctccttgtctacgagtacatccccaatggcacagtcgccgaccatctccacggacaccatgcaaaaaccagccccttaacgtggccaattcgcctaagcattgccatagaaaccgcaacagctttggcttacctccacgcctcagacatagtccaccgcgatgtcaagaccaacaacattctcctagacaacaattttagtgtcaaagttgcggattttggcctatcaaggctttttcccaacgatgtaactcatgtttcaaccgcgccacaggggacccctggctacgttgatccagagtatcatcagtgttatcaactgacgagtaagagcgatgtttatagttttggagttgttcttgttgagctcttatcatctatgcctgctgttgatataacaagacatagagatgagatcaatctctctaacttagctatatgcaagattcaaaaaagggcttataatgagttgattgatgaacaacttgggtttggttcaaatattgaagttagaaatatgactattagtgttgcagagttggcttttgagtgtttacaacaagataaggaaatgaggcctacaatggatgaggttttggagagacttaagagaattgaaattgagaattatgaggttgttggtggaaatagttcttctgagttgatcaatatgagtaatgttggattgtcaaagaaaatgaaacatgagcaattgccatctcccaatgctgtgattgaaaattggcctagtactagtacgcctaccactcctaatttcagtgcctaaatttagttcttttgctaaaatttgaatagaagtgtataattagtcatgtttggttgattgtgctgttgagattaatgatacaattacacctagtaatagctaccaaaccataacccatgtagagttttgataattggataaattctattttagtgtaaaagtatcattgatgcactggatagttttcccttctattgtctttttttaacagaagctttggaagtgtctcacataagtcggatgtctacagttacgagtataaaatctcatattatatagagattattggaagacaataaaagatcttataactataatatatagctaagcaacaacctgcacacactacacaaacacacactgttgcacaggtttatcaagaacaatcatcaaaaatattaaggaggcgtttggttgggaggaatgaaaatataggaataggaatggaatggaataaaatttaaaatgcataagaaaaattgataaaaaaatcattaatttttttctcttgttacatttcttttaaaatggaatagtcattctactaaaatggtggaaagagcattccattggaataccattccaatactttaaaatgcaaccaaacaaaggaatggaatgaaaattgtttcctttccattctattccatttcattacctccaaccaaacgaccaaacgccacctaagaacacaaaatagagaatgaacacaatcaatttaaagaggttggaacttccccaaataactttgggagcctaatccccttgtctgaactcccttgattacaaggttcagtagttcttagctattgatcttgatgatgtcttggagagataacaaagtaagagcaagccttcaacaatagcttctcaacagtatacttccgtacagtaatcgtgggttccttggaaggatccaaagcaagtacaagatggctttagctatttgttgtgtgcttgaagcaaaatttatagccatctttttggttatgaacattgcagtgaagaagagcatttgtaatactaacattgtggtttagaatactaaattaaaacacaaatatagcacaaactcatggcctaaattcaacacaaattttagatcttgacttatggaaacttaacaagagtcaaggaaatacataaatggtcttcactttaacaggactatgttcatcttcatgttcaagtttcaatatgaaaatcttcttcttcttctttttcttctatgtcccattatcacctttaatattcttcattttcatttcttcatattactcagtagttgaagctgcatcatcagacccttactacgaatcttgcagagtccccaaaacttgtggaaaccaaacaataaccttccctttcttcattcaaggccaacaacagccttactgcggttaccctggcttcaatctcacgtgcgactcacgtggcccctccattatcagtgtctcctcccaaaactacgtcgttcgacaaatcttctaccaaaaccaataccatggtagtgggaattccgtctagtgatcaggatgagaagattgaagaaagggtaataaggatgagtgatgtggtaactgtagctgaaaaaatttgtcacaacttttaccatatttatagattttggagtctctattgtagatactcttagttccaaatcactaatttatttagtactgtgtttcatctcaaaaccaattagcaataagtggagtagcccatgttcttatgtatggctcaattctctaccctttattctatgtatgtgggacaatgtacacaacacatacaaccttttgtcaaaattgttaagaatattaatgctaaactaaagcaatcacaaatttaaaaagtaacatctcaatatatatttggtaaaatatacaggtacattctctgcttctaagctcagctgaagaagagggattccctccaaaatgtccacaatttctttgtggagatgatgaccagatggagtctccttttatcaataggatgaaccatgaatgtggggtgctcaaactgaaatgttttgaagatggactgaagatccaattgaaagcagaaggttactggtatagaattgacattgacaccatctctcactcagattctctaatttccgttgtgaacatatcaattatactccttcccagcccaactgatccatctcatttctcttcctataattatacagctgacaactcaacaaccctttacaagtgcagccacaattacaatcctggcctgaacactaaaaatactaataaaattatgtgcacagactatgatttctactacaatcctctaaacatgaataagcttgttgaagagtgagtctagaaaatgcaagcttctttgcttaagttttctgtgtataagtttcttttcagtaagacaagaacacaatacacaagagagatagagagattaggaaatttttgatctgaaaagaactaaacttgaaacaaactaactgtccagactcatgaaaaacaaaaccaaaaacaactagagctgactataatcacctcatttctctctaatttcaagcttgatccatgaggaaattatggatcaaacaagccaaaaagaaaaaaacattaagttggaaatcatagttatgatttttccaggaaaaacgacacaaccaactccaaattttgtcaacaggaactagaaaaaaaattagatgtaaaagccttaactgaggatagaatacagaccatagaagattaattgtacctggatgaagactgggaaacagtcatggcctcagaataaccacttgggtctgattcccttttagtaagtatatcaacatcagactcaaagtgatgaatgaccccacaagccacaaacatcatcatgttcactagtccttgtgtgttttttcttttgccgtattttagggtccaaatgaaacattttataaagactttgaaaagcaaagagtgaaggccttgaatgagattaataaatccaagagtatggaaaggttcgtcgtgagtggctattttgcttcttcttttcttcaacgtatgttgttcttgaaaactatccaaatttccaagtcaacaactaagtcaagcagaaaagcttctccttaataatacgttgtggcttagcaaaaaaaggagtataaacctccaatccaattcccttgtggaaaacttggtatgattggtttcccttttagcaa

SEQ ID NO: 298746 - DNA, 4184 bp, Cannabis indica
acataattctatatagaaacctctattgcaactaacgaaacaacttaaatcgtaactaaaaactgtatagtaacccacataaaacctaccggtaaaactactttaaaaattcaaatcgtaaatttgaaaaaaaataatatataaaataattctcctacataaaaatggataaaattttgtgaagaaacccccactttccccactaacaacttttgggttttggtgcttagttaaaggttaatattataaagaacgaatcataagatagtgcccaaaaattatttcatattctaaaaagaagaaatcaaagtcataaagatataaagaccaaggtgacaaaagtcgtaaaggtcttgtgatattatgacaaaaggcttttttattattattattattattattattattattattattattaagaaaaagttacactaaaattaagccaaaattaatctaatattgacattttttatagtactaagctttggtattaaaggatcttttacccaaaaaaaaaaatgcattaaaggtctttgttttttttggtaattactaattagcagccaaatctctttacattttaatttttatgtacttaatccttttttttttttttgtacaaaatcttctttaattttttttttttttttttgttaaatttgtaagtgtcagtaaaatatcaccgtgaaagtaaaaacttcaaaataaatacagttttaatccagttagtatttaactgtagtattcagctgacaacttaaatttataaaaaaaaataaataaaaaggagttttgcgaaaaaaataaataaataaactaaatgtaaaaaattaaaacataaagagattttaccgcaaataatatttttttaagaaagatctacaccctaattaagccatattgagcatcttagtgagtgtgtttcttttttttttaaatatatatataaaaaaaatctaatattgacatattcattgtactatgctttggtattttgacagaaaaagagaggaattgtgtgacattttttttcttgatgaaaggctacctaactaacatattattgtttggacttaatttggaagagtatatacttgcatattttattgaatgagagatcacaacaatcattatttaaaaactatataaatttatattattttattctcttacatagttagtaatttcataaaatttataatattaatatgtaatatttaaaataaaaaaatttagtaattaaaatacaattactctctcaaattcttattacatctataagaattagagtatatataagagcataatggtaccatgctctttactttactttatatttgattatttcaataatattttataatttataatattaaaaaaaattagcaaaaaattaaagaaatctctatcaattttttattataaagagcaattttttttcatggttggaacgtttttttttttaaactcactttttatttttataaaaaagtgtatttagagagtatggttaaagatacttgccgcgcaatcttaaaagtctttaattatataattaggtaactatgttaaattaaataattatatcaacttatggtcaaattcaattctaaagtagcaatccaaacatattgtagattttatttatttttaatttcttgaagcataaatcgtcttttattcttaatctatcataacatgtttgtttggttatttttttaataaagaaacaatataacatgtttactacacttaattaaaaacaactattataaattaattatagctagctatattattaaaattaaataacctccaaaatatgtactttttttcctttgtctggtctctattttaaatttattactattagctccaattctcattatattaattgttatatatgtcatgtttctgaaaagatcacatctgtatatgacattttagctaacatttagtcaaataataatgattttaagtgtttttagcatatattcatttattcatatatatatatatatatttatatatatagcaccaatcaataaaagcaccttccagtattttcttacatgtaaatatatgttgtgtcatttaataaacaaatccctatatatgtcacaaacctatatattcatatattatttatgagcattattatatgagggcagggtcggccctgaaataaagtgggtcaattaaaaaaaaaaattgaacccttatgttagaaaaaatgtagtatttttcaaaatcggtaaaaaaaatgtataattttaaaagaggaaaaaaaaatttgggccctgggctgggtgggccctgcacagacctagcctgcctatacccagggccaggcctgtatgagggtgtctaacacaccacgataaagtgttgttctataattaataaattaatgattttttataatatttatgaaaaactaaatatcgacataagtatctaatgatttaagtttgtaaataatataaacctaatattagcagcataagtacttaatatttataaaactataattttcatctaatttcgtcagtacagactctattattgtcttaaacataacgcatataaattttagattattaggtctagacaaaaacatgtagtattcttttaataaattcaaaatagtgtactgacaaaactgaaagaaaattataatttaacaaacattggatacttatgacgcttacaattttaaaattttaagtacttatactactatttaccttttataaaaataaaacaagcaaaaccctatattaaaataaaacatgaattaggcaccattgcatttctcattatttattagtgatattgatttatcatatttttttttgtcaatttgtttattaacaacatataagtatgatttaatgctatgcatgcatgtcccatttcataaagctagattggacattaattaatcaaacaattcctgttatcatatcattgtctaaataaaattaatattttccatctttttttttcttgaatgggatatttgctttattttttttattgaaaaggaaagatatttatttgaattaattatatgaaaaattagtatatgtactctacgttatagtgcgtttgcaactatagcattaatatcgctattaataaaacactctttaaaagtcgggcttaattataatatatatactttttttggttaattatattctcataacaaaaataacaaattagtgctaccattaactttttatctcgaaaataattttggagggttttaaatacgcatgattaggctggatcatcggaactctatttttggtactgtaaattatttaaaatttttcaaaaatttacaagattgatatgatattgtaactataataaatatcgttataaaaaaaaaaaattaaaaagattgtggcacatataatttcgagcgtaaaaattgactaaaaaattataatagaagttgtaattaaacactcttcaaaataataataatgaaactttttttttttttagagaatgcattattcaggagatataatttaccaaaataatagggtgttacttaccaaaaaaacatgctagaatatttgatttactcctacttacaactaattaagacatttttaccaaacatagaaaattgtgagctatgattaaagagaattgctattactatactaattaaatttctgccctttaaactttaacatatatcaaatcatacatcttaaatttttaagaccattaaaaatttccttttaaaaatctctctttagctgttgagattgtttaaattaagaacttttattcaatttagtaaagaaattctaatatagataaaaattcaggagatataatttagtatatgtcaaagttcgagaaacataattaaatagatattaaaatccggggagcatgatttagtacataaacaattactgaatcagtaaaattaaataaaattagacaaaaaaatttaaaactaacaatcttaatagatcagaaaagatttttaatagttagaaaaattcagtaccatgatttagtacaaattaaagtttagagtaaaaatattctaattagctagtctaatatttattaaagttaaacaagtgagactagatattaaattacactaataataatattacaccctataagagtgctctttaata

SEQ ID NO: 298747 - DNA, 3958 bp, Cannabis indica
taaacaactgctaatttccaaattaactaagcgggctttacagtccagctactactcttctggctaacattaccaccactcagtcttcttgggatccaaactagtaccctgattgtggagccaccaatcattgtactcctgatcctcagaatctcatgaatggagctgagtatcaagttcaagaacaaatgtttgtggataatgattcatgtttgtccatcaagcatattgtccatttatttattaatcacccttctaaacttcttgtgctgaataatttgcttcatgtgactgagataactaagaatctgatcagtatgtctacatttgctagagataatcaagtcttttttgaatttcatgttgacgaatgttttgtaacagatcatgtgcaccatactattctgctaaagtagagacaccagaatgacctatatacttttgactcatcgcaactttcacttcttcctaagattccacctccagttgttgctgcttttactaatgaaattaagcacatatgtgtttacttctataaattcttttgttgtcagcaacgtacatctccacattttattaattgtaataaatctgactatgagatatggcataattgacttggtcacctctcatctagagttgtgtcctctatactcaatgcttgtaatattttcataagtaataaatcaactcattatgtgtgtgacatcgtgttatcttggtaaaatgcataagttaccatttcctcatttttcttaaaatggttatactaaaaactttacaattagttatatcagatctttgaggatcctcacacacattgggacataatggatataaatattacattcactttgtggatgcttactctcgatttacctgattgtgtttactcaagaacaaatttaattccttgaaagtttttctacagttcaaggcagaagttgaattgcaactagtaaaaaaaaatcaaggtcttacaaactaattggggtgggtagtacatatcattttctgagctaactagaatggaggggattcttcatagatatccttgtcctaccctcacataaacaaaatagcctagctaaaagaaaacataggcataattttgaaaatagtctaacccttttagctcatgcctctatgcctctgaaattttgtgttgaagcttttagagtagcattatatcttcacaataagcttcccttgcctgtgattcaaaattaaaattgactataggttctctttaattccaaacctaattattcaatatttagaatatttgagtgcacatgctatcctaatataagaccatacaataagcataaactagagtttaggtcctctccatgcacattcttaggttatagtataagtgccttgatttatcaggaagactacacatctctagagatgtaatttttgaagaacccacattttaatatgctaagcacaaggatttgattgctactcctcaagtctatgtgaatgagttcttttccttcagctactattacttgttcttcaactattcttcctcaactatgtactcctggtgttaatcttgttcctacttgtctcatccctcacactgttgagtcacctagtctaaggcttaatgtgcatcctatgcatcccaactctagtgtgcaacatagaagctcaactttaccatccatctctagtgtacaacataatcctgacacagctagacaagctactacaattggatcttcaactgtagtagcactcccatattctatcattagaggtccatctgaagttcattcatctcttccaatataggttcctactagagactcaccagtagctcccactgtgagtgaacctcctcagcatcaagtttcacaagttgtgccaactcactctgtgcacactagatctaaattaggtattcaaaaactaaatacttttagtgtatccaaggagcatgctactatccaagatgattagaaagtgctgagtggaataatgacatgtctgaaaagatctcgactcttgccagaaattccacctacaccgtggttcctctacctaaagggaggactgtaataggatgtaaatggattaataaagtttaaaaaacaagattgcatagttaacaaatataaagctctattggttgcaaaaggtattcacaaaaaaacaggttttaacttcactgagacttttcgtctcccagtcaaacttcaaactattcatgttgtcctatctttggctttatcaaaaggatggatggtgagataattggatgtgaacaatgcatcttccaatggtacactctaagaagaagtgttcatggttcaacccctacttttaaggtaccagactctttacatcttgtgtgcgaactgcgaaaggatctttatggcctgtagcaagctttaagggcctagtttgagatattgcagcagtgtttgattgactttgggtttgtatcatccaaatttgatcactcactgtttgtccagcacataactctatctactacatttgtgttactgtatgtagatgatatccttgtaactggtagtgactcctctattgttgcaagacttatctcagcattgaattctctattctctctaaaggatcttgaagattttagttatttcatggggattgaagtcaaatatactagtgaatggatgaatctgtcccagactaagtatatgaaagatatgttatgcaaggcaaaaatgtagggtgctaaaccctcttccacaccaatgacaagtggttgaggctatcaacttttgatagtgaaccagttgagactatgcaattgtacaggtctattatttgagcattatgatacttttacaatcacaagacctgagatatcctatatggtaaacaaagtgtgccaatatatgcacaatcctcttcaaacacactggttaacaataaagatgatactaaggtatataagtggaactctcaaccatggccttcatatcaacaggtcctcacaccatgagtttgtagccttttgtgatgctgattgggtatctcacccttatgatagaaggtcaacctcaagtttatcatctactttgggtccaatcttgttggatggtctccaagctgagtacagaggtagaatacaaaagttaggctaatgtggttacaaaactaacttggtttcactcattattctttgagttgcacataactctattcctaagcctcctatagtgtggtatgacaaatctgtccacagttcttctcatagccaatcgagttcttcatgcaagaaataaacatattgagttggacctctacattgttagagagaagattattcagagcatggttgaaatcaagcacattgccactcttgcttagattgtagatgcttcgacaaaagctatatccaacaaacgctttatggatttcaagaccaaacttcacattgaatatgcttctcagtttgagggagagtgttaggacaactgttacttaactgacagagttagtttgagttatttatacactgttaattctgttaggattacagctgtatcgaacttgagctgactaactcttttgaattgtatatattctgtttgttgattcattactgaataattataagaaatatcttccattcactaagtctttctccatcttatttttctctgtatttattcatttcgttttctaccatggctaagagattgaacaatttttgtgtaagatgatgattttatatactaacaaatcaatcatccaagctatgtgaaattaattattgttccaatgactttatcccgacaaccacatcaatgagagtaacaaactaataataataaggtatctattatgtgagttggacctggaggagatgaattagagggtgtttgaattaaaaaataagggaattactctatatattattcttttaatttttttttctaaatttattgtttgg

SEQ ID NO: 298748 - DNA, 4863 bp, Cannabis indica
cttaagtcgactcataaaaaatggcttctttcaataaaatggtcgatgaatgatgtcaaatatgttcagaaatgtaacatttcatagtgatttttttaaaaaactatattttttcactataagtttttaccttattgtgtgttttttttttggctaatatattgtgtttttatgttaattttaataggggtttgtatggattggtttagtctgaatttttaattttttcaaactaaagttgcattacattttcttaaaaatttaaaactaaactaaactaatccattcaaaatcgtattagtttgtaattcatgttttttttttacagtaattgtttagtttttggtaattttttactaagtcaatatcaatattccacttaaagttattcttaaatatatattttaatattttattcaaaaaatatctataaagtatacataaaataattatacctaaaactatggccgaacatgataattttaaaccgtccggattgaccaaatcattcacattgtttgatctcaaatgatttggtccgaattgattgggattcagaatcacgaattgcaaattatatgaacacccagttccaccaaaaaagataatttaagatattttgtaaaatatttaaaatttattttgacaatacaaatattaaaattagaccaataataatagtttgtgaaaaaatttaaaataaaattatgaatgggctgaaactttggtttgggtcataagcccacctacgactcgctgagttaactcaacaaacaagtgaaagcgttttctgattatctcttgctcactctcactcagactcagcccctcttgctttgctatactcaactaccaatcttccatgaaaaaccaaccgccttaactactctcccttccctccaatggcggcagcttcccgtgttctacctcctctctctttccattgcttcaggtactttctctctcttcttcttactttcctttaatgtctggttttctgaatagtttctctgattaagtttctggccttctagccatgtatagatacaaaagttacattttttacaggaaccctttattgaatatttgtttttgtttaaaaaatttgaagaagaataagaattataatactctttgactacttacttgagaattgagatagaaaagaagctttcttttttcctatctcttttatggtcttttgataatttgaattattgtattaggccccttttattggttatttgttttaatgttctttctcaaccatttaggaggaacaaagtttgtcaacacatggagtcacttcttatgctgaaagacacaaattcattatttaattctgttaaaaagtatagctttgatttgaagctctcttacatgaagcctgttcgagcttttgcttcattgggtcctgtagaaacaggttcagctccaaacaacagtcaaaggtgtgatttttaactatatttgctgtaagattattgagcttggtagatggcattttagatgtgtataactactgtatattcatgtcaataggtctagtaaatcttctgaaaggggtaacactgcggatggagaattgggatttgagagagagttacaggagttttttgatgaagttaaaatgatgattacaatgggaaacaaaaatgatgccgcggacctgcttcgagctaattatgaagctgtaaaggaaaggataaatgcaggtgccaggggcatggaagaagctgctttgattgacatcatagctctgggatatatggccttgggagacttgaaattcgtcggtacccttttgcgtatggtaagttattttcttcttcgtttcattgagtgttcataactagtaggcatataatgtatgaacatttcttattgtgagttataaaatcactaccctgtttatggaatttaacatatacaccttcatgtttttgaagtattcgggaaagaattgtccctgaatgtgttgttgacatgaaattgtagtacttatgagactattttatagtaattgggagtcttatgagcattgctataaggcactatggtgcttaacacctttatgaggtggtatccaataaatagttagcggttttttataatcattactaaaataaaataagtgggacgcgatatagaattgcaccagtagcgataagatacttcataaaggtgctaggcacccatggtgcctttttgcatttctcaatccttatctatcgctattattctctctgaccatcgatccagaaaatgtttcttactggtcaaatttgttggaagatcagttaattgaggtggtggacaatctaaaagatgatgaactgcttctggatcctgtacttgtgcatatgggaagtatgtactcaactttagggaagtttgacaaatcagtatccatgtatcaaagggccatcaatattatggagaaaaaatatggtatcctatttctctatctctccactttttacttttgctttcctttccaatgtgcaacagtctttctgattaagtacatatttggtaatttaatgtgggaatctgaaagtattagtaaatgctcaactgagtgttcttttcactaagccagctaagtggaggtcatgtttataaaaattcatattggggtgtgattaccctcaattctccttatatttgttaagtatgctgtcaaaatctgctgaaatctattaccacaataagaatgtgtgtcctgaattagaaggtggaagatacaatattactgttggttacttaactgaacatcctgtcatttgcttcttgttgatgaattccatcatctttttcgtggggatctgctgttttgttcttcaaccgttctagctaaaggggtcgtttcgattgatataacatgttgctttctggtgctgtttttaaattattgtgattgctttcagtgctatgctgtaatgtcaaatactcttttgtctgttttcttttcccttcaggcaaaaatagtgtttttctggtaacaccatttctaggcatggcaaaagctcttgcttctataggaaaagctacaagagcaatagaattttaccatcggtcaattactattttagaatcaagcagaggccctcaaagtgaggacttagttatacctttattcggtctcggtaatctgttactccaagaagggaaagctaaagattcagaaactccttttcttaggtgaattttcttttcttccttaatggatgggctacattgccttgagctcatgagtttcggtttgacccttttatcacttttcaagaatggtttctttctgtcacagaatcttggatatatatacaaagttgcatggaaaatatgatggaagagttggaatggctatgtgctcactagctcatgctaagtgtgctatgggtaatacacaaaatctctgtctctcttaagtttttaagccacacattgggccttctatcattagtcttgggacaatgaattaggatatatgtttatataagcatttatcttaaaaagcttcaaactttaacttcaagtggggttacacattataattcttatataggaaaagcggatgaagcaattcacttgtatagaaacgcgcttcagctcgtcaaagattcaaattttttagctttagatgacagtacagtggagaagatcagaatagatttggctgaattacttcatgttgttggaaggtaatgctagcttcataatcaaatttacaattatatttcaatgaagaatatttcgcttcgcttgttcacattgtagttctgattgtttgcagaggagaagaaggccgaaaacttctagaagaatgcttgataatcactgagaagagcaaagggaaagaacatccaagctcagtaacacacatgatcaatcttgctacttcccatttacgctcgaagaatttcgtggaggctgagcgtttactccggactagtatacaaatcatgtctaaaacagtcagttccaatgatcaatccatcacattcccaatgctgcatctcgcagtggctctataccatttgcaacgagatgaagaagccgaacagctcgcattggaggctttagacatccgcgaaaaggcatttgggaaagactctattccagttggtaagttaaatccatcttctttgctatccatttaaaaagtttccacatttttcccaatggggtattaggcattaaggcactaaagatcagatttttcttttgagtcttcccaattttagttcctttttatatggttttcttatttactatgatatgtgtgatttgtatggcagctgaggctctagattgtttggtttcaatccaaaataggttgatagaggatgatggagtgttgttggagaagctgaatagagtgttgagaatccaagagaaagagttgggttttgagagtgaggaggtttgggaaactttgaaaaagattgtgttttatttggacaaattaggaaggaaagatgagaagttatctattcaaaaaagattgtcaatgcttagaaagaaattcaagcaaagaattccatactaatatttatataaatatatatccagtcagatcaattcattttcttcttggttccatatttttggataacaactgctattgagttgagtcggtgatttattcttctcggactcttcaaacgatattgccaaaaattattattactgcgtagcatcttcttcgttgttatattattattaatgtaattaagtgtaaggtcttatataatttagggtaaatactatttggaccttctgttttgcaaaagttaccaattgaatcttgtgttttgttaaatgacaaaatggatcctgtattttctaaaatagtacaaa

SEQ ID NO: 298749 - DNA, 6292 bp, Cannabis indica
aaataaataatcaaagagagggccctgcagctggggctttctcttttaaagcaatacttgggattttacaaatattcccataaaccaaccaacatcaaaggtctcactacaacaactttagtatatggagtggatcatgtgtgctcaataatgattaaaaatatattaattaatattaactaaacaagtagatccaataaattaatatataattaaaacaagacaaatcatattattgattacacaaaatttaactcaccaagtgattccaacaaaaactcaagggctttgcctttgtcccatttgatagtaggtcggatttctaacacctgtaatacaagtacaatcgaaagtgagacttctctctcatattatatccttaaaataatgaacttactatactactaataataaatatataagtatgtataattattaactctagaagattgactaggacaaaaatagtttgtatacctttcttccatgtgttagtctcagcttgggatactccttcagaactgactttacttgctgggccacttcgttccatttctgtcatgattttattcataatttttagaatccaggtttataatatatatatatatatatatatatatatgcacgtaaagagagaactagaaagtttattaccttttcctcaacacaacgataatgtactgagacacagaacttgttgtgctcaacttttgctcctggagttgatttagttttctcaatcaactgtttgcaaacctgaaaatgaaaatataaaggttaaattgtttgatatgcgttttcctattttttttttatattattttatttttatatatatatatatatatatatagatgtatggcaaaaggaaaaataacaaattatcaactaacctcatcgatcatgggaagaaattcactggctggttgaaacagaacaccttttgcattatcctgaaacccaaaaaataaaataaaataaataaataaataatcaaaaggagaaagaaaaaaaaagtgaaagaactctatttcagggtattaaaaactgacactaatattgtaaaacatatgtagtatagctgttgctttacttttttgtatttggaaccttttgctggtcctttaatgtccatgccatggcttccggcatagtacagctctgccaatcgtacaaagctatacacctacacaaagtaatacacaaagttaattcaaaatcgagtgattaaattttaattattgaaaaagggataattttcatagaattgaatgtaccttatctctgcacctgccgctcactatagcagttggaaaacatcgtgcgaggcttttcactgtttttctcatctgtgattgtttcccgggaaaaacaaataagaaagaatgggaaaacgtcaatatatgtaaatagtgttattttatttggattgaatattgatttataaactagaaaggaaaagtacaagtaaagcttaccgaatcagacatgtaagctcgatccgggtctgctactatgggagaaagggtgccatcgtaatccaaaaacataactatctgttttccttttgaagcttcaatgatttgctcgaacatgtccaaggctgatgggtggtgattctgtttaaaatcaataaagacaaaagaaaggaaaatcagattcatcgttttcggaaaacggttcttgaaacagagtaagtcatggttttaaagtacttaatgtataaaatacacaccatccaagagctttggtcatcggaaaaaggagcactggccttgatatgggtaggagaagaacctctcattgtgtcgacccaggtattgattcttgttcctccattaatctcgatgtttttcaaaaacttcttctgggaaatagagatgtaacctcccggagcagagggtggcttctgagttgcagtcgtgaaaatccctgagttcgaaacggcaacgttgatagccatattgatagcagcttgtgtgtcctgaactaccacattttggttcgtcatattcgttttttctttcctaaaaaaatactctgcaaaaaataaaccaaaggcaaaaaattatgaaacgaaaacttttaacccattttttcagttgtcaaattttggcactatatatatattgtttcaattctctcctttaacgctattgtattttagacaatacaatagaatccatgtgaagaattattgtattgaagtaataccttaaatgatatatcagaagttacaataatggactaattgtttctggagacaggggacgatacagagaactctgtatttatatctagagagagtgaacttaggtgaagatggtttagaatattgaagatataatcaaaaggaacaaacaaaagtcacagagatttggagaagaagaagagagaaagagaggtttcttaagagagtgtatgtatgtatgggtgtgagagagacagaggtggaatggtccatttatagttggaggcggacactaacggacgagacaccaaatgcccccaaactcccaaagtgggacccacttgagtttttgagtgggccgatgggccctacctaaaggactcgcccaaaatcctaaatgagggccaccacccactaactcaacgaacacgacggacctccaccgtgtgctcgaacactctccaagccactcgtaatttccacccccaagccgccgtgttcagccgtcaccgttacagctccacagtgaattagctctctccacgtggccgacattccttggtctactgactcgtccatagtgggcttctgccacgtgtacaaaaccgtcaaagtgttggaccacttacttggagttttgacccaccggtttccttggagctgtttctactttcttttctttatttaattttcctttgctttaattactttcctttacttcctataccaagttggggttgagttacaaaaatcctaagacgagtaatatttattggcctttcaaaaccagtttaagtcgtattagtttaccaaaattagaaagagaatggaccctgcccttgtcaactctacttacgccccttgtaatgtgctgtgttggaaccaaaacagggagcttggacctaccaattttagcagctaccaaaaccagcagcggccttttccaattctcatattaattatcgatattcttatagttaagatacaaaattccaaaattaaacaagaaaacacacacacacatgccacaaaacaaaacacaaagcaaagccaggacaattcttgtaaacgtatcatcccctaacttatttatggattaaagtacaatgtaatttccttttaaatggtcattccatgacattattgaaaggtagaaaaataaggaacaccagtgaagaaaacattgatctagctagctattatatagagcaagacaaattataaactcaaattaactactttaattaattattagtgaaaccgacctattcatttagagacttgtatagttggggtaaattgagcttttttatttgtcattattaatgctttattaggttagcttatttaacataaactcttaaacttatgatatcgttacactaattaatcattataggactcccattttcttttgtttcatcattaacttgatcagatcttttacggtgactatcaataattggttcatagagttgtcgacgattatatatatcaactggatagaaaagcaatgtcatataataatacgttgtcattattttagtatcaatccgaaccatacatttatatataaatatatgtgtatataattctataaagtaaacaattaaacctttgaacactatcacatgcgatcaggaaaattatatgcattgttgaaatcattgtaaatagcagttttccccctagataaggggatgtatagtcatgatcaaaattgtgtcttgtacatgtactctcatcttttgacttagtcatttgtaaagtccgatttgccttattattctttataacaaatttattttatttgttaagctacaaatgtggctaattacctgtatatatatattttttaaagcttaattagttagggttagaacaaaatctaacaactgtaacacgtgtcccgggacccagacttagctgtattggctttggccttaaatgggcagtacctaagcaactgtggaacagccacctggcctacctatagtgctacttagggtgaaactcttgtcttatcaaatacccaaaaaatattaagttcactttctgaattgaaatgataaatcaataataactgaaccacaaaaacaactctttattcacactaatttatatttaattttttttttttttttgaatgaaagtagataacttcattaagaaagaatagccaaatcggccattacagcattgttgataacatcaggaacattgctatcaacaaaattacaatctgaccaaaaacaagcgccacgagcaaggcaatgagcggcgttgttagcagatcgtttgacaaaacaaacattaacaaaaggcaaagactttaaaagattacgacaataagttatagtggatccaaacaaagattgcatggccacattactttggagagcttgaacaaccacaagtgaatatttcccttagaattagtttaagtaaatatctcatatgatctttttataaataattattaaattaaatagtgtatttgataataacttgtgtcaaaattttgaagaatttgtgtttagtattaataattatttaatgataatgaaaaaccaaactagaagctgatgccttttccttttccttacgtggagacaagcaatagcaagtacccattgctttaaaagatttatttacctcctcattatacttgaccgaagacctagaaatagcacttgtaagtcaattacttaattaagtacatatcttctctggttggtcctcctttaaaaaatagaacagcccagagaaaaaggtgactggttaggctaagatgagtcagtgaatgggacagacatcaatcttatttactatagactggttatcttatgtatctagctagccttggaaatagatatattgttaattatattctcaatttttttctcaatttttgtttgaattgatattattattagtgtaattaagtattgaatacttaatttttagaaatattgttaattcttaaagttaatgttagataatactgatacccgataataatattgtggtaacaaacaataatgcttgccttaactctggtactttctcttgatttttgtgtttatttgtcattttgtatttattttctagatgggagatcataaagagagagctatagcttttataattaactttgcaagcttatatttaaatctcttagaataataataatgataaaataaacatagaataaagagtattaacaaatcaaacaataattacgatacttgcgtaccaagaaaataaaatgaataaaacagaatctcaaagaaagagattcttggagaaaacaaaggtcatttggggattgaatcttataagcttatacataaataaataaatatgtcattatgcggtttatatacattgattcatattaaatattatgagaaaaagagattcttatattattatatataaatattattgtcaaaagaaatatatataaatacaaattataaggttcgaattaatttgtcacatgcgcaggcatgcattgttttcttgagtctgtagatggtgggcatctgtgtaatattataaacatatttacatttataattatttatttatttatttttcattgggggaagtagagatcttttctctagtactttactagtcaaaactggaggcattggagctgcagatgctctctgcaaccacaagttcaagagttttaaattttcattatatataaaaaatatatatatatttaaacaagtacagttaatgtaactacaaagaaataggttatatattcaacacaaaataaaaaaaaaaagagtgaaatgatttaagtatatatataaaattaataaatataaccaatcttaatcaatcaaaaagtgatgattccgtgttcttcgacctaaatatacgctttttaatccttatttttttttattagtatagcatctatcgtgtatatatatgtatatcattctctcttttaattatatttttctatatttactcctttagcatttgctcctgtggcaacttatataagtacaattatttgcttttaatatgtttcagagagatcttttatttaaatagatatatttataatat

SEQ ID NO: 298750 - DNA, 3577 bp, Cannabis indica
tttttttgtgtgtgtgaagaaatgcgagcacgccagtttttgaaaacaaatctctcaacaaagggttggaggacaaagattcatttttaagaagcatcaaccacgaggttgttcctgatataggttggctgagtttgtagaagccacttttgggttctaaaacaataaaatcacatttaactattatacgagtttctcatgagttttacagcttgataataccgtagtagaaaccttacctggttttgccaatttgtggaaacagttatgaccaaaaagaaaagtgcttgtagagttgttcctgtcattattccaatccataagcctttccctcttagcttgaacacaaaacccagcaaagcagctaatggtatgccgacaacataatatgccccaagatttacataagctcctatatcctgccacccacttcctctggcgacccctaatgttacaaaatcaacaacatttcaatattatgtgcctttagttcatatagttatttggtttattttttaatttaattaattgtacatgtacaaagtttctcaagattactaaactaataataataataaatgaataaaaaagagctaaccagaaagaactgctaccaaactgtccacaccaattgagaaagaaagtaatgggaccatctctttaacatagttcaccacttctatctcattgctataagcatatcctaaaacattgcgacaacaaaagagaattgtactccctaaaaatgcttctgcaactccaagaaccaaagccgatttgatcgcaagttttgctccctcggcattccctgctcctaatctgttagacacttgtgtgctgcagagtattctttctttattttagtaaattatatatagcattatctactattttcctaataaatttttaaaaaacgaaaggaaaaaaaatagaggtagaagtagagaagaccttgtagcagcaccaatcccgtatggaatgtaaaaaatagatgtagtggtagtaatgctgcaagaattataaatgtcttccgaatcatcaaacagttttgatgaacaagttcatttctcgaattgatcatatatgcatataaaattataacaaaagagtaaataccatatagagagaactgaagcctcaagctttgcatttggaaacaaacccgagaggaatactagaagctcaaatgaggcgtattcaaggctgatgatcaatggcagaaaaataaccatttaaaaataagctttaattaattatttctatgaaaggataatgcgaaagaagaactcaaccaaccaaagcattaaagcagatggaatagccaatctcataaactcccttatgtgtctaaaagcctccatggagaacttaattcgggttttctcacaggcagaagagtacttcatgtaaagtccaaggaaaactacattgagccagtaagagcctccaatggaaaatgctgcaccagaaattccaagatggagtttgaacaccagaatccaacatagaggaatgtgcaaacatagaacagaacatgagcttatgagcattggaagaatcaatctttgagattggaagaagcgaaccagggattggagaactgcgtagccaaacaaagcagggatgaggcaagtggaatattgggcagcagcttgtgaaatcagagggtcttggccaacccaaatgaggactctgtccatgtatatccatagtagagatattgggagacaaataaaggtgagtgagattattgcacaccaagtgtattctcccaatttgtgatattcttcggctccgtatgtctgtccacataaagtttccaaagcacccgccattcctagctgcattagcaaatgttgtttaagattcatatcatcaattaataaaattagataattacatagcagttagaaattcactcaatcagtgttgatgcagaattataattatcatttgataatgaaatacacatttgtaccaaagcatatcacttttagaaatatctcaattaggaatgaacaaaatccaatactaacccgtccaatccaattcagttataaaaattggacatgtaattacaattagattagattggatgttgaaagttgaattttaattaaattggatccgctatcgtgtgtcaatatctcaaaaaatcaaattaaaattgaatccaatccaattacattatattgaaaaaaattatttatatttatttatatataataaaaagagttaatatcattttggcactggtaatttataaaaattattgattagattttttattttgttaaatgacaaaatgcactatatattttttaaaatggtataagtaggaccttgagctcaatttttgatattttttttaacataaccaacttaaagacatttctcgatacaaagaaatgtacaaaatgtaaccggatttgtcataacatctctacatcaacctattattaagttttattttgacaaaaaaaattaattcaagttactattttggcaaatacaaggtctaatttatcatttaacaaaatagaggatccaattagtaacttttacaaaatacacaatgaaaaatggtatttaccctgataaaaatatgaaatatatgtataaaaatatgataatcatactttttgtggcttttttttctgtaaaatttataacaattggttgttttatgtgcttatttttatggtgtttactacttggtagtgttatatatttttttttagttgcattaaatttgtaagaatgatatctttttaatttaggagtgctcataaaatactcaatccaatccacaaagtgggaatatctgtaattgtgcagattggatcgaaaaatcaaaaatttgtatttgtgcagattgaatgttgattgacatataaaagtaactaatcaaatccaatctgcatatttagatatattttaaattacatatataaattaatattttaatgtaaaaagatagtaacttaaaaaatctaatatattttaaactttataaatcaaatgtatatgctatttattatattactccataatataatgtttgattgattaaataaaatgttgtgttacaaaattatttgctacaaatgagatattatttaatctagtgggggaatgttatattattttatataatataatatttagattaaataattaagttgtaaataattaagtgtgacaaagtattaattttgtcaaattgtaacatacattatggagttacaaaatgtatgtagaatgatcacaaaataggagttgcaaatcctttaaattgatgatcacttgaatatgtaactctcatctctttttcactcttaaattagtaaaagatgttactaattatttatgaatgtgaatgaatgatagctattaaaaatatagttgttggagacttgatttattcatttataaggtgtataaatggttcaaaatcaagtgggaatgatttggaacactttggaaaagaattggccaaagctgaaaaaatggtaactagtaactagttactgtttttttcagcatattattgcccacgtttttgaaagtttgagag

SEQ ID NO: 298751 - DNA, 1815 bp, Cannabis indica
taaaaacacaattttaaaaactgaaaaattgaaaacacagccaaataagctttttgtttttaaaaaatttgtttttgaaaaatcaaaatgcgttatgtaaccgcttctgtttttcaattttaaaaatagaaaatgaaagtctgttctgtaaagtttattttcatttttatttttttattttatttaagtcgggtctaagtctgggatcaaattcgggtcagaggttgggttcaacgcgaggttcgtggagaggatttggatccggatcaggtcgtctaaaatattgattaagaaaaaaaaatgtttaaaaaaatattgaaagtgacttgtttttatttttaaaattttgattcttataattaaaaaattaaaaagtaaaaacatttgtatagaacatatttttaaaaaatattttcactttttcaaatttaaaaatagaaaatttattaaaaaagtattgtcaaacgctaccttaaaaaataaatggtaagtataccaaccaaatggaaaggacctagaacaaaaggccttcacaacagtaggaaaattcaatttgatggacactttagagaccctgatgtcgatggaagttgaatgcctaaggagatagcattcaactcactttcaaggacaccaaaatcagagcaggaattcaggcacaccaaagcatcgcccaaactagaaacatttttctgaatcacaactacacctccaaaagaatgctccatagaagcatcaacctgacatattagaatcagttccaacaatatcatagatagacaatgtaatgatcgcatagtttaaatcataagaattagcagataattagagatttaatgactaatttatgattatgtgtttcttagtgaaaaattatggcttagtgtcaggttttaaaaaaataatttctcaattgaattctaggtgtactatatatgctatatatgaaattttatgttttttatgtttatgcccggtaatagtggaatgtgataatttgatcattagagtcacttatatatagttgagtatcttaaaattaacggggcaagataactagacatttgcaataccaaaattatttggatttataattttggaccattttacctctattacttcatagctaagtaaagataatattatccttttgtcttaaaatgttgaattatgtttttagtggaattctagtaattccttagttacttcttgctgatattgtgattgaataagacaaattaagattagagtttatcccatttaccaacagattaattgaacaaaaggtcatatcttctcttctcttcttctacctttggcccaaaaaaaatcaggggaaccaaaaaaatttcttcaatttgagactaaaactaaagatttctagctagggatttcataggtttagaagattcagctcaaggtaagctgctctatcttttctttttgaattttaagcatcaagttaagttgagcatgcaaagttgtattttggtttctgtctagttttgcgagagctataaactattttggagagctaattatagttggttatgactgttattaggttttagaactcaaagcttactcaacaatggaaaacgttgatataagattcgtgtaatttttagttggaatttgtcatatatggtgtttttaagtgttctggaaagttataggttatttgggatagttttgagttggaaatgagagaggtttgagaattctggagtagaaaatagcaagccgtttttacaaaattggtctacgttttttactggcagtaacccaaaaaaacggcctgtcattttcatagaa

SEQ ID NO: 298752 - DNA, 1012 bp, Cannabis indica
atcgctatcatatatatatatatccattttaaggggggtcattataggattttccaaaaatataaattggctgttggcatataatcttgactgttggaagattacacgtgtgtggaccaagtttatctttattgtgagtaaaaggtcattcttttccttttaagttttctaataaacttattgagtggtgtagaaaatttgggaatacaaattcctacaactactattatttatttatttatttattttgatagaaactacaattattaattgtttatctatttatttatttaattttacggcgatgttacgagatagctgaagtgaaaaaatagttagtatttttttttattgtcatattgctattgatataataatatatcgaatcttatttttataatctattttttcaattattattcaggatgacactgaaaaataacaaataattatattataagaccttgaaaagatcgatcataaaatcataactttattatttggaggaagaataatgtggttgaaacctcttgaactgcctataatatgactgagttaaatcaaagaccataaaaatattaagcgaaataaaaatgtgtgcctcatatttattttcttaactatttagaaagtaagttcctaaagaaaaaaaaaactatttggaaagtaggatttgacggcactaatgtgacaaatatttttggagggttctggccaatatggtacatgcaacgtggtggtgtaccttgcacaaatcaccaaagcctacaaaccattagttaattatttcaatatgaatataatatttgtccacgtatcaaatttaaatgtattagtggtacttaaaatatgtgttagtatttttttaaaagatattaaaattttttaatcatttaaaaatataatatgttattttaaattctctttttatattatttttcgacacttttacttatgaaaacactttaatagtataaaactttttaaaaaatattataattataatcttaca

SEQ ID NO: 298753 - DNA, 1053 bp, Cannabis indica
atagaggtgaattggatcataccccggttgctataaagattcttcgtccagatgcagctcaaggaagatcccagtttcaacaagaggttagcttttaatttttttttgatgaattaaatcacaccaaacacaacatttatccaattcctgaatcctgaggttaaggcctggtagctgctaagtgtaatatgatatgtcattctccttatttgtactaactatttgatcacattgcaggttgaagtactaagctgcataagacatcctaacatggtactccttcttggagcttgtcccgagtttggttgtcttgtgtatgagtacatggctcatggaagcttagaagaccgcctctttcgaagaggtaacaccccaattctttcatggcaatgtaggtttagaatcgctgcagagattggcaccggtctcttgtttctccatcagacaaacccgaacctcttgttcatcgcgaccttaaacctgcaaacattttgctagaccgaaactatgttagcaagattagtgatgtaggcctagcaagacttgttcctccatcagtagctgattctgtgactcaataccgaatgacagcaacagcaggaacattttgttacattgatcctgagtatcaacaaaccggtatgcttggtattaagtcagacatttactcattcggggtcttgcttctacaattaataacagcaaaaccaccaatgggattgactcatcacatggaaagagctattgacaaaggtacttttgaagaaatgcttgaccctgctgttactaattggcctatggaagaggcattcaaattcgccaaactagctcttaagtgtgctgaaatgagaagaaaagacagaccagatcttggcaaaattgtgttacctgaacttaacagaatgagagaattagctgaagagaatatgcctgctgatgggactggctatataccagcttcacattcccctaaccgtggcccgagttcatctccatcacaggtgagctagaaagattcaagcttcttcttcattcattcttgtattgttcttc

SEQ ID NO: 298754 - DNA, 2135 bp, Cannabis indica
gtttctagttttttttttttaagagagaaatactcatttctattaattatattttatataattagattttttttcataaatatatatatgtattatgttttattttacaattttacgatttaaattttttatttataaatatatatttttaaagtttcaaaattataaaaatatggttttctcggcaaaacgtaagaaaataatttttttaaaaaataaaagaaatcaacatcacaacaactataaataaattattaaacaacaaaaaaattcaacatcgtaacaactataaataaaatataaaactaataaaaaaaaatattgaacaatttactgaaatttgtatttttatagataaaaaaattcaaaccataaaaataaaatttctcggtgttaatagttttttgtaaaaaaaatcaaatatttggtcagctatgaaaaaaattccataaaattttggttattgaaatatttttgaaaaatttctcctaaaaataaaaataaagatgctttttttaaaaaaataaataaataaatattcttttgcatcttatattttcttaaagattttttttccaaaatacgtggcaattcaggaagaaaccatgtggtagtaggcctccactacgggacatgctacaacaaaacatatatctgaggcgcgtgagtcaagaaccacttcaggagtttagtcatctccaataggaccctctgagatggtagttagttattttttcccctccgtgagaagactcatgccggagaggctacaactagattgtaggattcggcgtgaggcccaaggctgtatatgaattgaattgttttcaggatgaatatgctttgcttaaaaatcagtatacctttaaaggtcaagaaagcgatctgctgctactctggagtccgaaatagctacactacatgataaaattcaaacagtgtctgaagctaagaagcttcctaaggaaccggtggtgcaccctgtgcgcaaatttaatgcagcatgggaaaggtcaacctagctatggaaagtgtgtgtttaagggcttaaagccataattctttgactttgcgacatctcatgtctcatttgatagctacattgcggactgtcaagtcatgcctcgcaaggcatcacctctaaatggtattaagtaccactaatactcaataataatacacttcattttattaactttctagtttatgtcttgattaatttttgtatttctcaattcaaactataatataaggatttaaattagattttttttgtcattctaacaaaatatataaaattaattaattagattcttgtgattttgtaatttttttatgtaatcttattttacagtttttgtcaaaggatttaaaaattagatttatgattatttaacttatttttttttaattctaattctagttttttttaatataaaaatatttcaattagattacatgttattattttagttaatttttattaataaaatttcattatttattaaagaaaagtaattatcacatttttcaaaaattcaaaatataagcatattaggacaagataaaaaaaaaaagttggtttaggtgcttgtgtaagtgatttcatgaaaagttacaaaaaggccaaaaagcaatccgacaagagatctctctaactcagtgctgttaaattctggtgatttttactgcttctttttatggtgggccactaccattagattcatgccacgtgttctctataatttgtacactaagattcaaactttttcctttttattcaagtcaaccatttgttgtacaccactccaccaatacacccactaagttttacattgatattagtttttaagggttaaatgactgttattttacttgtatttaattttataaatttaaagtttagtcttaaaattttttaaattattaaattagtaacaaatttaaggtattatttaaatattattatatactgtttatatgtatctttttatacacatgatacgtttatattagtatatataatattattatttaaaactaattttcaaaattcatttaaattataaaattaaaataaaatatttaaaataataaaaatatataaattttgaaataatttttatattttttaa

SEQ ID NO: 298755 - DNA, 3613 bp, Cannabis indica
gacatggctggtgattgtgattctagcaaatacacttcaagattcttgatgacatttacaaggggagttgtttcatggcaatcaaggttaccgaaatgtgttgctttgtctactacataagttgaatacatagttgtaactcaagcttgtaaggaaactttatgaataaaaaagtttctataagagttgggcttggagcaagaaagatactttgtctactgtgacagtcagagtatcattcacctcagaattcaacattccattccagatccaaccatattgatgttagatatcaatggattcgcgatgtgcttgagatgtaagaattgtacttagaaaaaagtgcataccagtgagaatggttcagatatgttgacaaatactttttctaagaagaagcttaaagcttgtaggcaaagagcaagcatagttgagtccactaactaaggcagaggggaagatttgttgggtcaaccacaaaaagaaagggctgatttagttcttgtcatggagaacaaaaagtagcaaccaagaaaaggaaagaaaaagagagggaaagaagagaagaaagctaaagagagaaagtaggttttgctattttgcattgaagatcaagtggttgattctcatccattttgactcaaagttttggcgatgaatccttgtgaggtgctctaccaatctaccagttttgatttgacaattgttctctctaaggtgctcttttctacaatacccaccaagtgagactcaaaatttttctttgtgtatccatcttttgagatgatgatgatgatgatgatgattgtttaatcttgatgttgttgtgagtctccagttttactagagaactttgtaatcccattattaaacttcgataatagtggatgattaaagcgaactatagtccccgtaattttttcccacattgggcttccacgtaaaaatcgtagtatctccctttcatgctttgatttgtgtattttctattgcttgtagtgctttagttgatatttgatattgttaattgtggtggttgataaatatcccattttcgacatacagaaagggaaaatattgtgattaattgcaataaatcttcccaataaaaaccataattaaaagagtgatcaaatcttggtaaacttgtactattaaactctaatcattgtaacttttactttgaactatgacttgtatagttttgcccatgattttttttaataaaatcttagtattcttcgtaaatacgtccccttcaattgatacagtacgattgtcagtttaagtaacataaactagtcgaaatcatgtataatggcattagatatacaaacataacattagctctagatgtacctacatcatttgtccatcatatatgcttatatttttcatagataagctccacatcattgctaatcaacaaactatgtaatataatgaacgaaatacaatcaaatgagcacatttacgattatttctataattaagaaaaaacaaggcaaaactcaacaagctcaataagtaaaagtcttatttattcttcaactaacaacaaaaaccagttttacatttctgatcagaatgtgaccgtatacatgttgagattgacttcgaagttaccataccaaaaatgtataatgcaagctttgccatgctttcaatatttggaaagacagaaacaagaaataaggccaccaaattacagcttacctaaagatggatttccactctgaatgccattgtgccaatcaaaattaataaataagcgaaacagtaagatgccaagagggtttcaaacaaggtcattgccctgaatcgtcatccaagacagacatttgggtcctcttcatcggagtcaaattcagcctgcaagaaaaagaaaacagataataagcagatacaattacagttacactttagttcctagttttcctagttaatatattgtgttcacttgatcatgataagctcaagagatcagattcacaaagttactacactttgtatcatattaggaaactcacattctcatctttgtaccacttcccatgaccatctcgcttccaccctgcagctgcaaacttgagctctttctctttgcgctctcggtaatctaaacaccattgctcgacaacctctaaacaagttacatctgcattaggaaatgagctaacaccactatccaaatgagaattgctagtagtttcaacaatagcttgactcacactcccactcccatgaaatttggtatcatggtggctttggtttatgcttttgctttcggtgacagaattggcctgcgcataaatttctcctccgagtctttctggagcagcaaaacccctcgccgcccccggttcactcaacaaagttcctgaggccatcttaaacttgtggttgtaaatccctctaaagcaggcaggggcacgagaagggtactcttccaagtctattctcattttcttagtaacattatttgttgtggccacttctctttcctttagtctagactctgcagcttggtgctttgaacccttgcaatgcgtctacaagtgcaaatacaaagttattttatgccaaaaaaatcctgaacgagaaaatattgaaaattgaattcttaattaaattctcaaaatccaattattaaaactaaacaaagcacgcagaatatactcacactaagatattattttgggagacaaaaagcttaaacgcatacataaatccagccaaatgtttcccctaaattaggataggaccgaattttcgtaactaaacaataatatatcaatcaccaaaataatggaagaagaatcgaagagagagagagacgtacgggaaacatgagaggggaatcgaggacaggagagtggggacagatgaggcaagcaaacttgccattagagagcttcttaaaggaagagccttgaggggagtctaccagcagatgttctactcgcctcttcctgtactgcgcttctcttccccagctatcacccccgaacacgctcatctcttctccttcgactaacttatttctattttagaataaaatggtgttttaccctcaatttcacacttacaccacttacgctttagaataaaaattctcaaaaatatttaaataactaaattagaaactctcaactcattcactattttaaactaaaaactctaaattcattttctattttaaaccttctttaaaatttactaaactttatttttataaaatattattcattactctaaacttattttattaattatttagaattttaatttatctttttatataaaaatatgtataaatatatttctttttagaagttttacaaaaatatcgacttttgaacaaatatttataattttactgccacacgataaaaattatttttatattgttttaagctttttttaatattgtagacaccaaatatcaagaatcatgcctccatcttttacacccacgcatagaactaccacaacaatatgaacacacacacaaaaaataaccattaatttcggcgacattgagtaaaaacagtgaaattggcgtcaaataagtaatcatggcaaaacaagtgtaaaacaacattaaaacaaa

SEQ ID NO: 298756 - DNA, 4578 bp, Cannabis indica
atatatgtcaaagttcgaaaagaaaaattattaattaatctattttataatattttattgacgctgtgaacagagtcacactaacggtagaacttactcaaaccaaagataactcggctaaccgaatagcatgtgttataaatttttagtagttcacaattaaaagaagagcattgctattgggcaccttctaaatgtgtcgacttgcaattggctagcgatactctataaaaattattatattaaactatatgggacccgatacttaattgcaccaatagcgatattaacacgtaggagggtgctaggcaccagtggtgcgtttagcatttctcttaaaagaaataactcatgttctttgtttcaagctgcggaagattctcactgccagagttccacaagcacctactatgcatacatagatgagacccagagccaccatttttggacctctcttcaatccgacaccccaacttctctcttcatctctctcactccacaaaccccagctcggttcgctttcctatatcttcttaaattttcttagtaagcttcggttctcgacaaccccatcatcgcttttggagtcttcatcacaatcaagcccaacccacatagattacccatcactttcttctttcactggcattgctcaatctgtcatatctagatgttcccattttgtagagaatgacaataccaaaagctttaatagcgattctccaaaagaacttcttcgggagatttcggatatcgttcctgaatacacgcgtagatttcgtcgagtttctgagctcaaagccgaagatgtgcttcaattattactggggtttcaatttgagtgtgggaaagttggaattggagctagcaaggttgaagctttacgggaattgttcaagtgggctaatgaacaaagtaaggattttgagcatcttcctcagtcatgggaggtcatggctcgattgcttgtccaagtggggttgcttaaagaagttaaagtcttgctcttatcagtggagagacaaggaatttctatggattgtcatgaaattttcagtaatatgattgaagggtatgcttgtagaggtgaattagagaatgctatttctgtatatgatagaatgaagcaacttggttttgctccttcattgttgtgttattgtattcttcttgatcatttggttagaataaagaaaacccacattgctttgggagtttgtttagatatggttgagatgggtattgattggaatgagatggtgaaaacaactcttgataatgtcattagattactttgtgtagatggaaatattcaagaggcaagaaatcttgtcaagaaggtaatggcttgtggatacaaggttagtgactcttctattaatgatattgtttttgggtattgtgagaagagggactttgatgatgtgctaagtttcttttttgagataaaatgttcacctgatattctagctgggaatagagctatacattctttgtgtagttattatgatacagaaatggctgaacaatttatgcatgagttgaagagttttggttttgttcctgatgagataacccttggtatcttaattggttggagttgccatgaaaggaatctaaagaattcctttgtttatcttgcagagatatttgctagaggtttacaaccccatttatgtacttataatgctctcattggagggttgtttttgaaaggtatgtggaaacatgctcgagacgtttttgatgaaatggtagagaggggaacaactcctgatctatcaacatttagaattcttttagcggggtattgtaaagctaggaaatttgatgaagtgaaaaggacaatttgtgggatggagaaatgtggtatagtggataatatatcattagaagggaaactgtctaaagctttttcggttttgggttttgatcctttagctgtgagtctaaagagggatagtggtgtgggactctctaaaaccgagttctttgacaatcttggcaatggactttacttagatactgacattgatgagtatgataggagagttacagggattctagaagatggtctagtgcttgatttgaactcacttgtagaaaaggattgtaatcatggaaacctgaaaggtgcactagctttagcagatgaaatggctcattggggacaagaattgtctttgtctgtgttctctgtcttattgaaaaggttgtgcttgtcacgatatcatattaaggtctatacaaatattttagagaaaaatctgaagatggttaatttgcttgaccaagaaactcgaaatttacttgtacaagtttactactgcaagagaggatggagattcaacgggaagatagtttgggacagcatgctgcacgggcatttaaaactccataacgaggcatacactgctataataacaggtgtttgtaaaacgggaaatgttagggatcttcatggttggtgggatattgctcgagaagagaggtgggtgccaaggcttgaggaatgtaaatcccttttggaatgcctatgtagtaagggaatgctgaatgaagcgctggagctgttcgagaacatgatggtgtcttttcctcacatgaggttagacgtttgtcatctgtttattgaaaagctcagttttgcaaggttgactagagtggtacatatattgatagaagagcttaataaaaggggttgtgcaatggatcatctagcttacagtcatcttataagaggagtgtgtaaggagggaaaagtttccgaagctttagaaatattggagtgtatgctggctaaaaatttggccccgtgtttggatgttgctgttatattaattcccgagctgtgcaaggctagtagacacatgaaagctattgcgttaaaagaggttatgtcgagcaaggattcatcatctttgctgtttttgaataatgcattaatacaagggttatgcatgacatgtaaggttgaagaagcagccagtgtattccgagagatgggattgaaagggataccttcagatgctgaaacttacaatattatggttcaaggccattgcaaagtcaaaaactttaggaaaattgaggagcttcttggtgtcattttagaaaaagatttgatctttcaaccacaacttaccgaaatttggtgcgcttaatgtgtatggagggcgaggtctcttgtgccctaaagctgaaggaacttatgcttggacaaagcaagacaccttaccttgttatttacaacattctgattttttctctgttcttttcgggaacagtttgtttgtaaatgaagttgtgaatgatttgcagaagaagacactgcagctcgatgaagtctcttacaattttcttgtgtatggattttatcagtgtaaagacttggcaaatgcttctcagtatttatctactatgttgtccaaggaaatcaaaccgaacaatcgcagcttgagggcagctataacggccctatgtaatggcggagagcttgcgaaagcgttagagttgagtcgggagatggaagtaaggggctggcttcatgattccatcattcaaaatgcaattgtggagggccttctttctcatgatatggttgaagaagcagaaacttttctcgacagacttatggagaaatgtctggttcccgatggcatcaattacgacaaccttatcaaatgtttttgctcatatggaagactaagcaaggcaattaaccttctaaacttaatgttaaagaaaagcagcaatcttccaagttccaccagttatgattctgtaattagctcttgttgctcgagtaacttccttaataaagctctggattttcacgctgagatgctcgataagggtcttaacccgagtatgaactctcagaacataattgtccatcacctttgcgaagatggacgaccttcggaagcagaagggattttgatttctatggctcatgccaatgaaacaccaactagggagatgttctcgtctgtaatcaataggtatcgcttcgaaaacaatcacaggaaggtgtctgagctcgttcgggtgatgcaacacagcggttatgaaccagatttcaagacacattggtctctcataactaatctaagaaattcatttgacaaaaacacaaacaaaagcagccaaggcttcctttcaagactcctttctgaaagtggattcactaggaaaaactgatacaagggctacacacaggtttgacttgattaacaaatgttaaatatttttcatgtgttttctattttgttctcataaaaattactcttggcaacttcagctaaatgtaacaaatggactggtttggcttagattttttaacatgttttgatcttttgtgagaagttagaataattttgtaattagtaagttatttgtatacatgtattcttttataacgtataaaataaaagaatttagcgtgcaaagaattatttgactctgtgtacagtagtgtgttaagtttttttaaatttcgtaagatgtattaaataactataacgtagataatcacgaacaaaaattcactgaaatgctcttttagggattcatttt

SEQ ID NO: 298757 - DNA, 6401 bp, Cannabis indica
ttattttgacaaaaaattaattcaggatccaatttgtactattttagaaaatatagacataaattaatttagatatacattttagaaaatatatatttatctgaagtaaattttggaagatttcaaccaagcctcaatgacgaatttcatcacaattttcttccaatggaattagtttatttaacaatcattaccttcttacacaattgaaccctttaagaggtaccttattctaaaacatgtggagttgttaatattgctttagtgataaactaaacatagactccattgctaattgaccaaactgtttggctatttataggtaatatatcacaaatttgatgctaactaatccaagtcttagtaagtgatcaactttttgactcaaaagaaatcaaatgagaaaaaaccaccatcacctactcaataaagtctcctcaaatcacactataaaatgttagttattttaccacaaacaaaaaggtgaagaggtcaaaacttcaaacatcataaaataaaccactctttggatgacttaacaaatcctcaaaacccaacaactcctcccttaaaggcaaactcttcatgttttatatatataatcataaactcttcaaccctttttcattccatatttttggcatcttcaccacaatggctcgccagcttcatttccaacatttacacaacactaatcactttcaagttggctttgccggaatgacattttttctatgtgctattgcgttgttcaagtgcgcttcccactcccgtgcatggcgacaatggagagcttgctatgaacccgacaccatcgatgatcatagtgtgcaacacattcaacatggaaacaaccgacaagtcatggatgttgatgaagatgaagtttcggtttggcagaagaacatactaatgggtgggaagtgtcagttacctgatttctccggtgtcataatttatgacacgaatgggagtgttatggcaccgtcgaaacctcctcgcttattactaccatggaagtagttttaagagaagaaagtgaaagaaaggaacttttttaaattactgcttaattagatattgatttcatgaattagtaattgttgtctttctcttaattattggctttactatgtaaatggttattggctaaataacagcaaaattttagtgtgtaatatttaaagaatcattggatttggattttggataataacaactccaaagagtggcaataatactagtaaaattatataattaaaacaagaaaaaattatattgatattacaagagaattttggatggaaaacttgcaactttgaagattcattgccccccacaaaaaaaaaagtaactcaaaattgcctaaaattatctggacagtgatggctctttcttatttgaccaagaactctgtcctctaaacccgacaacgtttagtttcaaagaagttgatttctctgcactcgacctcttactccctaattgtttccttccactcgaagaagcttttcttgggctacttgggcttgaagaagaagctcttcttgggctactagcactcgaagaagaagagcctcgtcttggtgaactcgaagaagaagagcttcttcttggtgcacttgaagaagaagaacctcttcttggactagacatttttaccgactttgataacttaatacctgagtttgcagatttagctggaccagctgatcttctggatttcaatccttgactctgagatgatttctctgaatcagcttttatcttgcctccctgctttgcaattttaaacaatctttcattctttcccttctgctcggttattttatccctggcgatgtctctttgaacactatttatggagagcgattcaagactttcattcttccttattgcctcctcaattcggttagctaaactaacattcttcttagcaactaaacttgttactttccctgtacagaatgaaatttctttcacaagacagtctaacaagaatacagaaagacccatgtaaagacaaactaattaaatggtatggagttttcacacatcgaatttcaccaggcacactaagtgattttttttttgaaacaaagctgggcccaaccctatcattttggggattatgaaactatagcaactgctgtacatacaaccttatatctcgtgggagcacacctgaccatttgagctacccttcttaggccggcaagccaattgatcgagcaaaatgttcatcatttcttattttattttaaaatgtactctctatcaaagttgtgaagcattccttgtgtgtttgtcctaaagaaaattaaaataatgcaagtgaatgacacaccttttgcgcccattcgagcagttctccccgttcggtgaaggtagtcaatctacaagagtaataaatcaaggttaagcttcctcagtaagtgagaacgattgaaaaacatgaacaaaatattaccagtggagctaagacttaccgagttggatggaaaatcaaacataataacatgatctacatccaagtctagtccccttgcagccaagtctgtgcagacaagtgtggggcagtctccatcatcactcttaaactttttgaggttttcaaccctgtatttcaaacaatacaacatagagcctaagtactgaaacttgaccttcatagtattttctcccacatatcgactctcatcttaatctaagaaacattaaatgctttaataccaaattggatcagaaagtgatggtcgggtgttctttacataaatcggcacacttctagttcataactggacaaagattttgttccaacagagtggaagaataaaaggctcaaaccatacaaaatcgagcatatgtaataattgtgttttgtcttacctttgttctgctggcacctcaccatggtaattgacagtagaaatctgattttcactgagaaagtggtccacagcacggctagaattcagtgtgttacagaataccattactttgtttccttttgccaaacttggttcaagaacctgcaatttcaccacaagggttctccctctgttagactaaccaatacaatagtgtaatgaaaatttagacttcctctatttttcacaatttttctcctatgttttcctccagtttttcccaatcttcctattatatcttccgctatcaattgtttatttcagattcatcttctttcttttcgtttagtttgctcagggattactctttggtcttaagaatgagtgattgctcttctctgacccttactgcccaacctgaaagcagacagctaaagcgttcgacttactgaacatgtttctatggttggtctgcaaccccttaccaatctgattgagtaaactaatccgtacaaatgcatcactttcaaaccaaacctaaaacataattatacattttgcttactattgcttctataataaaaataccttctaaccttggagctgttcatttatagacatttatgaagccgtggtatccataaaaacaggtaagagctccaccttttacctaattctatggaagaaagaaaaaacagtgtacagaaatactattatttgcccttttactagtttcttgtctttacaatagtaccgctcgtgatttacgctgttgcatctgttgcatgtacaaggatctaaattaatgagtaccaaaaaataaacttaagatgcttcttcctgagattaaaaaacaaaatattggcaggacaagacttatatttagttataactatgaataaacggaataataacaaacctgtaataatgcttccatcttgttttcggtgcctgaaagtttaaggaaatcatgacgagcagatgcaatttttttatgcaaagatgatgtacgtaaatgctcgatcccttggaactcctcatcaactagagtttgcactccctgcaaaacttctcaaaagtcaatcatccaactttattataacatcacaccttgtgcagaagaacatcaaattccagcaaataaggtaaattcaaatatttatcaatcatgacattgcattagaatcctatcgaattcattaacttcattttttttcatctggtctttacttctatatatatatctaaatctgcagaacacaaagatcccaaaatcttttaatatgaccataaatgttacctttgtcattgttgcagtgaccaaaacagtttggaatccttgaccgtcgggtttagttgagcgatgttttaaaggggcgaggaacttgcgaatgtcaggtccgaaaccatgatcaaacatggtatctgcttcatccaacacctaccagtacattaaatgaaataaattaagaccgcctacgttattgcaccaaaccagtggcttaatagagtgcaaggttgatatgcacgatacagctatttaatcaaacgcaaatagagtaatcattgtgaaagaaagaaaaaaaaaacccttaccacgtatttgatgtcaccataaacaagattcccttcctcaatatgttgaagaaccctgcctggggtcccaacaaccatatcagttgcattattcagcgaatcctcttgtggtcttgatcggccgccaccacttaccatagtagacctgaaccgagcatgatggctaattgacttagctacacggaacacctgcaatgcccaaattgttagctgaaaaaggcagagcaatccacaaagtatataatgtcaccccaaactacaaagctatacacaaagcacctgctcagacaactctcttgtgggacataacacaacagcgcggggacgccttggcctcatttgcataccagatagttcctcatcccgtctcagcaactgaagcatcaaaatattaaccacagtcctcagactaataatatatacacgcaacttacgaaaactcaacatatttcaacagttaccatatgtaaaactcctgaaaattcgttaatatgccaaggtagataaactgttcatatttaaagaactaaaaacactacaagttcagctcattttcagaacccattagataaactgtataaattacaggaattaaagatatttctatgaaaaaaatagtattttttaataccctctaactatgaaaacaattataaatttgcaccttcggttgcattttgttcattttctgagattatttattgatgtggtcacaacaagcacatatataattatagtatgatgaactattgaactaacttaagctagctcgaactaagtataatgacctcccacactcaaacgctaactctcgattagccatggattagtcatacaacaaattatttctagtatcaatttaatttattctctttttatcataagtaacaaacacaaattcaaccaaaaaaggaagttgcacatatcaagagcttaccaaaacccaaagaaagtcacatcatacattcatactctaaactcaacacaaataaaacccggatgttaaatgacacccaactccacaattccattgacaaacataaaaagtagtaataaaccacagaattgcatagaatagtaatgaaaagaaggtacctgaacaagaggcaacatataagccagagtctttccagacccagtatgagaacccaacacaacactcctcccttccaacacagcaggaatcccaatactctgaatctcagtaggaatttcaattcccaactctctcacagctctcattacctcctcagtcaaacccaattcttcaaaactctcaacaactttcttcttcttcttctgtgacccatctccactctccctctcactaccacctgattgtggtgaccctttcttcccttctgggggtttcacagattctttcaggtgtcttaatctaagcctctcgagaagtattgagtgcttaaggggttgaatggcttggtcgggatcaatggtatcggtttcgctcactgtggctgtgcatataggcctaaaccctacaaaaaccctggtgggacttgtgagtctgaagagagagaagcgtctgagtgcagagacgcgagagaaagatgaaagatttgaggatagagagatggtgagaagagtcttggctgcccctcccatggctgagttttttggtttcagaaatgagaaaggaaaaaacagagtataaccagaaataaagagtttcgacgagttataggtttgtgcctttatccacaaactaatctgggcttgggcttgggcttgggttatgctggacttgggcttgggctcgggcttgggcttgggcttgggagtattatattttagaaaatttatatggtatactaacttttgccattttttacaaaaatactgtcaggcggtattttttactttttaaccctatttttttataagtttcatactgcagtatattgtgttaagttt

SEQ ID NO: 298758 - DNA, 6068 bp, Cannabis indica
gacgacactataatcatgaacaaatatatatttatatatgttctagacttaatagaatttatacattaaacataattataaaataaatcatgtgaaccatgcaacataaaattatttctgatcttttattaattagtaaatctaattatttgaaatgagttttatttagggcacaaaactcaaaaccaactcccttcttcataaataaaaaaagagacaataagattatgagaggaaccatcatgtgataaggtaagagtgttcaaacctagaacccaacgagagttagccaaagagatggaattcccatttcccactttccaaacaagccccttcaaaagaagctctctgccccaaagaagacttctccaagtgatagaagagcagtgccccttaggagcatcaagaatatcattattcattaaaatacctagcattgagcagacaaaaaagtagcgaggaggggtttgtccatacttttcaagcctgcttagccaggagagcgtggttatgattattaatagactgaaaccccaacctcccataaaattttgaaacacataaactaggccaattctcccaatggatcttttttttattattatttaagtatccccatcagaaattagcaataagtctttggagattcgtacaactattactagtccatataaagcaagacatagcataagaggggacatcttagaccacaactttgataagagtttctttaccagttctagaaaagaacttagcatttcatacactcatttccgaggagacactttgaactaagtaatggaagacaaatttgttagccctaccaacacactgaggaacccctaaatatttactaataaaacccacatcgtaagtcccaagtgattacaaaagctttccttggcctcaaaattggtattaagggagagcagaatcgaagacttggcaaagttaaccaactggctagtagcacgattgtaggtatgcaaaatgcttcagatggcagtggtagagtttacattgacaggggaaaataaaatgttgtcatcaataaaaatcaaatgggaagtaacagtggcatttttgcagatagtaaggccagagaattctttggtggactctttaattcgaatggcagtagaaagcccttcagccattaagaggaacagataaggggataagggatccccttgccttatcccttagtggagtgaaaaaacttagaaagaaaaccattaaccgaagagacacacctaagcacaacggaaacaaacctagagggaaaaccaacatgcttgagaatagcctccacaaagctccactcaactctatcgaaggccttctccatgtcaagtttaagagcagcccaaccaatctttcctttcttcctacaatcaatagcattaacaatttcattggcaatgaaaatgttatcaaagatcagcctatcagacaggaagacactttggttgctggagatgatagtatcaagaacaagttaaattctattgactaaaaccttatcaatcactttgtaaagggtagaacacaggctaatgggtttgaaatccctcatttaagaagcattttttctcttgggaataataacaataatagtattgttgatgagggagacatccaagatattgttaagaacagccaaaatgactttgcaaaaatcagacccaagagtggtccaattttttttataaaagaaagcattgaggccatccagagcaagagccttgtcagcaaaaagatgaattaaagcttccctaacctcatcctctatgaaagggctatcgagggaagcaacctgagattgggataggctactattgacactagcaaggatatcagaaataacaacattgtcacaaccttgggtggaaaacaaagacttgtaaaaatttacaaagttgagaaacaaagccatcctcaagggtggttgatctaatgatttttttttcttctagcaacgaagccatcctcaagggtggttgatctaatgatttttttttcttctagcagaggctttatgatgaaagaacttggtatttttgtctcctgctctaagccagccaattattgactttgcttccaaactattttatctttgtaaagcgaagtgtcaagagaagcctagagagctttggccatgtcaaggtcgttgttactcaagaaaatgaaagtataaatactatccaaagttttctgagtggccttaatctggttcctaaggttgccctggccactgctccaagacttaatactattaacacaatttgtttgcttatgaagaaaatattcaaggttgttggcctcaggctaattctcattaacactccaagaagagtgaacaatgtcataaaaatgagtgttcgtgagctaatggttttcaaaaaaaaaaaatgtttgttcccattttgtcaccaaaggtcatcttcgagaataactttaagggtcatattatcagaaccatagaatgggagatgtaacaaagaagcattaggaaaaagattttttcattcattattaataacgcaccaatcaagatgctcaaggacgtgatcatgtttccaagtgaatttactattgttatcaaattttatagttgagtatgcattgaattatatataatctataatataacttttaataattatcaaattcggttttatgaacttgtgacctaaaaaaactactcatacataaaaatttaccaaccacgtcgataatcattttttaaatgcataccataatcccatgaaacaaaataaaattgatataattcgtatcttaataaaaaagatattccttaaatctaaaatatgtggaatacacatactttcaaaagcaaaccaaatagaaggtacgttcttctaattgtacgtacctttagctagggttttcttctcttttctctatccaagttagggtttcatctctttttcttctcccttctcggctagagacctagtcgacggcctggctatgtgtttggtgttctctagctgagagggactgtatgttggtggttctcttggctatggttccttgcacgacgagcatggggaagccgacaacagggatgctttttcagagtcgccgttgaggggaggtggaggtttttggggcttcgtggtctacagcggttgagatctgtaggaggcatcgatgggcctccgacagtgtcattcgtctttgctcaaccatttttggcgtttttggccctctgccttttcttttgaagctcggggacgtgctaagatgaaggggtggtcgagttttgcgttccctccagtgttgagagcttgttggtggcaggatgactcttcctctcccgttggtgtagattctttaatcttgtttttatttattgttgttgttttatcttagatccactttcagatctaatgcttttatgttgtgttttttatttagttttttggttcaataatggattttctctcgttagagatcagagggtttgtatccttgttttaattctttatcttccatctatactgatatggtacttgaaaatgactatgacttcaatggatattcgtgtctcaattggtcggtctattagtcttgttgtttgctcactctttgttggtattgatttacttttacttattgttgagctttgtaataacttttatcctttgattctttgttgaataaaaaacttaaaaaaaaatctaaaatatgcttcttttaaggttaagtagtaactttatcattttaccatacataaattacgtacattattaagcatagttaaatttcctttctataactacccaaaagacaatagctgaaaatcaaatcataatcttacatgtgtggccatttcaagggggtcaccgaagggtatatcaatacattctccataaagtccaaagataataaaaaatcaatgacaaggggtaaagtcacaaaaactaacactgtaaagacacctgttaaaattctgtatttctacttattccccatatccgggaaactataaacttttcaaacaaacatttttactcccggagttaaagaataattagagtacgcacttctgctccctttccccaccatttcatcttctaccataatatttgtatcaggaaaccaatgagaagtagaaatctatataagcttcttctttcggaagaagcgcttcaagtgccacaattgcagacctgagacaaaaatgcacacaccaagggacatgatactaaaccaagcgactcttgcgttcgttttttcgcttacttccctcatctctgcttctctgtgtaaataaaaaaacgacagtcacataaatgctatgatttacttgaattcaaacaactttgtctctgaaaatcttgtaatgatatgattcttattataaactagcacaaatcaaattccatttgtactcccattaatctagtaagttgtacgtgttcataatttagatatctaaatgatatgatcctttagatacaatgttaacctgtgcaaaagctcaaccccccattaaagtttaaaagacctcacttggaagaaagataagaaccagatcaacccatgttacatctagtcaaattctatcatccaattaatctgtagagtatttgatcaaagccaaccaaactttaatcaatatctgtagtaaaccttctctatatgcacaggggaaaaaacaagtctgtaaaggggtgcaacaacggtaggagttacctgttcttgagataaactagattctctctaatagaatctacaataccttcaagtttcctgagctccagttctacaccctttagcacaacacaattgacaagacactctctcagataacagaaacatctagaaaagaaaagtggcctcaatcaaaaggtagaaaatacaagtaaagtactcaatcttttccttcctggcaaccgattcccaatccttggctgcaattccggttctccagtctagactaacactgaagcttgatgcctccggtgatttgccatccatccagaaacaagccaagtaatttccactctctgttgttgtaaaggcaaactgaccttgagtgacattttccaggtggtgtagattgtttccatagggtgatgtaacctttttcaaataacacgaaaccaaaaacaaacccaatatcaggaattaaacaatttactccctattaactcaacataggagatcgagagatagttatcgattactatatcaaaattcacaatccagagttcaacagctaaaaatacgagaaactgaaaagttacagctttgaagctggatttacttagatttacataaatataatatagacacgcaattgaacttattagatctcattccattctaacgaattcggaatttcattttcagaaaaagaaaatcttagattcatccaaaaaaaaatatacaattagataagtggaaggagaaaatgaaacatacccgagcagaaatggtagggaggtgaggttgatcgtgattgacatctagggcgtcatgaacgacgtagtaatcggccaaaacgacgacgttggattgtatttcctcagaaacgcacttagttcccgtgttgggaatggtcaaccaaatagctgtggccggagtcatcagaaaacccatcgaacagagtagggttaacaaagccggcgtcattagagtccatcggtcaagcttttccgccattgtagaaggtagcgagtgggagggtgggtcggtcggtcttctttgcgtttgaattgagaaatctttttctttttattattgctctttatattttggagagttcggtgaaggtgaatctaagcaggcgcgtggggtgaagtgtgtgacgcaatttgggatcgattgcccaatcatgtatcagctactacaaaattacaaatctaattaggtttaccccagagacacgcgcaaaatatcccgtgctcttcaaatcctgttttcaatcttgccgtaaattaaaataccaattctcgcctgggtaaatagcctcgtaagagcatttttggcagattatttatcgcgtttttcagttttaactaaaaaaaaaaaaa

SEQ ID NO: 298759 - DNA, 3765 bp, Cannabis indica
aggcgcattgaggcgtaagcctcgattattaattaaaataatatttttagagtaactaaaaataccaagaataaataatgtcttataaataccggaggaaaatgcggcttatcacttgactggtatttatggtgagcccaataaatctcttagagcacacacaacaacttttctaaaattgaaaagcttttaaaaaatttaaaaaatcgtactaaaaacacgctatagcaaatgctctaaactccttcattttaaagtttatttaaaatacaccattcatactctacattaataaaatattattcattgatctaaatatattttatgaattgttttggattttaataattattttgtattggaatatgtgtatatattagtattatatatttgaaataaaaaaatataataattttttaaaaaagtagagttttggtaatgtattttaaagaagttgatttatgatatgtaaaagtgtgctgtaaaatagagaaaatagagttttggtgatatattttaaagaataaagtagataagctattgggagtgcttttagaaagaatacttggaatctgattcacacttttaaaggggtcttcgtgatcataatgctaattttcttggggctatttccaagtgcggaagtaggacactacaacctgatttggcagaagctttgagggtcaaagaagctctaagttggatgaagattcattggtggaaaaatgtgatccttcaaacagattgccttgttgttgttcaagaaattcgaagtaatgtggctatggattcttattttgggcatatcattgggtagtgtcattccttgcgattagagcttggaagtgttttattactttttgttagatggtctactaatagtatggctcatttcttagcatgagctttttgctttcctgcagatcgtatttttactgagctgtctatttgttctgagttcaagaatgtattattgaacaatttgtattaataaagtcttttcttttattttgcacgtagcaatgaaaattaaataaattgaattaagtttacctgacactgaattaaatgaacagccaaccaaggtggaagccatgcaccatgaacctagttataaaccataaaataaattagtatgtcaagtggcataaaacagcagaggaaacaaagaataataatgaaaattcctgcttttggaggtggaagcagatgtaggatttggtggaagtacccaggtttgctttggccacatgtctggttggccaggaaaaggaattctcgcattttttgagacaaggtccaagaagaagattttatgttacagagagtgcatttctaggcatgtatctccttaggcctattctaaggaaacagttcaagagctctccttttttcaccatttattgcaatcagaatattaaaatctatgtttctgacttgtttaaaatttcttcttcattaataaagcttctaggtttcgtataataataatagcacaatttgcaattatggttgcagtagtaaatcaagattttctctaaaatacatatcaaagttagtatcacctataagggaaatgcgttcaacaaaacaacaccgcctatgattaatctaccaagacaaagagtataaaagcttaatcattctgaaaagttaaattcagacattggaaaaaggagctaagaaaagtaaaattaaagatgttggaaagcataaacataaaattaaaaaaaaaaaataaaaaggtcaatctaacaattacctctgttaattctttaatttttgcagtggcctcgtacttggccttcaccatttcctcctgaataaaggaaaataaactgcttataaaaataatcagagcaccaaaaacatggaacatttagcagcactcatcaactagccacattacctcagccactttaagagcacgttcaatcttccgaatttttgatttttgttcctcattaactttctggagctgcaatatgaagcaattcaagttgcatactacatatatctaactcatacagaagataaatacaactagtttcgaataatataactatcgtccagcacgtaataatccaactgaaaagatattcaaatttacattttagtattttacgttttactgaaatccatagaggaacaaacagaagaacatctctacatcctagtgtatctctagaaatccatgtgatgatgaaaagataaaacacacatctcaaagaggcataggagaatacacagatgcatacattctgtattgttgaactcaattcgttgaacttcttttcaacttcaattgccttagctttcaaagcctccttctcctttttttgtgtttccacttcctttctcagtttttccacctgcatggaagttagagtgttacaaggatgatataacagagtgacaatgaacataactcatttaccctctacatccaatatctaacctgcttctccaattcaccagcacgtgcataagcttttccgacctgctcttctgcatctacagtcccttttttctgagaataaataaaatagtttaaaaattgatgaaaatgagcagaagttctacaaaacttaaacttaactgtttatgccttcaaaagaaaattagcatcacaacatgtaaagtgaccgtgcaagtacgtataacaaacaagagacgatttaaaaacatgcaataagaatccaatctttggatgttagaaccataccaagtgtcacgtccacaaaagtgaaaggaagtataaacgaaatacagctaaaatgaagttggaaaacttgatataagcaccaacctgaagggaggcaacctcatcatgcaaggatgaaatgctatctgacttctcttgaatgattttttccttctctgctatcaaatcattcttccctttcagttccttggttttctcctcaacttgggattcttgataataaacatgtgtcagcaaaacagatcacccgcttaatcaagcaatgctcattgcatagaaattatttttataccaaaaaaaaatggagctatttaaatataacagggttctgcagtatagtctacgaaacagaattattcttattcaccttgtaattgaaaatgtctatacccattgcttaaattgagtatataaaactctattgtctactgctaattgcaaacttattttttaaaccaagatccctttgaccactgacatgtcaaaataaattcaattgacataaaaacaaaaaagcaataagtaaaaatatattgtggggaagcagatccgagtactaaaatacactttatttcctgtgaaggaaagacaaatcgtaataatttcattcaactttcgctaggttgctggtcaaaaaatagtaaagtacatgaataatataagtaccataaacttaaaaaatagcactacttctgcttggcgaccaataaaatcaaaaaaaaaaagtttacaggaataagattcaaatcgaatttaaagaccgctccacaatcaaaacgctatagaacgtagaatcttaccgagagcttggatcttagactttagttcatcgaactcgatcttgtgagtggacgaatcagaggcgacggatccatcaacctcgttttctccaccgacggaaacgtcagccctaacatgagtaaaaactagggctaagaagagtgatagaaggatgagcttcgtggcggccatggaacacgcagttacaggctccaaaactcaaaaagagttagagagagagagagagagagagatgaatt

SEQ ID NO: 298760 - DNA, 1458 bp, Cannabis indica
tcagttcaattggattggattggatgatgcccacccctagttataaatggtattagtatttttatgtagtgtcgttctatgaagttctacgaatagttagcagttttctataatcattattaatgtaaaataaataagattcaatattaaattacactaataacaacatgaccatgttaaacatgacactagaaattttttttagtatttctcgaggaaaaatatttagctttgtatatttagctttgttgaaaatcacgacaaagtttgtatgtaatcaataatgaaggattacttttcaacttgtatgatgattatactacaagatttaaaaccagctcaattaatattgtttgcattatttttactatttggtttttgaaatgaaaactacatgcataacattaaaaattttaaaaccctcaaaccaaattgacaaaaaatttcattctaattttatatttgcagcaaatatatgggctatgtttttggatatatgtaatacatttcattagataaacgtactgtgttgtgtacagaccattgcagaagccgttggagattggtacttcggtaggaagataaccaaagaaatagactgtgcttatccatgtgacactacttgccataatcttattccttaattctaatatccttaggctcgagaggtaatattaatattcccattaattaattcctgttgattatggaatatatttcgaaataatctttaataatttacaatatatatttgttgcagatggaatatatcggggcttaaggggaatagagtaacctttttctacacacagattttttttaattctctaaaagaggaattgactaaagcagcttatgaatgaagtaaaccctactaggaagcaatggatttggattctttgaaaaggaaaagcaaaatatactgacataccattaatactactaaatttaggaataaaataatgaaaaatgatacgtatcacatattattattgttcttattacaaaaagaaggaaaaaaaaacaaattattatatcaataatggacaatatgttgacaattgtctaaaatatcattgtacaagtatatatatcctacattaaggaaattatttaacttattcccatgcaatcttcttcttcttttttaaggtaaatactaatttgatataatatgtttctataaaaaacggatttatagctagtatcttaatatttaattacttattgtatcagtcttcttgataaaatttgttgatcaatttgcggcgaaattgcttcatgttttaatttttatacatttaacccctttatttattttttgtggcaaaactcccttatattttaatttttatatacttaacctctttatctttttttttaatggcaaaacccccttaaatttattattttttttttttgcaaatttaaaatattagttagatattaccgttaaat

SEQ ID NO: 298761 - DNA, 1225 bp, Cannabis indica
aaaaaaaaaaaaaagagaaataatcaatctcaaatttaaaacagtaaaaagtaaattaaaaaaattgcagcagtaaaaatttgaaaaacaaataaaacagagtttcatgaaaattaaatatatatttaccttcattcatactttattggtagtaaaaattaaaaataaatcattcttctaaaaaatcgtgaaatgtaatattatatacctccaacgctggattgagtggtgatggatttttcaaagactttgattgactccaacaaacctttttccctacaaaacaaatcaataagagcttctcattttcaagaacgtagaatttgatgattatgtgatcaaaacttaccgatcaaatcaataaaacagaattcaaatcgtatgaataagatttaaaaagacatgtatctatgtaccttgttctttattttctgtagtaaatttgggaagtggctcggccgagctattagccttattagaatcatcaaccgcatgattatttttattattattattattattattatttgaagtgtcgtgatcatcagccgacgatgaaaaccgaagaggagatggaatggaacgagttcgaatgcgattgagctggaacgatggtgtgacgatagaaggatcattggattcgttattagctttgtcatgaacatcctcatcctcatcttcatctacgtcttcttcctcctcctcttcttcttctgtgtcctcatcttcttcttcttcgtcgtcgctttcctctgtttcacttcttggatttccacgaaatgcgaagggagggattttgaagagcttggctctggaggaagatgagccagtcggcgtcggtggatgcgacggcgttttcgccgggtctccgacgtcgggtggtttctcggatgatggagggttggacatgtgagagtgggttcgggtggggattcagactcttcatggcattgtcggggaatgtaagagagaaagaagttatattttcacgagaaatggggagatttggaaggagacaagaagaccacgcgtgttgttagtatggttgagatttcattcaccatttctaatttctcacaccaccatttttctttttctatatttttttttctaattaatttgctaaaacgtgctaaccatgtatgtaatgtaagaagaatggaaaacaacatatatattataaaataacataaaatagatcataaagaagaaaagaagaagaaga

SEQ ID NO: 298762 - DNA, 7108 bp, Cannabis indica
ttcactgggcaagggatcggtcgtatagcagctaagctaagactatattattatctaagaattatatactcggagatactgttgtaagagctataagaaaaggaatcttcttccttgatcttaagtcaatacaaataacgaggattaggctattaccgaactgctcggggctaaacctctataaaattcttatgtcttattattgctttatcatatatctgttactacatatcgtttatcgcttataaaatagactcattgttgttgggtaaaagtgaagtcaacattttggtgctttcattgagaaaaggatcacaaatcgctctttattcaacattttataccaagagttatttgttgagtttcttagagtggtcgtgtgtggtttagtactatagagattgcatgatgggtgaccttctagtggtcagtgaaattgagaaacttgacaaccaaaattacaacatgtggtcaatgcacatggaggcatatctccaaggccaagacttgtgggagatcattagtggtaatgaagtcacacaactggaggacacaaccgctttaaggaaatggaatatgaaagcgggcaaagccatgtttgcaatctggactaaagttgaagatgaaatattagagcacatcaagtcggtgaagacaccaaaggaagtgtgggatactttcgtatcatttttcacaagaagaatgatacaagattgcaacttcaagagaacgagcttctctcaatcaggcaacacgacatgacgatcaaccaatactttaccaaggtaaaatgtctttgttgcaaaatctctacattagaatctgttgctggcatgtcaaatacaagaattagaagaaatattattcatggattaaggctataatttagaactttcattgttgtaatacaaggttggctaagccaaccttctcttgttgaattagaaaacttactagctgaccaagaagtgttagctaagcaaacatctggagtctcattaaagagtgacgataaagtactctttagtggtattaagaaaggttgatctcgaccaaatgctagaaaaaaaaaatttaaagaaaaatgatgacaaggatattcatcatggaagctcccaaatagggagagctcgaaagagaaacaaccagtgtggccagtcaaagaataacaataaatttgatgagaaatgctacaactgtggaaagtatagtcacatggctaaaaattgccaattcattaagaaaactgtagaaggtaatgcaaccacgtcaaatgcaaacaagacaagtgacgaagaatgggatgtagaagcgtcatttgtggtggaggaagaagaattagctatggcaactactattcttagaacaattgactacaataatgattggatagttgactctggttgcttaaatcatatgacaggagatgaagagaagctgcatgacatgatcaagtataaatatggtcgagtagtggtgatagctaacaactcaagattaccaatcgttcatatcggtaaaacaacaaccacattgagattcagtctgaaagaagtttcactccaggatgtttatcatgaacctgagatgaagaaaaatttactgtcagtagtgcaacttacaacatcaagccaccatgctgtattcaatcctcaagatgtcaagatctaccgagatcttaaaatctctggaacaccgatgatgaaataatgacatttagagtctgtctatgtgatgtcaacaaaattagcttatgtagacaagacttgaaagaaaaaaagacatgcaaggctaggacatgtcagctatcacaaactcaaggtgatgctaaagaagtttatgctaaaagatcttcctcaacttgaggtcagaatagagatcgtatgtgtcggttgtcaatacagaaaggcgcatcaattgccatataaagattcaaagttcaaggccaaagcaccattgaagctggtctattctgacatgttcggacgagtcaagcaactatcaatcagcgacatgcggtgcatggttacattcatcaatgacttctcaaggtacgtatgggttttctttatgaaataaaaacctaaaactatttcaaaatttaaagagttcaaagaaatagcggaaggagaagttagaaagaaaatccaattcctccgaacaaacaaaggtagtgaatatacctcagatgaattttttgtgtatctttaagaatgccgcatgcgccattattcacatgtgtaaatatgccacaacaaaatagagtggctgagaggaagaatcaccaccttctaaagacatgtcaaagcatgtaatcaataggcttctccaagctaagttagggttcatttcatgctttgagaaactgtgagactataatcctacagtaagccactttcgattatttagctgtgtgtgctatgtatttgtgccaagccacatgcatatccaatttgacaagaatgtaatatgatgtatttttgtgggatacgatagccgacaaaaagggttgaaatgttgtgagcctacaactagaaagtgttatatctcaagaaatgtcatatttgatgaagcttcatcatggtggtcattgcaaaaagaagcattaccagattctaaagaattggaagacaaactacaacaaaaaataggggagcaaattgttgagttacctccaactcgagatatagatcaagaagaaaacatcgaggatgatgcacctcagaatccatggaaaacaaatgtgcatcaaagagtagaagatgaccaactagatgtagtaagtccacaacttcgaagatcaacaacaacgcgaaagccgaatcccaaatatgataatgctgttataattgaagaagaaaagttcagagagctggagtcatatgaagaggcataccagaattccaagtggctaaagctatgaaaaaagaaataagtgcgctagcaaagaatcagacttaggagttggtgccaaagccaaaggaagtgaaacccattttgtgtaaatgggtctacaaggtaaaaactcattccaacaattcaattgaaagatacaaggctcagttagtagcttggggattttttcaacggtatgggctagattataacgagacatttagccaagtcgctaagattacaacattgtaggttctataagcacatgcaaccaataaggactggaggctatataagatggatgtgaataatgcctttctacatggataacttgattgagagatatacatggtgtaactaagagaatttgatgattgaacacatcctgactatgtttgcaaactgaaaaaggtgctctatggattaaaataagctccatgagtatggtatggcaagattattgagttcttagtagaaatcggatgtttcatggaacatgtaaattcaagcttattcttcaaagtacgggaagcaaagattgtgattgttctggtatatgtcgatgatctcattatcactggagacaatgatgtagaaatttgtcaaacaaagtagaacctatcagtatggtttcatatgaaggagcttgaagaattaaacacttccttggattagaagttgatcaaactaaggaaggcttatatctttgtcagcaaaagtatgctaaagatttgctgcaaagatttgggatgcttgagtgcaagcccatctcaacacctatggaagctaatgccaagctatatgctcatgctaggaaggacttgcaaatgtatcaataacttgtaggtagtctaatctaccttatattgactcaactagatatttcttatgtagttggagtagtgagccgatatatccagaaacgaaagaaactacatttggaagtagtataatgaatactaatgtatgttaaagatgcagttgactatggtctcctttataagaaaggtgataagtgcaagattgttggatgctgcaatgcagattatgctagagatcatgatactcaatgatcaactattgggtatgtattcaagcttggatctggaatagtatcttggtgtagtaaaaggcaatcaacgatattcttattaatgacagaagtagagtatagagtagcagcaatggaagatcaagaaagtatgtggttgatacagttgatgaaggatcaacaccagcctacaaattatgatgtgccgctttattgtgataattagtctgcaatccgtctagcagagagtttagtgtttcatgctcgaacaaagtatgtgaaagtgcattgccattttctcaaatagacatttctatgagaagagttagagatgcactaagtaaagatcgaagatcaagtagtagacctggtcaccaaaggacacaacactgcaagattttagaaactcaaagaacaactcagttgatgagtcggtattgagggggagttttaaaagattaacacctcctctatgtatctaaaattttctattattttggtaatattacagaatcatatagagttaatattcttaagaaatttcaagaaatttttaggctacaataaattgacaatttgctagaatactctatcacaataatttaccactcttgagtagtataaataggatagttggtcctttggtggtgtgaggtaagttgagtgataactctagtgcgcaagtaagtgtaatctaagtgttccaaagagtgtatcaaaagtgtgagttatatagtgttgtaaaagtgtctagtattaaaataagagtgtgagtgtttggtattgtggtctagtaaaaattgttcaagtcttaatgtaattacttttgtaataataaaagtaattatattttcacgtgttgtgaactataaataataattgaataattctcgttaatctcttatttcattctaaattaaataaatagaataattagtatttttgccccttaaactttcgacactagttacctgatcttgccccctaaaatatatggcttgttaaacatttcccataaaatataacagttacataatcatgtcccttttgatcaaattgtaaatatatttggagggtcatgttgctaatttacaaagatatttcagcatttaactgaataaaaagactgaaccaaataaaagactaaattttgataaatgtaaaagttcaggataaatttttaacaaatcttatattctaagggatataatcaacactgtcaaaaatttaaaagataaaattattaattattcaaataaatattattttttactaaaataatatataaataacatattatgcatggttcatgttgaagaatggctcgcacgtgtataaatgtgttgttttaatgagatatgattgaatgggttcgaccaaatcatttttcatcttttattttttttcttttattttttatttatttatttatttatttatttatttttgtataaaattcaatatatatgccttggcattccaaatgtattatttggttgagatttgataatgtaatattttttttaaggattcattagtaatttatttgactagaggctaatactaattgatctaatttatttcctctcgtttgcttcaatattagtgtacatcgtttttgtttattaaatatcaaaatactatactatatttgatcatatattggtagagatggtatatttcttgatcacacttaattaaattttcaagagtgaaaattaatggaactaaagaagacataattcatgcattgtggtgctgccctttggtcatcaaatgtagtgaaattatagacaacaagactctgtaaatcaatcaaagggtgtctaaggtgcttgatgtggttcgattgggaattcgagtagaacatgggatttccaaaggccttggtggatattggtgtaagggattcatctatgagtttagagcaaccaaagaaagattctccaaagacatgccatttcctttgtaagttttcttttcaataatgaagatttcctatttcaaaaaaaaaaaagaaggaaaaagaaacgtaattgttagcaaattatataatctcaatacataataacttggtgttagttagaatgtaatatttatgtaatactacactatatttacaggcttgaggggctgtttggtacagagattttcttactcaagaatagaaatactaagtctaatcattattgtaaaaaaataaaaatatcacatttcattaatatattaatcaaacaaagtaatcatgatattcctaggcatcatcataatattgctacatataaccaaacacagtaatattgcttttctaggtttataattctcttcatcactctcccagtaatattaaacttattctcatcaaataaaacttgcataccaaacggcttctaaattagaaatagttaaaatggaatgagaatcactcgtgccatgaagtgatggtagagtactaggactacatttttttttaattatttatttaatctttttgatgggatcaaagactacagggctagatatagaagaaatgtgtccattattaataggaaaatactattttttttgagatggaaaaaggtatatagtagcattggattggtccgtcttgaaactggcataaataagtatgtgtaaataatatttgagacattttaccttttgggtattagagccatgtgatatgacttatacgagtcaaacacaaatcaaatgcacaggaattacgcctcgttttcttcctttacacactaatttatcaattatctcgtttcccactgtttctcattattttattacttacttttcacttatagccggctattttaaccagctactaataatgtaataatcatcataatactttcttattttattatttaatatcgttgtagatcaatttatgtctcctcattaaaaaaattaattgttcttttatagagatcagctctcccctttcaaaaaatatagaatatatatatatttttttgaaatgtagctatttttttttcttagaatatttgagaaagaagaatgcaatcatcaatcttttaagagaataatcacttgaggctagttcaaatgatcatagaaaggtacttgagtgttagaggtatagggttcgagtctcaagttatgcaatgtaatatataaacgcttgaa

SEQ ID NO: 298763 - DNA, 1962 bp, Cannabis indica
tcaaatttcccatttaatatatgttaattatctatacaaatgtcttcagaatttttttttaatttttgaaattttgattgtcctacatttgcgatcattttttagtataattttgatcggacaaaagcaaggtttgattggaggactcaagaatacaaaggtttgtcgtatgcgtttatgtattagatatatatttttctgttcatgacaaaggtaatcatattatatattttactgtttgtttgaccaataaaaaatttatgaaataatacttaagttcaaataaattataatatcaaaacttcttcatgattaacttttaaagtaaatatgagcataaaatgataaaattatacctcaatggtcagctttgggaggaaagtcaatctcaatcataaatatttcctcaaaaaccaccatatccacaattatgaaagtaacctcatcttgaagttgaatgtgaaactgtagcaagcacaaagaaaactgcggacactgtcagaattagcataacacaaatgaattcttttactaaatctttattttgtacaaggagaataacaataaaaaatacaaacacagcaaaacacctatataatataagaagtcctgaaaatgagggaacataaaactatacctagtgttgccagcaacttctgatttcaaatatttgctaatatatatatatatatgtatatatattgctagagcaaggcagtactttcttcataatattctctctaggatcgataactactatattgatgaagctctaattaagttataaaattaactaaaagtccatcacagaagcaagaactagaacttcccaattgatctcccctcgttaaaatttatgttcatcagaacacggtgttgtcaattaataattatttttagtcaaaattacttcattcacatattggtaaagtttgaacgtgcaatatattaatttattagcaatatatctaaattacttaaataatcgaacatgtaacacatcatatgatatttctatcctaatatattaaacaaggtgatgtaacgtttgaatgtacaacataaataaacaagactaatacgcagtttaattttaactaatccctcctctagttgttgtcataaatttcaataagcagtcaatcgaatggtttaattacaccatcagtagaaaataaagcaaaatgagatgaaattgacgaaacaattgtcaattagagtcttaaccaaacgtcaccgacacaaaccaagtactatagagatcaatgcctctgtttctcgtattcctaaaaaattgatacataaagattgatggtgttgtatagtccatactccattccataaaataatatggtaagtttatgataataacgtatatactagtataaaacatctcacatactacagcatcttttcctgaatatttcaattaaatactacaatctagaaaaggaaacatgaatattctctgaatttcaaaatcatagtagtatatttgcaggaattcgattaaattctaatactctatttcaaattaaatatacatataagtacactaacttaatgcaacttcaaaattagagcttaatcaaacctcgtaataatctcactactccattaacacaacaagttaaacttcaaaaccattgtttagacagatcaacttcctaatacagagcacagcaacaactcaaaagcaagataaaatcacaaacgaacacaagaacaccaatttccatttctcaccacataaacaaacgaagtagagaaagatttgaaaaaagaaaaaggagaagaagaataggcttacaacgcttctccgtctctcggtggcaatggcgaaaccaaaagttaccaagcgcagaactatgacttccttctttcattggaaacgtagctagaacaaattctgctaatccaaacagtagctaaatctgagaaagatgaaaactttccataaaa

SEQ ID NO: 298764 - DNA, 5273 bp, Cannabis indica
cattctaaggacaaatttgtatgtaccaggccaaagatatatttacactatctttcattaatatataaataattgctttgaaatcattcagactatcattttgattttcacaaggcaaactcaatggttcatgaggactacttggtacatttgtcttcatttttcaaagctgaattggaatctattataatgtggtatatctggacagaacagaatgggctgctcatggtcgatgaggaaggccagcggctgctcttgcattctttgccgcctcttacgtgctccaatatatagcagcttgtgcgccaccagacccagttttgacttcccgctgctgctgtccctactgctcaaggaacttggaagctgcctgctggtttagggtttaaaattaaatgttgatgcagaggtgtatcttgctgatcgtaaaacaggtgtgggtgctgatagaataatcaagaatagaaatatctaccagctatttcaccataatgaattcctcaagtgatcttaccctagaaaaaacagtaactaaagtaaaatttcaagcttaccgaaagtccatctcttcaaatcttttgaaaagacagtgacaaagtcataatattgagctttcaagagactcttctctccaaattcctaatctttcgtgaggattggtctctacacaagagtttactctttcctaatttcatgataatctaaatgaagttactcccattctacttttaaagaaattattatagaagttgtcaaacttttatttatttattaattgaaattattgtctcattttaggagggatgccaataaaactacttataacttaataaaacatgctttagaattagataaaatttatatttgtaaccaaaaaaaattatattagcctgctaaaagtttgtactttgtaatttaatttctttaaaccgaattaaaggactcgttcgtattcatgttaagtaaaacttttacattttaaatataaaattaatgcacaacacaaacacaagaatttacaaatttataatataagaatttattaatttaaattcgacgcattcaagattataaaaatttcttaattataatagataaggcactctaaccactcctctgcttaaaccaagcagtttgcaacaaggtcacatgcaatttctttcttgttcatgttagtttgggtttatggggttcagatgagcaacacctagtgtaattgccacaggaaatgctcaaattcctttggaggatttttgatagaggggtgggtggagcacgcccaacagggacaagaaccacattttcaaggtcgggcttcactatgtatcctggtggcaaaagttgcacaaggagctcaatcaagctgcacttcatttccgttggttagggtcaatatgctgtgaggagctatttctctcacagactcgattgttcactccaattgggttgctcctttccttcagagggcaccgcattactgacatggttctttgatagagatcgagcagggttgtgacttgagtgttaacatccttcaccacgaggacaaactgaaatttgggcagccggtaatgttagaccccagaattgttaacatgtgtaagcacataaagggaaaaaagggtatacggatcattgtatggaaggacagtgggtgcgttggcttaggatagtgtaaataggtaagtaaaggaataaagtgagtatgcaagcactgagtttattatctgcatcattggtcagaaaggaccattacttctctgttacatttctgctctggaatttcaatcagtaatactactcttttctggctaattcttgtggtatactactgttctattgtaaatggctggcatttttctctgttaaatactactgctcagaaggttagatcatatcagagagagtaaattagaatttgttgttagcctattgggatcggatcatatatagcagatgggtatggtagtttaagcaatgctgttcttttgtataaaaaggggctatttgtttatgaaactctactttgcgagccatttgtgtccatgctatactgaatcgaaaaccatgtcacataagaactagtaaatgtttgaaaagtgaacctcatttgtcctctacattcaagaacataataataaagagaaacaaaacagtatctacacgaagagcatcatggatcagataacagtgagaggatacacatttacctcttcaataccgggtctacgggcagaacagtgaccctgcaaagtgtgaagttcccaccaaccatgtttggaatcaactcaccttcatgcatcggaggtcaatggttaaagggaaatagaaacaatattttaagtacatgatatggatgtcaaaatcacagtgtttgaaacaaattacaaataacttcatcttcaagtaattacggtcacatttaatcaaatataatggagctcaaaagaacacgatcacccgatagtgaatgaaaggaaaggaaagtacacgagtttaattgatccttttggctttttagataagttttgtgtcttacattttagaaacagtagaaagatcctcctcattaaagctgcaatcatcttcttctttgacgctcatttctgaggagacaacctggctttccagcaacataccctcttggcaaagaccagagacaagctccttagctatgttattattcaaaataaaaccattgtcaaacatttctctgtaccaaatatatgccccgctaaagtctttctgttcacaatatcccttaacaagtaaatagtaggtgtcagctttaggagccaatcctttggccttcatatcattgacaatatcatttatctcagacaattttccttctctaaaatgtcccagaatcaagctattgtaggtcatcttgttaacatgaagtcccttgtttatcatctcagtatgcagagcagttgccttttgagtatcaccatgctctgcataaccatgaatcatggcattgaatataagttgatctggggccaaaccaagctctaacatctcttgatatactctctctgctacctccataccttccttactgcatccactaattagaggatgaaatgtttttagtgtaggcttaatccccactctcttcatagtttcatacaactgcaaacatttctcactgtcttctacatcagaataaccagaaattaaagaattataagtgatgacatcaggactatatccgctaattggaatttgggaaaacaagccttcagcctcagtcaattttccttttctgcaaaacccatgaattaatgagttgtatgtcacaagtgttggacgtataccaattttcaccatctcatcaaagattctaagggcatcatttaactttcctgcattacacaaaccatcaatgattatattatatatctgtgcatttgctctaacgcctctaatcatcatatcccttagaattacttcagcctcgaggagcctaccatccccacataaacaacttatgacagaaccataagttacaacatttggtttaacccctttactctccatttcttcaagaatgagaaaacacttatcgaattcgcgcattactccataacctttgattgagatgttatatgtcactgcatctggggaaactcctttttgtgccattttctgaatccattcctctgccttatcaatcttcttcatttcaaagaacttaccaatcaaagaattgaaagttatgcaatttggtctcaacccatgaacttccatttctccaattgtagaaatggccttttccatgtcacctcttatacaataaccattaaccatggtgttataaattacctcatccagaaccaacccaatttcccttagtttctttaaaacctcctctgcaatttccatcttcccatctttgcataaaccatttaacagaatactacaagtataatgattaattctcacccctcttttcattgcttcttcaaataaagctagtgatgcctcactatcaccacacctggaatgcccatcaaaaagcacactataagtaaaacaatcaggcaccaaaccagtagctttcatttcttccaaaagttgcttcgcttcatccatttttcttgcccgacaaagcccacttagcaatgaattgtaagtaagaatattaagctccacatttttactcttcattctatctcttaaatcaaaagccttctccacttcacccaccttacaatatccatcaataagcgtgttataggtgaccaaattgggaactgcatttctctcagtcatttcctcaaacaggttctctgcatccttagttcttttctctctacacaacccaccaagcaagacattgtatataaacacagaagggctaatatgcctcgtcttcatgtaattcataagctccatagcccttttcatgtcccccaatttaaccgcagcctgaatcgctttcccatacgtgaacttatcgggtcgaatacctgaatcaacaacctcagaaaacaactcgagcattttcccatactgtttcgtagacaccagagactcaaacaacatatgaaccgtgttcaaagaaggaaccacaccatctttcttcaccaaaccatacaactccatggcttcggcgaccattctagattccaaacaagccgataatataatatttgataaagcaggtctcatggaaggcgcagcggagatagataagagagagtaaagatcatagggagaagaaaaatgagattttgaggaaacaagagacccaattagcctctgagcagtatccacactgccttgttggagaagatgtcgaattttctgaaccttttcaaggcgttcttcgtctctgctgagggtagccatcgaatctccggagttaaggttggcagaagcttcagtgtcgggctcggagctgaagaagtgggaaagaggaagtggtcgtgagttttggggaatggaagaggttgtgaagatgagtttttggggaagaagatagagtcgtctcgccatgtctgagtctcggttccgaaacttaacttaatccccaagaagaagaagaagaagaagaaaaaatttaaagtgagttggttttatttgacatggttgttgttgtggagcaaggtgactacgtaggccattattcaactcattattcaaattagggttatacaaataggaaatttggtttagcataatatactacccaagtaaaactaagatacttataatttaagctaattagcaatttttccccccgaactttgacatgtgctaaa

SEQ ID NO: 298765 - DNA, 1748 bp, Cannabis indica
atgatgatgatgatgatgataacacgtcgctataagtgttcagatggaatagaccccatcaaagattttacaaacataataaccatcataataattattcacatacataatggggtcaccctatacatatatatatatatagatatatcatctttattgataagtggaactatatgtatttatatggcctatgggataatcgatagtggtttcttacgactgtaagaatggatacttgtgacacccattttcttattactagctactaccttgacctaataataataataataataataataatccagacgcccactcttttgaaacttaaaaaacaaaatgaatacacttgacaagacctaataataattattataattcatgcagttgacttcaaaattcaaattgtgtttgattattaattaaataatgaaccagtagtgtctattattttttatagatgacataatataattaattattgatattacttaaaatttattttttttaaattaaatggaactcaatacttaattacaccgatatgatactgaaaaaatagtactaagtactaataatatcttttaacaattctcataataatatataataatgaagcacaaattggccaatatttattatttctctccttgttatataatgtttgacttctcaatttatatatataagcctaggccggcctatatcttaaacaaatttagtcaacttgtttcttaactataaaaatttaattttgggataaaaaaattatggaaattattatgcttctctttttctatcttcattatcattattctcctccatctttttactctagattttttttaacagaaaaaagaagagagagaaataaacaaaaataaataggacaagtatacgatgctctctaggctctaatttcttagatgaaaatatttattataaattaaaagttttcttaagaataatctatgaaggttatatattaaaacttgtgtttatgttatgtgtacgtgcatgtgtgtgttttaaatgatttttattatttttagtttaatcataatatttagaaaaatagatcgattacctgatctatatctgaatatcttcttaattatatattaattaactaatacttcacataatgctcattgcttagtaattagatatttgcatgataaaaacatctgactattccatattggtagatatatatatagaaagtgttatatacataaatagttagtgtttgggtaaaaatgagataataaagagtacgtatactagattttacatgtacctatatatatatatatagtaccatagtacatagtgcatataatcatataaatatatatatatatatatatataaatataacaacacaccctagctttcaaacatttatgtatgtaagatatcatctttattgacatgcatgtagcttctcaccaagatttcccttgtagtggtacttctttgaacttttgactcgacattttgaaagaaatatatatagacacaacaagtgtcatgaaccactacttaattacaacttcaccattttcgtttacaatgttcacaccatgtaaaaattgtacaatgtttgggacaaaaaataattttgtggtaaatttatattaaattttaactatgtactttaatgtacaatttaatgtacaattgtaaaatttaatatttaattcatattttattaaaataaataaaaactaataactttataatta

SEQ ID NO: 298766 - DNA, 633 bp, Cannabis indica
aaactagtaacaagctaggttcagctaaaatactattgacaaaatcactaaaaatatcatcttcacatatatacttatattggataacagttcttcatataaaataggtattaaagcttggatttttattttcattctttcaccattagaagctaaaacaagggaaaaatgaaatactcacgggtgagctacgagcttagaggcatttacagaaaatgggcaaacggcgaactgaaaaatctggaagcgttcagcggcgtacttggccttgtaataagaagtttcggccgtatcgaaggggtgagcacggtgccatggggcggagaaagagcctgtcttttggagggatactgccacgaagtcggaggtggagatgtcgtgcttgatttcctccatggactcggcgaaattggactttgtcacttgcttcactgcccatttctttgggacctcgctacagaagaaacgtttctgtaacagcggcgccattgttgcgcgctcgctcctcaggcgaagcttttttacatgtcgttttaaataaggctattattgagatgtcgggaacctttaagatcgttaaaaatattttcgtaattattgagattgttgaatttaatgatttttttttaattt

SEQ ID NO: 298767 - DNA, 5686 bp, Cannabis indica
tatgtgtgtgtgtgtgtgtgatcgccataataatcttatccacttttttctcgccggagtttgctgaaaacccagtcagatctgattagtgctgaattgacttatgaaaatagtcttgtatgtgtggattattctgttgaaaattctctgcaaatattcctattcaaattagtaataaattatggatttttattcgaattttagcaacttgtttctctctttttctttcaaggtttttgctttggaaatttacttgtaatatctttgaattttccttttcttttaacataatacatgtgtagataatactgactttgtatgaactggggcaattttacctttcaagaattttggattatgaattctattacagaaagttacttctttcctatctgggtgtagttggtatttactcaattatgtatttatttgttgaattaggccttaggataataagtaaagagtgtgaaaactgctcataatacagattaagacttctaatagagaaaactgtatgaattgggcagtatatataggagataggaatgattgaatgaatgagtgatgtatgggaattgtatgagattgagctttggctctttgggagagttgaggtttctcaaatacctcaggttcgattgttctcgttatcattttattcatctgatatgaatatttctagttacagtagttctacactggatggtgtatatatatatactcaattatctatgtatttgttaggccttaggatagtaaataaagacggttaaggagtaattgtaatgagaggtaggctgtatgaattgggcagtatatatataggagaaggattgattgaatgagtgaggtattggaattgtatggcattgagctttggctcttggatgaattgaggtctctcaaatacctcggttcgattgttctcattatcattttattcgtctaatgtcgatatttcagtattcttcctagttgctactcttttaatttctgtttcttaatatagatatactattgatttgtaataggaaggtaaatgcttggatgggaagagagacacaagtagagattgtaacgagtgcagccaaaactaggatctgcaacaaacacacatacacacaccaaacttacttatggcgtccgccagtctgggaaacggtggagtaggcagttctaggtctgttaatggcttcaagagttcttctagttcggttgattggcttgggagagagatgctcgagatgagattaagggataacgttgataatgacgatgacagggtaataattttcttcataaaatatcttgtgatgagtattttgaaatgttttgtacagattttgatggctcttattatcttttgcaatgtaggatagtgaacatgaagttgtaaacgatgtgggtgctgaaacgggacatgtgatacgaacaactattggtggtcgaaatggtcaatctaggcaggtttgtagaaaactactatgaagggtagataattcgatgtgttggtttatctttcgtgtcttacaatgcttcatttgttttctattgacagacggtcagttacattgcagaacatgtggttggaactggttctttcggtgttgttttccaagtacgtagaatcatattatttttttcaataattgaagctatttctcagcttttttcgccaaacatattgaatgatgatgataatgtaaaactctttctccaggctaaatgtagagaaaccggagagattgttgccatcaagaaagtccttcaagacaagcgctacaagaacagggaattgcagattatgcaaatgttggatcatcctaatatcgttgcactaaaacactgttttttctcaacaacagacaaagaagagctttatctgaaccttgtacttgaatatgtccccgagactgttcaccgtgttgccagaaattatagcaggattaaccaaagaatgcccttaatatatgtcaaactctacacatatcaggtatgaaagtaatgttgttgaattctgttggttatgtattaaaaccttcttttctgaatgttcttggttcttcggttaagatcatgggatatattcactaattttattgctagacaatatgttggttagtgtttcgatttcatttttgtttttcgggtacagatttgcagggcactcgcttatatccataattgcattggtatttgtcaccgggatatcaagcctcaaaacttactcgtaagattcttttcttagagcatatagtacttgtgtagataagacttgttggtgtttgccaaaatgacaatcttggaaagtgcaattagaaaatgacctttcatttttacacttctcaacccacttggtcactcttgctttcgtcatgtaaaagtatatcgaatcgatcatcttacaaatatttgtctcacaagtcattttacaaaagaccctcttgagacttgtcctataaaagtccagtttccctattgtttgtagggtatgtaagaaaaatttattgtcaagagtgaaacttgttagtgtgagaattaaggatttggtgatatttgtaggattacagtggaagatgtttaaatactttttaatggtgtattatagatgtgttatcatctgtttatgtatcattttttcgccttgtcaaattctaaaaatatgctataataatattcaggtaaatcctcacactcatcagttgaagctttgtgatttcggaagtgccaaagtgttggtaagtattttcgctatgttacatattgaatgattaatctagcttgtgagcttagcttgatccaaatgttaaaagtttagtctcttttctatgttatcaggtgaaaggagaaccgaatgtttcttacatctgctcgagatattatcgagctcccgagcttatatttggagcgactgaatacaccacagctattgatatttggtcaacaggctgtgtgatggctgagctactactcggacaggttaggcattcatactcgaattactcttcgatgatttcattcgatcgtcaaatattgataatcttaaccttttacttatcttccagcctttgtttcccggtgacagtggagttgatcagctagttgagatcattaaggtgagtgtcttttgtaaaatcaccccgttagcaccaccatgtttgtgcattttaaagtttgctttcttaatacgattattattactcgtaatattcaggttttgggaacgccaactagagaggaaataaagtgcatgaacccaaactacaccgaatttaagtttccacagataaaacctcatccatggcacaaggtttgtttttcttttccttttttgtttaagaaatggggaggagggggctaccagtgtggttcccctctccaaacattaccaagggagctccaaccccgctctggaatgttcaccaagacccaattcgtgtggtctcccccacctacgatggggtgtgtcaccagaaccgtaccgaacaactagtggtgaatgcttttcctgaagtagagggttgtggaatgggctgacaccaaagattcacatttaaggctccttgggtttattaaatactttttgctagagagaactacccatgttcgaacccattaccttatgctacaggaaagcaagcattgccactaggccacttgttcggtggttgtttttcttttccttatttaagcagcattggtgtcattccatggcggtttttctcttttggttaattctctagtttcttgtgtgactctcaacaggtgtttcagaaacgtctacccccagaagcagtggaccttgtatgtaggtttttccagtattccccgaatttacgctgcactgcagtaagtctcatctcaactacattggtttctctggtgaaattgtctgtcatattcacttatcttttctccggttttgtagttggaagcatgtattcaccctttcttcgacgagttaagggaccctactactcgccttcctaatggacgccctcttccacccttgttcaattttaaatccccgggtaagtttgttatcatcagttttactcgaacgagtccatgctaattacttaccgcggttatctattgttcttcttgacagagctttcgggtatcccaccagacattgtgaatcggcttattccagagcacgctcgtaagcagaatttgttcatggctttacatacttgatgagatttttctctctttgtttcgccaaatagatgtagacatgttatatcttctgtaagagaaagaaagagtgtttgaatgatgaaaaaaaatctgagattttgtgtatgaatgcggatgaagaaggcgatagacggacgaaggtgagatgatgatgatgatctttgtatgaaaattctggcatatgtgtatgttttttttttttaatatagtttggccattactttgataggaagaccaagaacaacacaccccagtaccaaatatgatgatatatcctacaattcgtattcatttctgcttttatatacatacatatatacgtatacaacacattagtagtatatctttatatatatatacacgtgtggctgtgtgtctttttcttcatctataataagtaagtttgtatattagtagagaccatgtgaataagggagatatcaaataaacaacattgtttgagtagagaaatgttagaatatatcagtggtcttaagtgtcgtatcgagttttatataatttaatgtaataatttttaaagaatattgctaaccaatagcataatggtacttttagatggtgttaggtaccactgatattcgataataatactcgtttgaacatgtatagtcgtagagagctttttgaaaagctaaagaaatgcctaattttcatttgatgtgtcataaataatagtaggaattgaaggttaaatgggctttgagctacttaaatggtttagtaattggaactctttaatggttttgatgggaaaaaatgaagaaggaaggatgaggttaaaatggctttaattgttttaatatgttatggtttatttatgttttgttttaacaattttaagcataattaaattaaattcataataactaaattatttgcttaaaagttaaaataccttttttcttttataattaaaaaggcatcacattgtgcagatatttttctcatttttcagttattttgaaaatttgagcaactacatgtcagttataaagattttatatcttatcatcccttaattggatcatcggtatgcacctcaagtgtttccattccattaaagatggcactgtcacaacaacctaatctcccaaagggttaagcataaagcataattcctcccatataagattatagtgggattcgaagccttgacccaaacaagtatgaatgccagtaaatgcatcccggccactacacaacatgtggttaaaatacttttgggtgcttctataatatgcattctctatatgtttcgccttaccaaaaaaaaaattagtctattttttttttttccatattcgtgtacgttatagttatttaagatatcttataaaattttgagtaattcaaaataatttacaatttaaaaagtagtgttcaaatattttatttcacacttttgtaacacactgtttaaaccacgttttcggcgtgtttaatttttttgaatttcttaaaa

SEQ ID NO: 298768 - DNA, 4839 bp, Cannabis indica
cctaaaatttaagattggaacagaccctccaatatgttatatatggcaaagtcaacatttaaataagtattattctcttttatttaatattaccaattcatgtggaaattaaattttatatattttatgaggtgtattttttagtaaatttatatatatgatttgatacaatgattcatacccaacacaacagaagataattagattcctttaatattaaagtatacaacattatatataagagaacacccaactttgttagatcgatcatgtaacaattaatcgaacatgcttggtacttcaataggatacatattaattctatctgaccaagcatttacatcacttgaatctgaaatacatttccaaaccgcactattacacttaaaaccacttccaaatgcaatttgccaaacacggtctcctttcttaactcttcctttagcctccaaataactaagctcataccaaaccgaagaagaagaagtattaccaaatctatatagtgtcattcttgaagcctctacatcttccttattcaaccttagactatcttcaagagcatcaatcacagctcttcccccagcatgtatgcaaaaatgctcaaaagctttcttaaaattaggcacgtaaattgaaatcttaccggcggatgaagagggcgacgacgacgactgccacactcgccgcaacactgcagacaatccataccgaaattgctcagaatagggaagcactaaagggcctaaccttgacacattgatagttaaggttttggccgcaacaggaataagtgatcttgaaatggataccccttgcaacccattatcatccggttgttggaaaacagattggtaagcattatcatctgaactggtatttgttcgaacaagatgttgaagctcgtacttagcggcaggcttgtcgatttttcgatttgaaagaagaatggctgcgccacccattctgaacaaaacattggacaaaagcatggacttgacgttgccttcgtaaccattttgagtcacaacttccatgctaagaacaaaagctaaggagtttttgtgaactttaagcaaatctttagccaaacttatagccaaaatcccagcactacaccccattccactaagactaaaactcttgatattgcttctgaacccgaacttgtttattaccatggacgaaatagagggagtagggcaaaagaggctgcagttggtgaccaaaatatcaatgtctctagggtttatctttatgttgttgtttcttgtttttgaaagaagttgtttcacaataggaaaaaggatttgttcgatctctgctttgcttgcacgtattgaaagattggggttaacttgatggagtgaaagtggcatacatgtttggctgctgatgcctgattttttcaacaccttgtcttgaaaatctacactttcttgggtgaaacgaccactcctttctaagtgctcggtgaaattcgagtgcgtaactcgtagcgagtctggagggcggtagcaggcaaaatctacgagataaatgggtttgtgttttgtcgagaaataaagtattatcataagcgagatgagtaaaattgttgttgttgctaataagactgattgtgggaaatggtaatggccgagtagttgagagattatgattagtagttgtggagctttatttgtgatgatgttatgtaggtttgatgtgactgtagagaaggatttcactatcaccatagtgatatttctcatgatatccatgttgaaatgttaaaaaggataagaactctatgtatatcttggtttaaatggttttaaagagttagtttttggtatgtatgttttgaaatatattatatattgtaaataattctttagtttaagattgttgaagagctgatggcattaagggagatttgttacgaagggaatttgtatgaggagataatacgggagaactaaataatgcctagagggaacactaaccactacttttttgtgtaatgtataacaaagaaaaacccatcaatttgaattaaataagttatacattcaccaaacgtgcaccataaaaaataagaaagaaaccataacaacactacaacaatttagagtttctattacgttaaaagataatattttttaaaaaatgtaattatttaaggaactcagaacaactgtttcgggcgtaactaatcaatttataattgtaattttttatttttacaaaatttactttttctctctcattctctgttcattcgcttgagactctctctctctctctcatcagcttgttggttacaccattgagtattgtctgtgcagcatgaagtatgatcttctgagttgaagacagcttcgatttattagtccacttagcaagatgcagcaggttgtatgcctttattttccattccagccactctttaatcccttgtatacacattttgttgtgatgacagttgagaaaaagatgttccaatgtttcgaatccattactgcataataaacaaattttatccactgttggattgaacttttgtatttgctcttttgttttaagttttcgcagcaatatcaaccatataatcaccctgtgttttggtatagttagtctgttccaaactattttgctccaacttacatctacaggctcggtaaacagtaaatcaataccaattttgatgtcataactcattgctgcaaaggcctgttgatcaatcttagccatgagcatgttcttaactgccactatcctcttccagtaccagctgcagtcgattgatgggtactcccaccagttttttcccatcaagtatacctcattgatccacttgccaaataaattgtcttctttggtggcaattgcgtgcccatacatatttccccattactgcagtattccaatcatgtatgttccaaaagcctagccccccttaggtgaacacgtacacctgctgcaatgctacgaagccaggccccgaagtgactgtcatgcctttccaaagaaatgctcaataaatgctctccgtatccttcaacaatttctttggcaagattgtgatttgaacccaatatgagtgaatagcaattaacaccgagttgatgagtgtttttcttcccatatataacaagttcttcgaactccatactttaatacgaatcaccatcttcttaagaatacatttgcattcggctgatgatatttttttggagcaaattagaatgccgaggtatctaaaaggaaggcttgctcttatgtaccctgacacttcaagcactctcttaacctcatcctctttcatcccactacaaaacacattgcgtttaaacacaaatacacaatgtgtttcttcagataattaaagttttttctttattactttgataacaattcaagtcattcaccagtacagtgtcaataatttgtgtaacatttgtttaattgtatttattaatatgttattatatatatttgtattaatatatattggacattgtgactcgatgcatagttgtattaatatatatacatacaataattaagctaattccctattgtacaaaatctataatttgcgatatatatatacatacgataattaggctaatttcttattatatagtaataataataataataagatcagttgaaagtttattttttaatttcttttttaattttgagaatatatatatgtggtcattaaaataaaacaatagaaattctaataatgaaatgtatcatgtatggtatgtataatttgatacaaattcatgtaaaggagtaagtgtgagtgagtgcttacttgttgtgggtggatgtctttgtgagaaggtacaactctttaatatatttttacttagcaatataaaatctgttgaacttaacttctaaggggtatattctgttaaaaacacaacaaatagttaaatacccaacaaattttaattacataaacatttatataaaataggtaagataagatatatatatatatataaatatttatatatatatatttgtttacttatattaaaatatttggattagggttgattgatattattataacttaattaggtaagctaccgtttgtttgttaaattactattacatgtaaatcttgtgatcatgaagtagagtgttgctcttcaacttcaactaactaattcaaagaaaacttggacagtttatggggaaaagttaaatgcaaattagaaataatgtgtgacttcctattgataacaaattgattaataatttacaataaaagattgtttgtttataaaatacatgaggaagtaactatgtaatagtacacaagataataacttacaataatagattatttatttataaaatgcatgaggaagtaactatataatagtacacaagataatatttttgtaaggggataaatattatatttttgtgtgattttataacaaaaaaaaaaaaaacattatgtaatggcataagaaaattaagatcatgtgctatgaataaaacagtcagcaacatgttaaagtacataatctttaatcaaaggttattagtatgatttactaatgcccgtcattcgatacaagcaatttttattcggattgttgatgtagttggacatctttgaaaatacactgttaacccaagataggttttcaagaggggtgaattaaaatttttaactaattttgaaaatttaaaaaccccaaagataatttatgcaaatattcatgtttaatgtaataacaaagataatcacaagtataaacaaatattaaacttgaaatgcaaagagtttaaggataaaaattgcaaactctcgatttt

SEQ ID NO: 298769 - DNA, 2472 bp, Cannabis indica
ctaacgctccctacactctcaactctaagtactaaaaactctaactctctcttctcctctcttctacacactccaatggctctctcagtagtattatcactgatatcaatacaaccaaaataggagtagatcattatccgctaaccaagggggtcgaacctctataaaatcctgtgtctcatttactttattattcttattgcgtaacacatggtaagcatcagtattaaatacgaggttgaccaaattctgaggtcaacagttacaaattggaccctctattttgttaaatgacaaaatggaccatatattttctaaaatagtaaaaatataaccttgaattcaattttcgataattttattttttaatataactaatttgaagataattttcaacacgaacagatacagaaaatattacaagttttgccataatatctctaaatcagattaatattaagttttattttgtatagaaaattaattcagggtcctatttgtactattttaaaaaatataaaatctattttatcatttaacaaaacaaaaaattcaattagtaacttttacgtcgaaaatagtttttaccattttttttttgtccatgcaaggatttgttttcattttcaacaatggaacagatccacgtgcctacctctacctctcacgtgactggccgttgatgacgttagtatccagcatggcacatctaccacgtggcaggagggcaagtatatagtacttctctgccgcatccttatcgaccgcactgtaatttaccaaacctctcacaccttcttctccgttgaataatcccaaactgaagagagagatacaattttttttttttcttctttacatgaaatttttttgatttagagagagaaacatatagccaagccaacacaacagcgaagagagatagagctacggagatattttctgggataattaaagaaagtcctggaaagagacatagaaatatggctacgccgttaactgggctgcaacacagggatggaggaggaggtgttgcggtgctttcaaattcactaagcaaggttgaatcttccattaattcttgtttaaagaactcagaggaacacaagtctcccctcttgattttcttgctgtttcacaaagcaattcgtaaagagctcgatgggcttcaccgattggccatggcttttgctaccggaacccgcactgatattggtcccttgctcgagcgctaccatttccttaggtcgatttacaagcaccactccaatgctgaagatgaggtctcattatatttatatatccttacatatatttttgaatattttctcaaactttggttagtttccatattgtggtgcgtttggttctcttgagaatttggcgaaaggaattttaattagccttttgaactttttattttggttaatgcaacaaagaattggaagtttgtgcctgtgcgcgttcgttgcataagattatactctcatttcagtctcttgagagattttatggaaattttatttcgtttatctattctccgagctgagatgaaatcgatagtatagggaatgtaatgaaataaacgttgatcattgtatttcagtatcttccaaatttagccattttcatttctgcctcttattgcgtctatttgtggaattaatttcgaaatatcacgaacacttacatgctacaatcgaaataggaaattcttttataaggtgaaagcatgaaggaaatccccaagatgaggttttccaaggatcttggtcagtggatgactatgaaatgttctatggaatttagatgtgaatctaagtgccatgctaagaagttttgttgtagcagcaactcttttggacaaaaaagagttccttacgattttagggtttagcagaagaaagaacagaaaaacacgcattactttccctctttatctatcaatgttgcatgtaaatcttacctcatagtagctattcgatgtgatgcttttggttgtccatatttttatggcatttcagagataatgacactaacagaataaagtttcctactgcaggtaatttttccggctctcgataatcgtgtgaagaacgtagcacagacatactcccttgaacataagggtgaaacaaatctttttgataacctatttgagcttctaagttcaacaaggaaaaatgatgaaaatttcccaagggagttagcatcttgtacaggagccctacaaacatcagttagccagcacatggctaaggaagaggagcaggtgcttctttagctctaaatatttttcttctcatctacttattcagaaggcctgttgagaaactcataaatcatattggactttatgttaaatatagaatacgaactattaaattcactaaaatctatatctgtttcaatattcctgaagaattttttaatttatttctttttatattcgtgtatgttataattatttaa

SEQ ID NO: 298770 - DNA, 1541 bp, Cannabis indica
catgaatggttactaaataaatttattgttaatggatatttatttgtatatattgttaatggtgtaatctcattctatatattttcatcccaacactgagccattagatttttataataaaaaaattattaatttacaaaaaatcaccttatgtcaatgtatttttcttttaataaaaattaacttcatttgtctctcaaaaggacaactaaaagttctgaagttctgaaagtatattatcctttgtaaatatacactcagcaaataaataagattggcgtacaatatgatgtgtagctcgattaacaaaagaaacattttacaaaatgtaaagaaatattagtcaaagatttcaacaaactcttacaatcctaaatcactaaacaaaaggcatagaacaatttcataccgcgcaataaggttatttgtctccactcaaatcttttgaaagtctttcattttcagtaccttaatctctaacgtttctgtaatttcaaataacattttcctcgatcgagcaatatataaatatgtataatatttgtgatttaaattgcataataatttatgtttagatatagatgaatggagaacatatttttcttggcatataattataagattatgtacatatttatgaaaatttatgatttttgactttgagagtatggaaaacatggttcgttcgtatgatgttttcctcaataattattaaattgtttttggccaacaataattaatgtatattatttcttttagaagcaagagacatatatataattaataaatttatgtacgtcgtatgtgtgagatttcaccaaatacaaagtctttttttagaaattgtcggtcttaaattaaatagtttgtgttaaggagttaaatcataatagtaatgatgaaatttgaaaagtatatatatgtttttttaaaaaaaaaaaataagttaattaaaaaattttaacaaccaatcaataacacaatttgatacatgtcaaaatttatgtagaaaaaattattattcttactattataactaataaataacatattggtcattagataattaagaagaatttctttcaaccgagaaatctagtttttcatatggagtgcatatcttattgacccatatgttgtaatattaccatttcacattatatcttaaagacatacgcccagaaatatatataacgataacctaataaatctaataatacaactttgttgggagaccccctcaaggagaaaattggatgaatcgataataattttagcatcaatcttcacaaaagaaactataaactctaattgcaaatactattttaaagcatgcgagattactaacgcttcaacttctttaagagagaaaaaaccagccaaagatttagcaaaatattctaatggaaagccattagaattatgaaccaaagcctcaaagccaataatactgtttgggaagtttacaaaaatattggaatttgggttaacttttacaaaaatactgtcacacggaaatcttttcaaaaatactgtgtttt

SEQ ID NO: 298771 - DNA, 4593 bp, Cannabis indica
aaaatataaatttgctactaaaatatttggtaggaaactcatatagtatttttttattagaacttgctacaaaattattttgctacgaaaatttagtaactaatattaattaactgctaccaactacatttggtagctaaactttcgttgctaaaaagttggtttcttgtagtgaactattttatttttaataataaattattttatttttaatataaataaaaagtcacccatgaatttctcataaaccaagaattcagttatatagggacactttatatagaatagataattacagtttatataataacttctctattggtttctattttctagtaattttattctttatgaatgtaacacaataaattaacttgcatatataatatatttgattgttttgttacgatttaatacacaaacttaattatattaatattgatttacaaattttattatgtgtatcaaatcaaatctaattcttcttcttcctttttttttggtttgataaaccaatctaacattacattttattttttatatgaaacctatatatatgtgtatatatacatttcttgaagttatcatttttcttttgggttctttttctttatgcatacatgtgaatgtgataataaagttggcacgatttatctgtcaataaaataaaataattgttatatagttagggcatggttaagttttcttattatcctgccttggcatatatgcatatatatataaatatttatactatatatataggcatggcattatatatatatatatataggaaaggtacgttttcgtggtccacaaagctagaattattaataagagagaaagagagattttatttcttcaacattatgagtcttctcatatgatcatattccccgtatatatataaaatctctaaaagaaaagattagagagaaaaccctagaaagcaagaaatatatatataaatagtataattaatatgataattttatctttttgacgtttgaaaacattggaatctatgctatggtggaaaagaactactttggttgaaaaatcaaccctagccacataacatggactatatactatatatctatataaatatatatacttatatggaccacattaaaggattctcttctgattatgcaacccaacttatcatgaatttatatatgatcaataccaaattattttgattcccaaagcatgatctctatctctttcttaatttttacttaagtcttggacacatgcaccacattagtattagtattatttacatgtagtgatattcaatactgtcatgagttagtattttaggtaaaaagaaaaatgttaaaagatatcaatagtgtttagcatttaagtaatattattagataaaacgatatatctagaggtgttaagtactaccaatacataataataatgatattttatgagtgattatttgacattaattctttttcttttttttttacgattgatgcacactatactcgtttctaatttactaattaggtactacttgagtaaattaatatatattaattaactagctagttacataaataattttattttaatagttttactatgctaacgccccgttttaaatttttattggatattttctcacgaacttataaagtttatatataggtacattactttggttgtttcttgaaatgaggactgaccttaatacaaaccaacataaatattttcagcgtattttgtcctcactcgcatgcttctttagaaatcttctcatgaggttacctatcccaatattactcaaggtcaaacacgcttaactttggagttcacaagtgataggccaccaaaaatgatacacattgttgttatcagtagtacccattaatctatttaagtcattttcaactgtatagtctcatatatagtcttacaacaatcatcatacttgaatttttcaagcgatataggattgcataactcctaatctttctccttagactacgggattatgattgtcacatatatatactcacttacactttttatatgtcctttccacaaaattcacaacctaacacaacactactagggtatattttcttaagtttagtgtttgttttatattgccaaaaaaagaaataatagtggcgtcttcacaccctcgattcaacattattttaaaatttaatttattgagattactactataaaaataattttttgcttcgatttttaagtgacatataaagaatctgtctcggttggtgtaaccaacgttataatcatagatgcaaatgctgatatttgttaattcacttattaatgctaaaatttttttacttcggtttaaatagtaatgtactgacgcaaattggttttttgctttggttatgaattgaagtaaaaaaataaaataaaaaataatccgaaccaccgcaaccataccatcgcaaccctgaaaaaaccaacattaggttaagaaaagagagatcaaaagagggagaaagagagagataaattgaaagaggggaagagagatagattagcgtaacatcgtaagggctccatgatggcgatgatagagctccaacgccacctgcaaaaaaaaatgagaaagagagttagagtatgagatctatgggttcgtgcttttgggctgggtcgagaagaaaggaataagacgaaggtgaagatggccgaagttagacgacgccgcgggagagttggcggtttagtcataacttagagagagggggcgactgagaagggttaggttagaagttggttttatatcattagggttaggtttttttaaatgggcgttgaagcccataattggttctctctctttttttaatagcttgttgcgtcgatgcaaatagtttatgtatatattttttaatttcatcttttgcattagtttttgttttagtgtcgaatatacaattgatatggtgaccaaccgaaacaaaaaaaatgaattaacttttgcgttgatcaacaaatttgaataaatgcattggccaatgcaaaaactcacttattatgtcatgaactcataaaataaatatgaattcatccatcttatgattgagcacatgtttgtcctaataaattaaagctctcaatgacaatctagcaagggatgaactcaatcatccttatactagtaatactcttttggaaaatatctagagaattgatattaacaccaaaattgagtctatagcagcaataaaatatttaaatcttcgtgactaaaaattaaaatcaaaatcaaacaaacatataaaaaaaataaaaattagaagtatagatcatttcctttgtcttgtcatcatggtgtggcatagtgacaatagtggtagttctttttgaaattatacacattttcattttgttcaaaacatatagtacttttgtataaaatatattatcattataataaatatctggccagaatatgggaatggaagtgggaaacgtatgatttattatttcatctctttcccttttttcaataataataaatttcctaccaaaaaagaaaaattcccattattagcaaacctaagagtgccatttgtcatcatcctaatggtccacgtggcacacttagctgccgaaagtgggtgcaaaagataggattagatatgctagtatgtataagagtccccccaccaagtcttcttggcttgcctataataattagggtttttaattttatatatcccaaataaaaaataaaaataaaaaggagagatgccctagcataattggtggtgctatatatttatttattattttaaattgttatgtagattgagagcattgatacgtcactacctttatagggtgacatttcataattagttagtaatatttcttaaaaattatttttttgagttatataaaatcgaatacttagttatactaataataatagggcaccgagatggtgagcatctagtagtaccttttagtaatcctttttaattagagtattattgttaggcattaatattgtttagcaccttctagacgtgtcaccttataattagttagcaattttccttaaatattaattattgcattgaattatattgtattcgatacttaattacactaaataacgatattcacataaaaaatactaaacactactagtgttttttaacatttctcattcaattaatatgaaaattaattcaaaactttattattatctattgaaaagttttattagtagttggaatttcttgttgagcatgctatcctttaattatactcttacaatctcacacatttaatatgttacaccccaaaagggaaagtctagaaactctttaataaattaattaaatgtcctcacttcccaaattggaaattttaatctctattttctattgttacccactacttgttatgatgatgttgatttcaaatatatatctttatatattaaaagtgcctatctaacggcaattcttggtttaacagaatattcttaaaaataaaaagaatattctgttaaatttaacgattaggtttgatctcccgttaacaaataaacccaataattaa

SEQ ID NO: 298772 - DNA, 3325 bp, Cannabis indica
gcggtgtgggattgcacagcttacctggtatttccccttacggatcacgggactattgactgtcacaataaagctaacataatgtaataaaaatatttattatttttatactttaaaataattttctttggcatttttatagaattttacatagaaaccctcatagtaattaatggagcaacttaaattgcaacaaaaattcacataacaattcacataaaaaccaccagtgaaaccaccggaattttttaaaaaaaataatttatagaataatttcccttcttattacacaaagggaaatcacaaacaaccaaacaagaagatctagataatgaacactactaaacagaaaccacccgttacaggagataaaacaacaggagtgaactacttccctcggagacaaaccaatgtcctttccattctgattgcaatcccttcataatgcctaagattagaaacaccagaatagaacccactagcaaatcaccaaacaaaatcgagcccagcagcaacttgcaaaacacgggcaccaactgaggtagagggaggaaaaaaaaggggacaacacctaacattgagcaaccaaagcttatccagaagagtcctcttggccaagacaccaaaacagcacaatatagtagcagtcgacttagccgagagaaagaagtacaaaaagctctagaagtaagggagaagacgaaaagaaaaaatcgcatgtacttttatgatgactccacttcctcatgataattaaataattagaatcttttaattttttatataaacttgtataataaatatttcattagtttgaaattttaaataatttatagtactcaaattagagtttcaattatgttatctatgagtatgaaaaatgtgcatccatcataatgtttcaaattataaaaccttatttttatattataaattatttaaaaatgggtatccctggtatatattaagtgtgcaacacattcatatcttcaaatgccaaatacacgagaggcacatctatatttttcttttcgtaggagagattgtagacatccaattataacttattacaaatttatgaaagctttccttaggacaaccgtccaaaggggactgaaaacaccaaaaaagagtgctagagggatctccaaggcaaaatattagcatatatgctattgtaattacgataatattatatatttgatgctataattttttttattaatatcgtgtattgtttagtattgaaaataatattttatttttagaaaatcaccttatatatttatttttaattttttaattttacgatttttttgttggtatttcttttttaattttaggatttaaattgcatgatttaaattactgtgtgggtaataatataaattacgatttaaattagattataatttagattatctcataaattattgaagtaacaccgtatatttcgtatatatgaaaaaaatactttgaaaagaataaattgaaaaaaaaaaaaaacctttatttattgggagtaatttttaattgtaaggatagaaatttttgtaaggctaattagaatttttttctctcgaattttgacatgttccaaattatgctctttgaatttttttggccattaaaaatttacccttgagattgttaaatttaaggatttttatctaattttagtaaaaaaaatttaacatgacataatttaatacatttcaaagtttgaggggcaaatcagatttggtagatattaaagtttggagagcatagtttactacataaacaatcactgaaacagtaaaattaaatgaaattagacaaaaattcttaaatctaagtatctcaatagttcaagtaaaattttaaacggtcaaaaaaattcaaatataatttggtacatatatggaaaaaaatctaattagcctttttgtaatgctaaaatttcacttatttaatgttagtgtgtaatacaactagtagatatattattgtagtatatgtttttatttaaagaaattttcaaataaaaaagtcgtactccatatttaacgcagcccttgacataggtcccctcgcatagtaaattacctggtaagcttctcacccaaccaatcaatacacacttaattgccactccatgtggagccacagtgagatgatccgccattttcgtttccattgggccttcacaaactctttcctcacagccttgtaaccttaacactctgcttcgtcttatatatgcatttttctttatctcactccaatttaattcgaagggcctccatttttgaaacagaagcttccacctctctcactcgtcactctttgattctctctctctctataaaagcttttccactgtcttcctttttcgttctcactctaaaacccttattttctttctcatcttcctcctcagccaacacccatgggattcccagttggatacacagaggtctttttccctaatctcttcctccacacactctctctccttggcttcatccgaaacctaattttctctctcttccatttcctaggcctctcagaatttttggaaaccgacgtcgtttggccccaatctgcgtcgtttgcgtcggcagcccaatcgccagataatcctccggtatcggcgatcctaatccgagagctacttccggtaattaaattccgggacctggacaccgtgtacggtgccggagaactgccagaaaattgtgcggtttgcctgtatgagttcgagggaggagaagagatcaggtggttgaccaactgtaaacacattttccaccgagcctgtctggaccgttggatggaccacgatcagagaacgtgtcctctttgtagaacgccatttgtccctgatgagatgaaggacgagttcaatcaacggctttgggctgcttctggggtcgatgatttttacagcgaatacagctcagtttgaggttgtagaatacgaactctttctctctctctccccttatctgagataattatatagatatagatatattaaaatattatttttttttgtaagttcggtatgatcaaccacaaaattgtgtatatatacatgaaaaaatcgatatagaagtagatttttttttatacagttgaataaattttgtataaatgaaagtgctgttatttttaaagtttaaatttaaatcattaaaaaaaagtagacaaatttttggtaggcaaaattgaatatcagattccactgaaaaacactcaatttagtatttttttttttttgtaggatgttgattttaattcaattaaaagattgattttttaatttttttaattattaatt

SEQ ID NO: 298773 - DNA, 7539 bp, Cannabis indica
tttttttttttaaaaaagaaaatttttatgtgcttagaaaatggtcattttttttatcgagtatatgtactatgtatatagtacaaattaaatgtacgaacaatgggattttatatgtttctccaataatatatgacaatgcataatacattttttttaatttattaaattattcataattagtgcctttctttctcttaattaataaatatcaaaataaatacataaattaaactcacgtggaatacaatttttttcaagaaaaaaacatctaatatataatagacatgtgtatatatataattaataattttaaaatggaaagtgacaattttttctttacaaaagattagtttaaaaataacctctcctattattattattattattattattattattagatagccagattaatatgggttaaacataatttattagcttgcaaatttaataaattataagtaagttaattcagtttaaatttagttggttttgaatattctaggtatagttagttaatttttcttatcagtaaagaagattaattgttcgttgagttaattaattcttgtcagtaaaaataaggtagttttgtttggtacgtagtagttacacttgctaggtacatatatttatatgggatatgattttgtcccgtgattgtactttcacggaatgtattccgtgatgtacggcagccgtcagataagagagttatttgatctgacggctgagattgatctaggggtaattagggttaaaaagtagaaacgtaccctgacactcatttaatgtaccccgagactcatctaatgtaccacgaaatacatttcgtgaaagtacatcatgggagaaaatcgtgtccctatatttatattaggtttttttttttttgtattttgttgaaaatttacagaacaacttaaattcacataacaacccacataaaaatcactagagcaacccaaactgtaaattaacaaaaaaaaagttaaaaaaatagtgtaaggagtaatccacctttatttttttaatacaacttcagcttagttgtttctccttttttttttttattctaaaagaaaaaaattaaaggtttctcgttcctaaatttatatctattgaaggttatcttttttctccaatcgactagcccaaccgaccttccctttgcttagaggtgtggcttggtgggggttgcttttactattaccattccatttttgttactgcgattagtcctgtctctgtgacaaactgatatgactttgagtgttttagtcttgtctctgtaacatagttttgaatattttaattttatctgtaaacacatatagtttttaagggtgcacaaaaatgggccaaactattcaaccaggaaaacccaacccatttttggtagtaaggggttttgttaagagtaagtcaatgagttattgagtaaaaagtgataggtcatataattatgggatggacacactccaactctatataacccaatccaacttatttgttgagagatgttccaaatttgaaaaaaactttcatatataaaatatattttgcattcacaaaatatatacaaatatgtattttttacattttaataaataaattatattattatgataacgttggaaaatgaattaatcaaaacacatcaccaacacatagtttagagttaccctatttctaccaataaatctaacgtgcaaatcaatcactatttttaattttactagccacataatgatactaccaccaccttagatttttttaaaagcaatatatttacacacacatatacactctcacttagggctgacaaaatgggtcagacacgataacacgattcgaaactcgcacgagagttagcgagtttgggtttgccttaaatgagtttgggtcgtgtttgggttgactcgtctaacccatataataaacaggtcttgttacatatatgcaaacatatatgtatcattttatcatgtttgtacataaatattaaaacctaaaatattcatctcaatctaatgaatctgttgcctttaattttgcctaaaatacgtggaccagtataaagacgacacgtggagctgagaggatcagctcttaaagaaatcaaccaagtcttgggcaacagaggagtgcctctgagaggataactcccggagaagatatgagaaggatctttgtactcccggaggccagggccatgctaaggcagctccgggaggtactgaactctatttgaacaatcacctcacatttaatgccacatgggagaaaacgtattggaaccaccataaacgatatgattgacggcgtaacccctcttttgcagctattacgctgtgattaaaaatgctagcgaaggctactttatgaggaatcacatcaatcaagaggtgataaaagactatatctacctaacccctaagatacctacgatataggtcatgtatttcctatttgctatgaatatgtgcccctattgaacctgcacagaaagacaagtgattcagttctagggatcaccccagaaaaacactataaataccccacaaacacactgagacaggggtcgagaattctgggttcatagaaattaaagagagtaaataggagagatattcaccaagaacattctctgtaataaatactctcataaataacaaacactcgtggactaaggctcgttaatgccccaaccacgtaaaaattccatgcattaaacttcctacagctttcttagatatattatttaattggttaccgaaaacctgggtcaacagaatccaacccaactcaccccctatattattaagtagggttgggtgtagaataaaaaattgaatagtttatagcttttccaaaccgcaatcgttaggttggctcattaaaatacctctaatctagtcaacccagcctatatgcactcctgttttagtcttgtctacgtgacatagttttattttattttgttgcattgttagtttttctttgttcttcaatgacttactattaaatcattgttagtggttggaaataacaagttcttttcgagtgaaggggttgttagtagtgtagttacatacattacacaatagttgagtgctcaagctacgaggttaaacttgctgcaatagtttctactgtagtgtctttagagtgttggatgaaacagaatataagtgttcttaaggtcaactgtgatgctgcaatctttttcatatgattttattttaatttttttgtcaaacaatttgagaattaggcgactaattatttagtttgtttttctaattctaattctatgatttattcaaaaaaaaacttcaactttattaaaaacttagcaaattgctcataatgtttaaaacaagtttaggtaaggcattccccatactaaattgagaatcaacatagcaatgaaattgttatgcaaaagacagagatctagtcctatccaagcttgtcaggatcaaagacgttgggattagattagcggactacggatgggtcaagatgtcgagtaaagcaacttatattcctcaacgacaagctagcccaaaactagacaacatcacaaatgaactacgaatagcctgaatagccacaaggttgtctgattctaacactgcctttgagaactgaaatctcttcaaccaactgagcaccttccttataccaatgatctcagccaattgaggagtgatcgacccattcatacaaaaaacactagcaaaaaccaagcccacaagtcattccgcaccagaaaaccgaagccatatctcacttcttcttaaaataatgtcagatctatatttatctttattttattgagatcaagtttagaccaacactcacctccatcaacaacaggtaaatgacttatagttttccaaaacacctgacatctgagtatttaataaggttttttttatacataaaagtattgaatttcgcattaagttttataattgtacattgaaacacaattctcaaaatagatgcaaatatactacaaaattatttttgtactaaacatatcacaatttctacatttctaattagaaataatctgatatgtgtcaaatttgtatcaccttttaatacaccattagagtatatttttagctttgtatcttcaaaaatgctcttatactatgttgtatttttgttgctttcatgagatttcttaaaaatataattaaaaaagtttacacacaaaaatgtaaaacataatccatgaaaatatttatatatattttggactctttattttgtaaaagttaccggtatgaccttttgttttgttataaaaaaaattgaactttgtattttctaaaatgatacaaaatagtactctaaattgattttttgtcaaaataaaaattaataataacctaatttagagttgatgtgataaaactaaatacattttctgcatttgttcgtgctaaagattatctttaacttgattatattaaaaaaatatcaaaaattgagctcatagtatcattttagaatacaagatctaatctgtaacttttgtaaaacggaggatgtgtaaaattgtattaaccatttctttattttttaagaaacaaaagcccatgaatgagcccaatagagaaaaatagatatggcctttgtacataaaaggcttcagattaaagaaaaagcccattagcccattagaaagaagcacattagggtttaaacccttcttcttcttcgacacaaacatatcttcttcggcggtaagctttttttccagatttcttacctaaattcaattcaaggttttatcttttttctttttttcgatttccttagatcctaattactttttatgattattaattttgattttatgataatttgttgattttgtagaaattagggttggaagaagaagaagaaaatgccggctggacacggtctgaggtctcgtacccgtgatctcttctcacggccattcaggaagaagggttacattcctctctcaacctatctcaagacctataagaccggcgagtatgttgatatcaaggtcaatggtgccattcacaagggtatgccccataagttctaccatggccgaactggtcgtgtttggaacattaccaagagagctattggtgttgaggttaacaaacaggtattatgtttattcaatcctctcacctctttgttgatttttgagatgtgtttttcctgtttgtggaaatgactgagagaagatgaaatattttgacttgttttgataatctgtttatatttagttttatatatttttggactgaattgggttttttcaattgttatttgtagattgttttgattatgtggaaatgaatattgtatgtattcatatcatgatgattgtatattttattttctttgtggaaatgattgagaaaatctgaattattttgtttatctttagctcatatatcattggctgaactattttgattgttctgataatcatatcatagcaaaatctcaagcaaagagtatatagaaatatatattatatgtaattgtatcataatgtgtactcttatgttgtgtaagaggtatccaattttgagcagggaaatttgcaatctttgtctgttaaactttaactaatgtgttctagctcttagatctactgactctgtttttctttattgtcatcaaaattataaatggatgttgtatggttttgtatataatagcatttcttattgtaatggtctagaatttgactctagttgttaatttattgttgtgattttgatctcgatattgactgtagttgtgcttgaatgtaggttggcaaccgaatcatcaagaagaggattcatgttcgtgtggagcatgtccagccctcaagatgtaccgaggaatttagaaacaggaaattgaggaacgacaagttgaaggctgaggcaaaggcaaagggcactgttatcagcaccaagagacagccagagggccccaaaccgggtttcatggtcgaaggtgctcagttggaaactgtcactccgattccatatgatgtggtcaacgatcttaaaggcggttattagaccctttcatataatttttttttctcaatgtttttgtctgtggtttctggttttgttttctagatacttgagagagtttcaaattcttggtagttttcatagtttgaatactattctaagtacaattttgttttaatgaattaagataatttatgtatgaggagttagttgtgttacaaggctaatttgatgttataatcttacaatattataacaccaataattgactcttatagtcttacaataacctctaaaaatcaaccatcatattcttgctctgaagtatttgttaaatgttctggccttaaattatttccctttcaatatcttggtgtgacaatgagaccaataaagtgaaaagcagtagattgtaattatttttttgaaaggattcaaatgaaacttcttagctagcaagtaggcacctctcatttgcaggtagaatgtaattgattcataagtgttacggggcatttgttgttattgcatgagtatctttatgcttccatagaaagtagtcaagaaggttaataaactctggagagattttttgtggggtgtgaaaggtaactctagtaagatgcatcttgctttttgggatcttgtttgcaaacctaaaaattatggagggttgggttttcgggaaggaaccaagtagaacaaagcttcgattgctagatacatttgggctatttcaacaaagcaagatgttctgtgggttaaattgatcaatgctgtctatttaaaaaatcaagatttttgagtggttgataagaaaggtgatgtgagttgatatgtgcgcaaacttcttaatctaatgaatgtttttactcgagacacaattctagatattggaaaagggagaggattttgggtcactaagctttacaattcttttttactccttatgccaaattgataattataaaataatttagtgtagattatctataccaaaacatagatttattattagcaagcctctcataataacttactaaccagagatcacctgttggcaagaggtattaccatgatttctactagctgcccagtttgggaggttggtgttgactgtcataactatcttttctttaattgttcttttctcaagcatctcatgcatgctatccattcttggcttgacaatgccatttggcctgagtcttacccgaattggcttttgtggttgaatgcaaatcaagatcgcagtttgcttcatagagttgttgcggctgtttgtgcgacaatattttattttatttggtagaatcgacatgcttgtatctttgagcaaaatatttcttggtttatcatgtgaataatttgattagagtcgcacttaaagcaagattactacttgtaaatagaagaaatctctctaagagggacgaactgtaatatccgctaaccccgaaagggtatttttgtaattttatttagctgagag

SEQ ID NO: 298774 - DNA, 3305 bp, Cannabis indica
aatttcgaaaatgctactgtctcgtgatgtgaagtgaggttgtcgatttggttgattattctgctttgtaatattttattggattccaagttctgtaatttattgaattaaacctttaatattccatgctctttgtttccgttttgagatgtacaggtttatcacatttttgtttttaggtggcaatataaagctttactatagaagttagactttacggccattaatgctaaagccatcttaaaccgatgaggccctactcccaattagatgaggctgacggtgaaaaagattgctttttgaaccttctaacgtttttgttcgtcttagaaagaacttgtaggttagtttttgaatatagtgacaactgcctgggcactgagcatgcaccaattgtttcatttttctttttccttttggtcgttctcttctcctcccctgttgacatagacttgtaaattggaaaaaaaatgttgataaatgcgagcatttagttatgattttaactgttgtttctgttacatgtgtgcacagtttcatctttttatttcttgagaactatggagtgaggaagttagaagctgtgtttgcagttctcattgcaacaatgggtctatcatttgcttggatgtttgctgacgcaaaacccagtggaaaacaacttattatcggtaagttctgtcagtttctgtttctcttttaatatattcaaagaaactcaatgtcagttactaaatcttttattatttacaggtctgttggttcctagacttggctcaaaaactattcggcaggctgttggagttgttggttgcgttataatgcctcacaatgtatttctacactctgctttggtgcagtctagaaatgttgatccccacaagaaaagcaaagttcaagaggcactgaactactactctatcgagtcatctgtcgctcttttcatttctttcatgatcaatttgttcgtgacatctgtgtttgctaagggattctatggcaccaaacaagcagacagtataggactagtaaacgcaggtcagtatcttcaggataagtatggtgggggcctccttccaattctttatatatggggaattggattgttggcagctggacagagtagcacaataaccggcacttatgctgggcagtttattatgggtggttttcttaacctccgtttaaagaagtggatgagagcattgatcaccaggagttttgctattattccaaccattgttgtagcagttatatttaatacatctgaagcttctttggatgttttgaatgaatggcttaatgtccttcagtctattcagattccatttgcccttattcctcttcttaccttggtagcaaaggagcaggtgatgggagtctttaagattgggcctgtccttgaggtaaattgtttacgtgggtagttcatattataattttctattgattttgttttacgttgggaactccaggctttagatctttcactctttataatttagcatttcttgatttagtttctgagtagcattcacatttataacatactacatattcttgtatcatgaaagcataaggattagacagatcacttgtggtatatcctgtgctgaaatttgtggtttgttcagttcaatgatatatgttgtctctgattaatcaagttgataaacattgtgatttcccattctattattcgttgcgctctgcctgccactgagtataaaagcatgcttgtacaccatattatagcaagaggctaattaatttctgtgcaatagtttagtgctcctgcaattccatagtcggattgtaagcatgtaatcaatcattcatatattttattttccacaaaagagagcagtggtcaactttcttttcttactttctctgttgatatttgttgcagagggtggcatggacggtggctggactggtaatagtcatcaatgggtatctgttgctagactttttcatttctgaagttaagggagtcttgtttggttttgcggtctgctttggcaccacggcatacttaggatttattatatatcttattacacactgcggtatccttccctctacttggtggagctcactctccaaaaggattgcttgcatcagaacgtgactcaacaaatccatataccaatttctggaaatatttgaaatatagcacttcccacacaaaagcagagtctgcttaccacacgggtgatccatctgtcttgagaagaagtattctttcataataacttcctctaaccatggtacattcagaaacaaggagaaaaaaataaaaggtgcgtctacaactgtaacacttaatagcattttgtattattatttttactgccgtttctgccttattgcagttatgtatgttatttatatatctatggaaagagttgagaattgaaggcgtttcccttttagaggatgaacataacaccaatatattgtaaaagatttactgtgtcattttaatgtataagtgcattcgaataggcttcttagtcattctttgatgtaaaacttatcatgtaccatagtagagtttttattgttacaactcaatacatccagacaaccaagtgaactttcttgctttttagtttttatttcttattggtaaggtaagctggtgatctaaatatggagcatgttatgtttttccccaaattattgggaaatgcacctatccctattgttccaccactgaagcacccatgggcacctatgatttttgtcttatgttttaatgattgaaaatcttattttaactcaataaagactaaatacactaatttatgattgtcaaataattgtgtatacgttttgttttgttttgttttgttagcatttttttttcagacctaaaagttgacaagttttgaacaaagcaatgctcctacaattctcttgtgatgctagggctactatgaaaacttgattttggcagtcaaaatgatgcacttgcgatactacagtgatcagggatgaaattagaaataaaatttggtagggcgcttacatatttttatattatgtgaagacttttaaaattttaattataaaattaaatataataaaatgtaaaataatacataattgtattaaagtaatttttattcaatgttattttacattttcactttgcacatagttgctaggtggttcatatattttagttttcaaaaatataaatgaagatatggagtattgttaacttgtgacctctttaaattttaaaaagatctttattattatactaaagtagtgtttggaatacatgaatgagt

SEQ ID NO: 298775 - DNA, 1788 bp, Cannabis indica
gtcatgcaaaggtctctcctttgcaaagtactctctaaccaggtcgttgggaaaaaagcatgtctgaaggtgtatacgcgcactatcatggcctggtacgatggacaaaatctgatcttgtgtcaaaagaagatatcaccgtctatagagcaatccgtgtatgatgctgacgtggccatgctctgcgaggctgctattgcgctccaggttcatcacttaaggaagttcttcctgggagtcatccgtttcaactaccttccgggtctggtagacgtcccttactttatgaataattttgactaatccttttcactgctatatttttccctccaatcgtgccacatgtcttatgcatgaaaacttggataatttaccttcaagctttcgagactttttgaatcacaggaggttgttatctttcccagtactgatcattgacacgtgttgatgatttaagtcgcggatcacctctgcacaagctgtactctaccgagggtaaatacgacatctacctcctcttgcgtgatgattataacaaagagaagaaacagaaggaatcttggatgatcaagcatggcaatctggacctactccttcaagcagtttgtaataccagtaaccttcatcaagattctatcaaaaaactgaagaaggaagctgaacgacgaccggcgaatggtgtgaaagcatacatttccctggctgctatacaaagaatgagagagactgttcctcagaccattcaatgtgctcttgctaaagaagccaaggcgacaactaaggcagagaaatactgccttcgttccttggagatggcttacgccatggtcctttttgatttattgaaggttgatcctactgtaccctgacttcttggtgagaaagagagggaagaggctacaagaagagtgctttccttgaagcgtgacacatatcttcaagactttccccttactattgagagtgacgaggagtcagacgatggagtcttaagtcctcaaggcctcgtagaagctcaggcgccctctggggagactgaaaaggggtctatctaagatgcagttgagcctaatttgaatcttccaaaaaagccagttagtgactcaatccaagtcgagtcaacagtccattctctcactcaagaccagtaggggtcacttccgctcttcattatctatctctttttttaagataattttagcttctctttttccagagttgtttttatttttgcttgctctgcgaggctgcttatgacaatcatcttttgtgcaggaacaacttaatttgccttttgcgaggcactgttatagaccttcatgttttgctcacttttacttcttagttttaagttttatgcgtcggcctgttagatgattttaagggctgttttcttatattgtttagaagcatgtggttccaacggctactaattcaatccttagatttcacgtgacccacaaccctgttgaccaaaagtcatccactcatttattttgatgataaacaaatatttgattattatttgttactaatcttttcttgatcattttgcaagcaagttcacagagtatctatatttgctcggtaaagtcaaacataatcaaagaagtagattcaacaagtatataaactacttcatacttcataagagcaaaagattcatcaagggatcaacaagtcaagaccctattcaaaagaggtcttcaaaaaagctcaaagtcaaaagtcaacccgaaagtcaaagtcaaagtcaaaagtcaactctcgggaaaagtcaacatggga

SEQ ID NO: 298776 - DNA, 4186 bp, Cannabis indica
tttaaatggacttggcaaaaaatgtactttaatggtgtgtcaaaaagaatacaaatttggtgaataataaatcttgtaccatcaaatttgataaacattcattttatgtcttttggcctattcacaaacaaagccagttgcaatcaaactaaaaaagaatacctgaatatattactactatgatgtcaatgacactgacatagaataatctacactattactactataatgttcctttgctcaattatacttctgttatcaacctgtcaagctctttccatttggctcacgaacaagcagaaccacaacgatttattcgtggtagtttaaacgaattctcaggttactcgaacactgcatgaaatcccggcttctcttgcttcccattgaactggttctctatcaagtattgatatagactaccgctaagtgggaaataactgacctcaaaaagtagtcatgcctgcccacacttgctcagacaaccaactccttcttcctgataatcctccctgctaatccaaaactcaggtgcatcctgaattttatcatccacaacaatgtttattaaaggcgggatcctaaatgggaatgaataaattgtaagaactgagaattcaatcagaaactgaagccatttaccttcataattcctgcaagaactgcaccacctaagtacaccatgtgctttcttcttggtggatcttcaatccgtaacctcagtttctgttcgccgcaagaaattcagtttaagaaaccttatctggtaaagtaagtatgcacagtctaaaactttgagtttaccttcaacccatctctgttaccctttaaaacaacttcaagatagcgatccagaatttctttctccaaactgaagaaacattaatcctaaagattacatttcatttaatggtaaatgaataacatgggatgtgaactagaattcaaatgcaaactgaatatcatttgatatggcaaaagaggttaagacattaccgactaggtaatccaggatacattgtgctccctccacttaaaacaatatgctggtaaagctgaaaagagaatttttatgatattcagatatagatgacaggaaacaagattatatggcaaaagtcacagaacaaaataagtactgtgaatccgattacaagttgcaacatgctctgcacatattaatcaggttaaagagaaacaaaactattaccatcattcggttgtctatatccatttcctgaatgcaacgaaataccatgtcagccattccatcaccttcgacgtcaatcaattcctgtaaaaaaaaagtagccaggaaggttagaagccttgatcctgtaagatattgtgatgtcctgccttcatagtcatagatgcagcatattggcatacagtagatataagtgaagtcaatcctccctgaaaagaatggtttaaaattgcttgcaagaaatagcgatttaattattgaaggctaacacgaagcaaaacaacttcgagtgattgtattgcacttcacccgaaataataatttataaaatccagaatgatccatagtcattacaccaatgagcctgaagagacaagagaaaagaaaatagccaaagcttacaggggtgaaaagagcctcaggagcctgaaagcgttctgtgccaactttaatgacccttccatctggtagctgataacacaagttatgcaaagattaataaaactactctgataagactactttcaagaaaacaaaatctaacagattaggttaatccaaatatcaaacttctaaccaatagtaaaataagttaaaacaatcagattataaacacatggaataatgtacacagacacaaacaaaataagatgaacttaagcttctggataccccaaaatctggctatatttagtcaagcaataactttacttggatagcaatagataccatatacttacagtgtaatcctttacaagaatggtggtttcaagtcccaactgatactccctcttgtaatcataactacattaaaatagtgtaaggtttacagaaacagaatcaacattatcagggatttagaatgtgcattaaattgtttcttcaccttatgtagcaaagtttctctttgatttctctaacagtctcaaagtccgcattcctattcattgcataccttcaagaaagtattgtggatttaaagtcagatataaaatttagttaaagatccaagaacaataccaatgttattggtaattactgatataaccaattggttctcaccctctccgagacagtaaatcaacaagatatgaggtgatgtgcctgccagctacattcattcgctttgtaagatgaggaaatgagtaaccatcaacaactggaacctaggaaatgcaagaaaatactcaatatggaggaattaaaataacaagaaaacatcataaaatacaactgaacaaattaaaagcatcatgagaaatttaccacatgagttacaccatcaccagagtcaatcactagtccagtcaacaaacctgtgagatgtcaagacatgctcaacatgagaaaaaggacaagataattatagtttcgaaaggatttcctccccttatagtcactatgaactgtctaaaatagaaacatgttctgccaagttattgttgatagtttgaggtagtttctgcttgtctttagtacataaaatcccacgaaaggaggggtaccaattccataattgggtaaaaataaattgaacacaaaagtagaaggaaagaaaaaaacaataacaatatagacatataacctttaattatctttataagcaccttgagcatacagtgtcaaaacagcttggatttgaatgaagacaccggcaaaattgtatttctcaaacatggtctcaacctataaagttgaactcaggttatgccaaacatatacatcaaggtgttggattccattaccctacaaattactaaaaaagcaagaagagacaaaccattttctcgcggtttttagaaggattcaacggcgggtctgtcagtagaatcttacattcagttggatctatctgttgaaagaaaaattaaaaaaccaactatagaataaaaagcttcccacaataatgacaagcagcgttagatagcttacttttagttcattatagaaagcatgatcccaaatatgaaccatgtcatcccaattttgcacaatgccattattaacagggtaagaaatatccagctgatgtcttagttcagcacaagcttctccaacaacaatatcctgaatcaatcataaacccatgaatcacaaaacaaaatctttccagaaagtaattcacaggctatgaaaggataaacaatcaatgaatttacccaccttgagctcctgctcaacaagtgattcttcataccgaagcataggccttcccaccacacaaggaaagactgaagtgggaaagttctcaccagcaaagccacatttcacatactgcatttcaattcagatttcaacttaaactatatatacacacaaacgagtcaacatgaaaatggggttttccgagtttccatataaatatatatataccgaataaagacgatttgtatggaagtatgtatttaagttttactttaatggatttgaataagatcagggcgaaaagatggttaccccagtgccattatcgcagacgacgacatttctattatccataattgagtgtggcttctttcgtttacttcttcttagtttcttcttctgtcgggttttggtttatggaaatggcagatcctctctctctctctctctgcaacgatggatcgtacggccttttctatcagcagaaatgcgtaaaaatgcagtcttcgaagaagaagaaaagaagtacacttattaacactttgaccctcgtatttgttcagttttatattttggtcattttttattttattttaggttaattaagaattttgttccttgaacttttaaacatttatcataaactattgagattattggatttaaaaactttttttaattttaataaaaaaaaagtctaacatgtatgaaaatttagggacttgatgtggtacatgtcatttcgagagacataatttagtagatattaaaatctaggaaacatgatttagtatatggataatcaccaaaattaataaaattagaatgaaa

SEQ ID NO: 298777 - DNA, 7072 bp, Cannabis indica
aattatatgggactcgatacttagttggaccaatagcgatattgacacataggagggtgctaagcaccactggtgccctttagcatttctcttaaatattatgttttggtcacaagtagtttttttgttataactaaaagttatatttagtcacaaaaaattttatgttgtacctgaaagatggtggtcactaaaaataacctgaaaatataactatctatctacttgaaatatgctaaaatgattcacaaattttttccaatatatgatatttcacataataaaaactatagtttgactttagagttttacaaacacaaacaaacttttactttgtctaaaagtaaaagggttgagattataaattatataataaaagtgaatagtaaaaacaaatctgtacctgtcaaaagaaaaagagaaggaaacgaatttaagtcccatctgtggaaagaggtttgatttttgaatcccaagagaacaaactctcatcatttatccctctcttgtcctttcctctgtggaaaatgacacatcaacctaaatatttcccatttaacatcccatttatactattatttcactcattaattattatcatcatttcaccttcatgcatgctgagagaacctacaatttttatatatatatatatatgtgtgtgtacagtagccatatttttattcactccctcgtctctcatcatctttcgcagtactgttttagctatatatatgtgagaaccctaaacccttttcttttctcatggctcagctggttaatagtgaaagaaacttgcttaacatgttcttggtcactgttgatgatggtttgaggtgtcaaagcctcaacatagaagaagaacacagcagaaagtactggtagggttattgtggtgctatctctcctgagcttgttattcttatgttttttaattttattttgaactctacggtggacgtttgagttttcttgaccttgcaagtcctttgatacataggatgtggttaagattatttgttatcgtctagaaaaatttaatgtacaaaatacatactattaatccgtagaggtaatttcattatatgcaatcctcctgagctttgtaatatttgtgtcttaggtaatcagattcgtttcaaatgtatgttggttaatttcattacaactattttcataaatatatatatatatatttatattgtcctgtacgtgcttttcatcaagagtggaaacactatcagtatcacaaatattataacatatttctggactttctttcttctcttttttcctattttcttttcttggaattaatatagttttatttttgattatacgagtttctgaattaaactccatattttccacttcttcccgacataatacaagttcgaaggttttccacttctttcatatgaaaaggtttaaagaagttcacaaagcattaatacaaaaaaaaaaaaagttcatgaagcaacacgctaatagcctgtctacacaaacagtaacgcataagcaaagaatcatgtaaaaatatgcaattagatattggaatttgtgtcaatgaattatgaataaacagagaagtggttgaaggttgaagggtgcatcaaaccgcccacaccgcacaaacctcccgcattacaccgcaccgtgcaaaaaaaaagttcatcaaacttttgcaatatggttgtggtttgtatttttaccaaacaacgtgatacagtacggtttagaatttaataattgtagttaactacacccactatatattatctaagttactaatttttattatcagttttgttttttaaaatatatgatcaaatgtatgtaatataatacataattgagacaattcattataacatgacgttgactttttttattttgcaattttaaaaaatttataaaattaaattttaaatttatcttataatatttgataatgacgatagtgtaaaatgataatgatgatagtataaagtgtttaaactgcactacatcatactgcattttcataacgtaatttttacagtttttagatctcgtgttgcgactaaaatttaaaaaaataaacaccccacaccgcaacacctagtttaagctcatgaagagtttatcgtagttaacaagattgagctttgctcgtgtgagaagcgagcccaatggagtcaatgaaggatacgtcgtttgttaaaaaagactaaactatcaatgctagaaaggtgtatattagttttctctgtcaacttaaatcagagatcagattgtaagaattcaactctaaaaactaatcaatcgtttctcaacttctctgtagtgtttgttgggtgtatggtgataaaactaacacaagagacggtaattacactgcctcactagcaaaatttattagtacaactacaaaacatgccttttaattaagcctacgtactacttatacatttcaataatatgcacaaaaataattacattcaataatgcagcaaacagctttatgatatatcccaacttttgaaaaagaaaagaaaaaggatggaacatctttatcccgctccaatttcaatctctatagactataagctaattcagtctcgtcctttaggctgcaagaacaagtactttaatggttccctgactgttagcggtgagcatggtggggctatctctcttccagcatacagcactaatgaaataagatgcgccatcatcttcaacatcatccaaatcgggcgaaccaaatctatgccaagtcacagggttcgaaatttcctacaagtaatttcaagaagtttactcagtttctggataccaagtgtagatcagttgtataaaatagttgcgcttttaccttatggtagacgaacacttcgtttgtttcactgccacaagcaatgtactcgctatttactgagagaccaacaaagttcttctcatttgtgtgacctttaaaagtacgaatctgtgatcattcatataaaataatattcagaacaattgaaaagaaaaagaaaaaatgagaggctgaattacttccacttgaaacttcaatcctccaatttcctaaatttcctctttcaacttttgcaataattcacattaaaaatgggaattttcttttttcccaatacaattttagaaaattctacaatatcagaatagttataaatgcccagtcatataacataatcttgaagttctttgcctcattccctaattgagagaagtgttactagtcattacttgtttatcagttaggaaatagctcttaccggcttattttccttcacatcccataactgtaatgtactgtctgttgatgcagaggcaagttcagtgtttgacaagaatttcacatacgaaacagttttcttatgcccactgaacacatgaagcggctggctaatatttcttaaatcgtaatagtggatctgatggtctgctgaaccaacctgaaaatgaccagagtaacaacacaagtctcttattgtgtgaaggacaaatataataagaaaatgagtgactactctggagaaggaaaactactatgacatggcaatgtataaaaggcaggcctagcatccaataaggctgatatggaaggtccaactgagaagtactatgacatgccaaagtatagtgcagattgatgattttctatgtggtacattcatctacccaatcacaaccttgaggagctcaaaggtgagaactgagttctgaaccaagtctaaggacaaaagataaagccatttctaaggacaatcagaaattatagtgacagccatggctagaaaattactggttctgcttctctaaatgcaataagagtaggatatggtgcatgaattaatcatgatgagagtggggaaattaacaggaaacaattgcatgatgattttttttaccccttctccagtttaacaatgaaaaaaatataccgcaacataattgctagatccaggattgtacttgacacagcatatgtttgccttcatgtcaatgttaataacactatcttcctgctgagtgcaccaaaccttaacctgttggttatacatggaagaacgtcagtcagtcagttagttatatatggaacaacgtcagtcagtcagttagttatatatggaagaacgtcagtcagttggtcaatctaaaatgattctgtaattattagaagttcaagataaaaaataagcctcaaatgatgttttactcacatgcagatgttgtctaacagagatgcagataatgcacacaaaacgctaaaagatcacagagacaaataattttatatgattaccttacaatcatcactaccagatacaagcctcgatggttctgtacgcgaaaagtcaacactccatgcacgtttctcatgctcttcatattccatcacactctgccatagttaaaatatatatatttatatatacaagtcttagagatttaaaaaccaatggcaagtatataatttataagatactgataacaagattattgtaagattacaaaattaatacctgccgagtgtttacatcccaaacagttactatgccctcataatcactactggctatatggttcttaacaaatttgttccaactcaagcaactaagttttgagcgtgtagacatctcaacaacaggacagtgtagctcagcaggttcattcacaacctagcaaaatagcaggataagcaattatcagcaacattattaagaatacatgcagtgaatgagtaaataccaaatgcatctcctccaaaacagtttcatcagtaatgacagatgccaaacagctaaattagacagcataggtgcaaacttgttttggagaagccttacataccatatgatgttttagaacggagtagtttttactcattgaaaagtcttataagacatgatttacgatcacattttcttaatgtatattgtttcataattatacatattaaaataaaatgagtgaagccagaactaacaccaagcagaaggggctcaaatcagatggtaggaaatagaatccgatctcagcttgagccccagcaattttggtactgcaactggcttgctagctatttaagattgattttagtcaatgtgccaaatattccaaaatgatggcactgagtacatttttgtattttttttttttggtaacgagatggctctgagaaaaataatttaaaataaatgatataaatttgttcagtgtttgagctatagcaaattagcttactatataatcaaatataagtgttaactccttaccaaaaataatatttaattaagcaaaataatatttcccactatatgcagagtatttttttttttttttgatttttatatgcagagtattttaattacaaataaaatagaccaaacgcctcaagaggactaggttgagtgggcacacccattgtttgctcccattgaggttaggactttaatttctcatggggacctataaaaagtttatagaccaaaagcacctcaaaaaaaagatcatacataccgtggagaaatcaaaaacttttatgcgccgtgacacaccagcagtggcaaataactcatcatcacgatcaaattctatgctgcaacaatataatacattttatttgcttaagaaaataactgaagacaaaagtaggacctacaatactgagcacacacagctttaccaactccagaatccatatctgtaatgagatagctatggtgaaagatgaaaaacaatagccaaacaatacatcaccttgatactatattggctgaatgaaagagatccccgtgccgaagttcagcaataactctcaatcggctatttagaaacaccaaaaagaatagaaatcaacaatggagtaagaagcaatagtgatgctcattctatttagaaagaaaatcaatattagcatccatacctatagcgtgtaaatgtactcaatactgattgaaaatttgcaagacctgcattgtaaccatctctgagtatggcatttttatccctttcttgtgaattattcaatcggttcgccaattgacgtcgcttttgcaggtaacactcttgcaagtctttaaactgcagcaagtgtagagatgagaaaaaaatctagccacttgagcctagcttgagtggttgggtgtgtgttgtgtgaaaacagtctaggttctaccctggctgagctaatttaacaaatgaaagctactaactgtttcttaattagagagagaaagagagagagaaagaaagaaaatcaaggcataaaggaaaaattaaatcaatggtatagttagttttgagccacatgattcattgtaatattcattgatgtgaacactaagcagacacttgtaattaaacccaatcagcccagatacatatttattgtatagaaagtgaagacacgtttaaatgatatttgtacagctctactttgaaaagaaaccaatagttaaaaatatatatataaatcccactgtaccattctcaccaccggctattttcaagtttaaggaaaaatatattaataagtatcacgcacaattaccaaggacaaaacaagcatgaaatcccagaataaggcgctgtaaattgactaacctgtgcatggactcgctttttcctaactacagctagccctgatgaattagcatactgtgaatctgatccactcactgaatcttttctctggagtccagaggaatttatttgaccccatccatcagctttcttaatttgatgatttccagaagacattacaccacgtaaattaaaagaactggacacaggaccactggtattctgttcaatcaaagaaggccatgattttcttgcacttgaatcatctccaactgcccggagctttagggaatacctatctctagcacgatacaaatccatcctatgtctttcgacagagcttatgtcgtctttaataaactggagatcagtttgcacctgcaaaatataaacagaatttgattaatgttagaattgggggataagatgaatgaggttccatctcaaaactaattggctatggaaggagtagctcattcat

SEQ ID NO: 298778 - DNA, 5052 bp, Cannabis indica
aagttggttgtattaaaaaaataagttgtcaaaaattaagctcagggtcttatttttactattttagaaaatacagggtccattttatcatttaacaaaacagagggtccaatctgtaacttttgcaaaatacggggtccaaaatagtatttaccttataaaatttactattgaaccatgaaaaagattcaacagaagacaagacaaaaataaatccattatatgttttacgtcaagcaatacatggagtaactcgtgagacaacagtaaaagcaagacatataagtggatcaactcatcaaattctcattgaaatagtattcactcaatgaaaaatatttgccatttgttggttattagggcattccaaaaatctccaggtccaaatatggttgggatgctaatatgcattggtaggggaccatctgcctagagggaagcacctgcacaaagagtggtagacgaagcagaagcgaaaaatgtcagattgagtaacgcaaacatttgtgagaactcagtaccccaaaaacctaaagtgtctatgaataaggaatttatacgtactgcaataataaatctcatggagagttcgatcttgtcatacgatgaacgctggcgacatgcttaacatatgcaagccgaacgagaactagaatttttctacctaaaagatcatagttgacttctttttcttatccacgccagctgttcacacactaagagcatctctaatggttaaatttcgaaaatgtttattgaggtggaaagcttaactgacaaaatataagggtgctattgttggacttttataccctaaacgaaacacaatttcaatgtaatcttacttacttattaataaaagatcagagatctttttttataattgtatattgcttggttcacatgttactctcataattatttaattaatatataaactgctaaatctcgaacatatagttattcactattatagtgttgtcaacacagtagaaaataattgtgattatatgctttaaactttttagtttcatgacttatcagtgcactagatttacactaacatgataattaacaaaatattttgcttacacttggctaagtgaaatgtattttccagggcattagcaaaataaacttgtatcacgtgtatagggtttaaatcagactagaccgatattaacagtgaaaaagatatcataaacttatcgttacctcatagatcaattgatcttaaatcctgagatgattaagttctttctagttgtagtattatagttctttgacttgttcattaccggcttacccgttggtctagtccatacttacatcttgagaactggtagtccaattgagtgagagcattagtcatagatatgaacatttataacttttatgactatttagaagtgaaatgatgatttcctttgagcttgactaaacaagttaaatgctggagtactcatttcagtaattatattagtttattgaaatatcatttacaaaaagctaactatttaaaggataaaatacattaaagggtaaaacgataattttgtccatattcaatgtagaacatctatagaggatcattgattgaaacaatgaataaattatagtgtatctatattagatatatatagcgttctatgtaatcaagagtataattttaaatctatagtggagtcaggaggaaatttactcaagaaattttagatctacttattgagagtttgattacataagtccatggtccccatattattcgggataatatcatcctgttaattccattaattgatttaataaatcaattaaaattcaaaaataaactaagtcttatttgagatttttcactaaggttagcaccatttataggtgacaccaataacaatacgacacatttaagagacacccctgatactttttagcctttctctaaaaatatatgtaattaaaaaatttaaatttctcaaaatttccccaatttatacatctccaatctaattataagtattattatttagaaaagaaataactaaccatcttccatgtattagtgtagtaattttagtagagatgaattgagatcttagagcagcaaagtgtatagtgtggtcaccttataatgattaatatctgaaaatgaagaaaaacagtagtgtgagtaactacacagtcttgaaaacaaaaaaaaaaaaaaacagtcatggaaaatttattgttaatttaataggagtagcagaatggaagtggcaaaaaaaagctgattaatattagtttgagatacaagagataacagtcacataccaatcttgggggagaaatttccatatatacacctaaatttgcagttattttgtatatcagaaaatcattccctttcttcatctcataactccaattcacccatcacagcagtatagaaaatgttttgttctgttatgagattgagaactcattgcacttgtttttcatctggcacctcacacttgagtcttcagagaatcatgatttgcaacaatggcgaaaaggagccagagagaatactggattgaactgtctcgcgatgtttgccatggtaccgagttaaagaatccagtcatttatctctatggctgcatcatctgaattgaatagacaaagcataacagaagctgctatgtagaaagcatttctcaactgttatctcaatccaactttttccggcttccttagatcctacttctttggcagtttttctagctttgcataactatcccacataccaagctcagcataaacatttgaaagtgttacataagtagaagaatcttcaggtaaggttgcaagaatatttttatcaataacattaagcagttcagcatttttataagttccacaagccccaagcaaggatctccatatggtttcgttaggctcacatggcatgtccgcgattaacttctctgcctctttaaaacacccagcttgactaagaagatcaaccatgcagttataatgctccaatagaggttctagtccatactcaagtttcattgagctaaaaatggccttgcttctttaacaagaccagcatgtctacaggctgaaagtacaccgaggtaggtgatttcattcggcttcattcccgactctctcatctcatggaaataatgaatagcttctttggctcttccgttttggccacacccaacaattattcccgtccaacatacagtatcgcgatctgtcgtgctttcaaacaaagctagtccatcctcaatctcaccgcatttcgtgtacatatctattagagaagtgatcacaactccctcatagtcatatcctttcttggtgcagaaagcatgaatttgtttgccatttttgtttgccatttctaagagaagttaaggtggagcaaactttagagaacacttgaaacaacaaactgatctacttcaagattcaaattatgcatatttcggaaaagtgacaaagctaactcactaaaccccattttagaacaccctgtgatcaaaccagaccaggctacaatatcttttttaggaagtatatgaaacaattgtaaggcatggttaatcttcccaactcttgcataaaggtctacaagaacacttccaacaacatgatcaaactcatgcccagaagttacaaccaaaccatggacttgtagcccaagtcttgagttgagcaaattgatacaggccttcaaagcagcactgaaagtgtaagagtccatcactgcaccagacctatgaacaattgaaactaaatctaaagctgttttgttatgcatattaacaacatatccagagagcattgaattccaaagagctaagttatcacatatagaagaattacagctagagtactgcttaaaaagctttttcgctgaaattaatttattgcaatcggaatacatatcaaccagagctgatacagtgaacctaccagactcaaaaccagacctgatgacataacagtgtatctgttctccaaattctaacagaccatgacggccacaagttttaagagcacacgggaatgtaaatccatcgagtttaaaaccttctcggtgcatttcgtgcaagaactcagaagcacgcagactaaccttatctgcaaaaccagcaatgatgctgttccaagacacaacattaggttcgggcattcgttgaaataaatccactgcttcattcattaaaccagacttactataacctgaaataatagtattccaagtagttgaattcgcaaacaaaatctcatcaaaaaccgccttggcattactcaaacttccacatttaacatacatatccaaaagggtattcatcaaaacagtgtcagactccaacccatcattacatattccttcatgtatcattttaccaaacttcaggtcacccaaaagcccacaagctttgagcacagcagagtacatgaaaccgttcggtatgtcagatttggagtccaacatacgagtgtacaacccgagtgcttcgcggggtgttccacaatcagcataggcagaaaccatagtggtccatgtaacaatattcttaacaggcatttcatcaaacaccttccgtgcatctttcaaaattttaaattccatatacattgaaatcaagttattagcaaggaacatatcgttaaacatgccaagtttgaacaaatgggaatgaagtacctttcctggattgaaggcgccaactcgaccacaatggcgcaaagccttggctacactattcagctccataactaattttttatgagaatttcaaaagtacatagaatgcacgtacttcaaaccataatgataataataaagctaattaaattttcttttcaatcaactttgatatgtactaacaattatttaaaaaatttctaaaatattaagattgttgaattagttaatttcgttcaatttaactaaggaatagctaatataacgattgtctatttgtcaaagagattatttcacatttacatacaaacaacaaaaaaaaattataaaatactttgaaattttaaatatttttataa

SEQ ID NO: 298779 - DNA, 2379 bp, Cannabis indica
aattataaaaaaaaaattattaatcactcataagttattgggcatggcccacttgtggtaatagcaatgttgtatcataattctctttatggagatgtgtatagatacatctttgcatgcttttcactaagctaattaagccttacaacttggaccaaataataatttgttattattcaaaagattatgctgttattacatcatctccctacctttagaaaaacgtacgcgatattattactttttgaaaaaaacatactattattatgaaaaatgtgaatgtttatacgtatttatgtctatgccttttcttttagaatttgattcgtggcaaaatattcatgatccatatatatctgaagaaaattattaaactagtgtgcctttgtttttgttcactcagcttgtacaatatgtttgtgtggatatccttaataatatacttttgaagaaattaaactaaaagttattctaatttatagaagaaaagttatcctggttcacgtttgattaatagcgtgttccctgttgttatttgcttttcttttaataattatatcatattaatagtattttctttaagggaataatttagtgttaactaatgttatttatatgtattttaataaagtatatcttctaatatatccgaaactccattgtctttctactaaatttttcattttcgtttttatcaaaaaaaaattcattccacgtataaaaattgtagtactattttttccacccttttgctttcaataactaacaaattttgctctatatgaatgcaagtttgtgttaatttgcatgcatgctctcttttgaaatatctgatcaatttcaattatttttaatttatcacagctaattactattattcagtcttcatttatcgggatgattcaccctaagaaattaaaataaatttgctgtctcgaaattggtgtgccctctctatctccactaattgttttaggatacatcatttatacctattttacatatattaatttagtttagagtgtgttaacgaatttaatatgttaaataggtatagatgttgtgtactaaaataattggcaggagagggagggcacaccaatttaaagacaacaaattttctttcctaaaaaatatatacatggaagattttgtcaagttagttaattattgataacaattacatagcaattaaatgtggcgtgaattttgaatattaattacaatactaacgattataaaagtaaaattgtgcttatgctctctttcgagaagagcctttcttaagtttgcttcacacgcatcgttctatcatggatgatttgcttgagaaaacttttaatcttacgattcttgaggaggatggttgggaagtaaatgtcgctagtgattttgagttgggaaatttctgtgcgattgaatgtctttggtctaataagtcgatgtgtaagcgttttctaaagactattttgagcaaatttggggactcaaagagaaggatcgggatgttctgattacgttatcgattgacttgctaatgttctcatttttctctttcaaatctgatagagaattgaattagattctcagatggatgccttggtatttgactaatggaacgcccattctccggcgcatctctcggatgcctctagactcaaagtcggagcttctatgttttcatatcaccggttgagttctgaatcttccccctaaattatctattacccaaaggaacttggatcggtaggctgggtttgtgggtgaaatcatcgaggttgaaaaagtgaaagttgctacaattgtcttaaacgattatattttcttcaaggtatggtgtgacatttctaagctgctatttgctggtttactgtttcctagcaagggtcttaagtgatggcttccccaccattatgattagttgcactactaaataaatggttttttctgacgtttttaaataggcgggtaaagtattctcgtcagtttctataattatcgcctatacaactgtcgtaaaatgggcagaataggcaacgattcgaaacagttgctaatttgaaattctcgataatttaaaattgtcgcctataatagggtataggcgaccgttttaaactatcgcctatagtatagggcacaattttaaatcgtcgcgtataccctaatataggcgataattttaaattgtgccatatagtacaagttacgttttttattttaaaaagtttttttgagcgacggtttttttcagtcgttacattggaaaaataagggaaaatgtagattttttgccattttctcttacattaatttttaaatttttttacaaatttatatagtcacaataattagcctaacgctaatatcatctaaata

SEQ ID NO: 298780 - DNA, 1238 bp, Cannabis indica
gttgatttgctgttttgcatcagttagtacaggtggtaatcttgctcagttcatcaaaggtatgtttaattttactgttttgccttttgagttatgagtttgatacattggtggtgaatggtaatagcagctagggttttgttatctttttttaggttgatacttgatggctatggtgatctgtaattcggaagtcaaaattgaaatcaattttccaatggaaataattgaaagcatactgttaagatcacaggcaaaatctgtggtacggttcaagtgcgtttgcaaatcttggttatccctaataagcaacccaatcttcatgaaaaaccaccacaaacgacaagtaactcataccatccaggctgttggaagatttggaggaatggtgtgctcatctcatagctcgaaacactttgatcagatttcatcaaacatattccctaatgacaagaataagatggagaatccacacatggcctttgtgggttgtgatcatggtgtggtttgtttggtagacaattttactcatgttacctttggaaccctgcaattggaaatcataaaaaactccccgaatctcatcctcttaagggtatttgtaagtctcagactttgtttggatttggatacgaaccactaccaagatttcaaagtggtggctgcgcgttcatgtgaaggtaaccacattttgttggatgatagaaaactttgggtgtttcagaagttctttataagaggtgaacaaattgcagtatatagtttgaaaaacaattcatggaaaagtttggttatgcctgatttattctctatagatcaacatgatggtgacaaaggcgataccaagttatttacatctgtatgttacatggtgtctgttgttgttagtggctctattcattggctaatctctttcgaacaaagacgttcttcttctgtagagaagcttgggatagttgtgtttgatctaagtagtgaggaatttaagctcattacacccccttcaactttaaatgataaagaatttggaatacaagtatttgtaacttgagtggctgcctatctttgatcacaacaccaggtccatcatcatgtattgacatatgggtcatgaagaagtatggtatgagtgattcttgggctaaatatatatctgtggacttaggtaaccaactagtgaaatcttttccattaggtgtatcacagaatggtaacctcttacttgaatcaacaagtgt

SEQ ID NO: 298781 - DNA, 2931 bp, Cannabis indica
taaatttttcaaaaattctgaattgtttaccatgtcgaaaacagaattcctgatatttcagtttataatgaactttcaaaaaactttaaacgtattttcggtactataaattattcaaaaaattttataaatctacagaaataatgttttaagcataacgaacacgaaaaaaaattaaaaagaaatattctgacatgtgtttctaagtacggaagttgactaaaaaattgtaataagaggttgaaagtagccctcgtcgtaatatatataccactcaccgacagccacatttttcttcttttcacctgaaacatacaaatacagaatcagcataagacactgtggtctggtctcttaacatatattaggattattgaatgtcttagccactgaaacaaacattcagagaaagcaaaaacgtaaggaagagaaagggaacgagaagaaaagtgtggattcatttcattagagctcgaacagagtttatataatacaagccactaactaaatgggctgaccaatcttatacccttaacaacatataagagatcaaatgaaaaattgtctacagtaccataatcttgcccaaaaattttatgaattagtattaaagaaagagaaatactaaaaggtactagtggtgcaattaagtatcgaatcttatataatttaatgtaatatattttaaagaatatcgctagtgaattataagatgacaggtttattagtaatgatcttataaaaaaaatacaataatattgttacctttgggatgaaaacattcaattaatgggaagtcggtggcattattattgtattttgggcgacacctcttccctcgtgcttcacaatgaccgcagtcgggttcaaaccatttcaaccgcaatttgttgttgtatactctgttggaaagatccccataatcttcatttggaaggggtagagtgttgtactccttagtacaatataagggcaagtcttcaattacagcatattgagattcagaaagcaaaatattaaatccttggccaccaaggcaagggatcatggctttgtaataaagactattactattactactactatctacttcatcgaggatagaacaattgaacaaggtataattagtgagcaaatctttggcgaaaccaaatggtgagattgacgataagtcatggaatttttagaagttgtctgtaaatgcaattatttgggtcgtaaacttcaattacttgagctctgtagtcgatatgttttacgaagaatttcaatgatgattttgggaactcaagaactgtgtggttgccactgcaagatagctcgaacccagggtaggcataggttgagtagtagtgatgattttggtgatttttgagtccaaatgggaatctgatgtttgagcttttctcatcacaattagctccaacttctaccaataacgccagcaacaacaacgacaccatgcatgaccaatacatcatttgatcaaattcagtcttttgttaaagttaataattatgtatgataaaatctcaccgtttgtagctatataaggcatattttgtttttacaattaataagcaattccaccacatatatttatttatcttaaattgaagagtattttttttagttaaaagaaacacaacatttgccaaattataaaaaatgtaatataaaccttacaaaccattaccacatgtgggagttccgctttctgaggggttactagttacctgtttttatattatgtattaaaagtatacccaatattaaattagactaatgacaatattatatagttatttgtagttgaataagttaggatacttttatatatttttttcaattaaatatatgagaaagaatttgtagtatgagtgcgaggtacacttatgtattattaatttatttctacctttattatttaatcttaatctatggttctacttctacggtcatatataaagctgggtgatagacccgaagaaactgctgcttgtctgaaaaccacatgctggttaataatgcatttatttttatttgtttttttaaaaaaattctctttgaataaagcaaaataaaatatttcagtcgtctaacaaaataaaaaaataaaatttgtgacaacttttttatcacaacataaattttttgtgactaaatgtgacttttagtcacaacaaaaagttacatgtgactaaaacatagtatttagatacaagttgtccttaaattagttttagtcacaacaagtattgtgattaaaaatacatttagtcacaataaattatcatttttgtgactaatacttatagtcacggacattttaatcacaacataagaatgataatttataattagtcacaacttttttacttttagttacaaattttattgtgactaaaagtaagattgtttatactggcaaagtagctagtggttgaagaggatcaagatcaacaggtacaggaaaaggcacaagtggaaaagaaggctaaaggtgagcaagttactggagatctttcagaggaatacaaggcaccaccaataagtattgagcatcacataaaaattccctatccacaaaggttccgcaagaacaatttggataagcagttttcaaaattccttgaaatatttaagaaactgcacattaacattccatttgcagaggcgcttgagcagattcgaaattactttacatttatgaaagagattttgacaaagaagaggaagttggaggaatttaagacagtgagacttactggggattgcggtgcaatcttccagaagaaactaccacccaagcttaattaaagatcaggatagttttaatattccttgctcgataggggttttgttagaataaaaagctctgtgtgatttgggagcaatcattaacgtaatgcccttgtttatttttaaaag

SEQ ID NO: 298782 - DNA, 3231 bp, Cannabis indica
agaggacttcgtccgagtgaatgtacgtgtcctgttcggcttatgtcttgcgagcagatacctggagtcgattccacgtgttaccatcgagtgatgccacgtcagagtgcagaaattgggataacaaaacttatagagtaaggcattaaaattaaaaaaataaataaaaacttatagggtaagaaattaatcaaccactcataaaaaaatcttagataaatcaatatggcatagtaagaataatatttataacctatatgaataatacctacataatttataaataatgtgagtgttaacgtagattttcgttaataaaaaataataagcaccaaaatgttgggcaaaagcatcgcaaccaatagcatatggttcttttattcgggtgaattggcctacaacttctctgagcctatccaactcgacatcgtctcccaggtccacatgaggctcaccaattcctggccctgtttcccatgcataatattggagaacaatccttattgcgctcctagaggttgttccatgttgacaggaccttctgttcgaggttctgttggtggatctattttgggcggcaagggtcgatcattaggattcactgagttagtaggattaacaagattagtggtattagatggatttgcaagatttgtcagagtgacgatatgagttagatcattgaggccttccgtggtgggaggaatttgaatgttgggatcagctgtcatatgatcttgaggaagaccagaggaagtggaggtagtggttctcctagttacagccatgatgattgatcaggatgacaaataatactcttaataaaagcaccaaaatgttgatatcagatttggtcaattgacattggagccttatttatgattaacaatcactacatgtaaattgtaaaatcaaataataaaagtgacacagtgatttatagaggttcgacccccttattttgtgggtaatgacctactctccttttggttgtattaatttgagagataacaccacgcagattacaggctttatcttgtaatttctagctatagctctctttgaatgttacaataatgagaactgatgtatgacagattctgaacaagtgagatgagaaaagagactaagtgtctagtaaatggaaagtggcgtgtgagagagaaagtgaggatgctctagtgcttaaaggacttagaattcaagtcccttttactttgcctaatgacctttatatagtttagggtttacaaaagatctatcttcaagtaagtaaatatcccttaaaaataaggaaaaacatcttttatcatatatttaagtaacaaaaataactaactaatatccctaaaagataagtagatagtttggggttgaatccctacttttgtgggttgttggagccgtcttgtatctgaaatcgagttgtgacccgtccaggaggatggatgtggaccccaccattcaatagggcttccttttattctctctatttgtgttggccgacctaccatttgcttggggttggctggctcataaacatccttggtcggccaggatgtggtctggccagaccctcctagttggctattttcttgtaacttgatattgcccatgtctttaaatcccttgtcaattgatgtgttgagcatggtgatttggctcacctattgacatgttgtattctacgtggcctcggtcttgcctacacggacacgccacgtcatctgggtaaaaattggaataacacttttaataaaaacattaactaacctattttaaaatgcaaaaagtaatttatttattttttattttttttaaaatcaaattatatgtaataaattaatattaaaataacaataacaattaatcctaaatcttaattttgtaagggccactcccagagcgtgcaaaatattcagcaagcattttcagagtattacaaagcaccgtggttgtctgccaataaaaataaatctcaaatttattttggggacacaagtccaaagactaaaaggagtattcaagaaattgtcaaggatgaggaaggtatttttccattgaaatacttggaagttcatttaagacccgcaagatggcagaaatcagattgtgggcctatcatctctaaagtgcaaaagcgattacataattgggctactaggcacttttcttttgctgacagggctcagttgattcactgtggtccttggtatttgcagttactgaatgagcattattattcttcctcggagtgttgttaaagagattgacaaactttgtcaagacttcctatggggtgccaaggactatagatgcaagcctcatattacttcttgggataaagtgtgtctcccgaaacaatatggaggtatgggtttggtatgggttttaaagagggatcaaaatggaatagaacaatgatcaataaatacatttaggatctttctgctaaacctgatgcactttgggttaaatgggtcatagtgtttacttgaaaaggcaatcttcgactccacgttgctagaggagaccctagttggtattggaaggaactcttcaagcttaaatcgaatatctttaaggcaatgatacatgatgctggagttatgggaaggtttaaggtaagcaaattctatattttctccttgatgttgagaaggttgattatgttggggtagtttggagtaggctttcgattctcaagcataggttcatactttggtagatgataaactctcagttgataaccagcgataaacttgagagctacatctctccattgattctccatgttgtccagtgtgtattgattttcttgagagccatgatcacttaatttttttctttgtccctttttatgttgcactgctaagtaaggttcatggatgagtgggtttcaccactttgcccattgtgtacttgattggaggatttagattgggcaattgggatctaacttaaagtgtcatatgctaattgttgtaatagctgttgtggtttattttatgctaatagaaatctttgtatttttgaatatagatctttcactgtttaacatgctagtaatattataaagttgttcatgttgtaagtagttagtagtgttttcctaaacttttcttagctttgattgaactgaaattgcttgatgtaattatgttgtttaatttaataagaaaatttctccttttataaaaaaaaaaaaaaaaagaaaaaaaaaaagtaaaa

SEQ ID NO: 298783 - DNA, 11925 bp, Cannabis indica
atttaacggtaatatttaactggcgtgtcaaatttgcaaagaaaagtaaactgaagggttttgccaccaaaaaaaaagataagggggttaagtgtataaaaattaaaacataaaggggttttgccacaaaaaaaaagataagggggttacgtgtataaaaattaaaacataagggggttttgccaccaaaaataaagataagggggttaagtgtataaaaatcaaaacataagggagtttcgccgcaaattgctcattatataaagctacttaggaaatttttgtaacctaacctactctttacacaagtcctaaaccttttctttttgttttttttttatatattaattatcttttatttttctacaacaaaatctcatcaaatatttagaactaagtttgaatagttttgctttgtttgaaatagtttcttttaatattagtcaactctcatgaattcgacctcgtacttacatgaacattatattctaaaataattagtgcatctgcaagtataaatattaaaatacttacttttaggtacaacaattatgttattttcttttttatttattttttcacattagcatttttaattttaattttgttaattttttaattttaattttaattgtatgaaattatggcctttttttaaaggtgaaattatggttattaattagaatcttttaaattttaggatttttttcagttttaattaaaaaaagtaataatattacaaaaatacttgccaaataaactaatatacaatctaaataaaaaaaattacacaaataccacttatacacatcttcaacctaggatctatgcttcctgagcaactattgcgcaaccacgtagcaacccaacgcaagtgaaacgaaaattcaaccaaaaaaacgaaaattcaaccaaaaagagaaccaccattaattccgacgacttcacatgagaagacgaccagaatcaattaaaacagatgctattttgaattcataaaaaaagcgtaaaaaaactactacgaaattaaaattcaacccaaaatccagtttaatttgcataaaactaatgtccggactttaatttttagatccatgaaaggcggatctcaaaaaattgagctggagttccctaacaatccaactcaagtataatctaaaaaaaaattacatcaatactatagtaaaatgtttatccaggtgtatttttgttgttttccaaatttctaatggtgaatttgttcatattaaatcataaagagacatgtagatacaattacgtaaatgttctgattttcaatatttcacagcagttccattagttgcataaatattttgctaacagttattttgtctgatgcagcctttggccaaccacctaaaaactttcgcacgcagcaaccaccctgcaattatcgcctgattgtgtaagtggtattttagtaattaaaatcacataaaatgtataaatgttatccttaccttataaaagtattttttttataaataaagtgacaatttatattttttatgtaataatttctttaatttatatacttattaaggtgtaagtacatatttttggtttatatgcctattttattaatttaatatataagtatgttgtaaagagttgaggctctatccttaatgattttgatgcaccattattttgatggccttggtgcttttcaagaattttgtgcttatattatggcttgcctaccataacatagttaaatggtcatggtatttaaaattttatacaaaatttaaaactaacaaatttttaaaattttataatctatttttatttaattttgatttattttcaatcgtaaaattataagaaattggacaatatttgttataacatatacattattaaggtaatgataatataatattaattggcttttaaaaagaaattgtagtaacttttcttttgattttaaagatacggattaaagtttgagggtttttagtatttgggtctagatataattttttaaggagaatttaggaagtttttttggtttatgaaattgttttctagaaattttctcaaaatatgtgacgattcaagaacaagtcaggtggcaatgagatccacgttacaaggcatgtcaccttaattactctcggagtctattatttctaaggagtaatgatagattagtcatctccaagaaggtctagctggacaaattaacatgtatctcttgtctttttctctctgtgagtgaagtcgacccagagaagggtatgggaggactgatgaagtacaacacatcacccgaggattaaaatactatatgtgcattttatgcagcatggagaatagcatctaacaccttttgctgagaaacgtgtttaagggtttgaactaattattttttgatttcgcgagaccacattcagcaatcgataactgcataaataagttgtcaagccataaataaggaataaatcaaatcccaccaaacacatttagaaaatccaaaatttatcataaaagtaggaaatcatgccctaaaatcatatttgagaaattgtgcaaagtatggtgcaaacaaatacgacaatgatagccttttatcaccagtattatgagcctataaatacctctaataatatatagaagagggattgatcaaaaaattctttgtaataaatactttcataaatacagtgactcatggactaaggctcatcaatgccccaatcacgtaaaaaaaattctcttctaccatccattaattactcaatacaactctaattattggttgcaaaaaatctcggtaaagattttaatactttcattaagagctataggaagcttatcaaaagaggaagttgtaaataacctcgtggtataatggtaaagacaagaaacacttcacgtccacaacagttagatgacccaaaggatccaaaagaggaagaggcgacttctagggtggatgctaaaggagaatgagacatcaatgatccagaatacttagaccaagaagaatatgaagactacgatgaagacaactatatagaattagttgaactaaggcaaaaggctgttgaccatgaggtagagttggcagaacaaaaggaacaaaataagagaatgcaagagatattgattgccatgaaaacggcaataaaaaatgcaggcatccaagtagatccaactgcaatgccattagtgcaagagaggactgaggaagagctctctcagcccaaggaaggccaaaaatagaagaataaagaacctagtcctatcaggtatcctccaaaaagacatgccaagagggaaatcctatggttgcgcctggaaagaacaagaaggccgaggatccacaaaaagtttatcctgatctcccgaaagggaagggtccgcagggggtagatttccccaaagaacaactagcccccatgatcatggagattgaaggagcgtatccgtgcatcaagagccaggaaaacaaaagaagtctgccaggaaagattcccatgtcgatctacgacacaaactcaatgtcaaacacggggatctaagggcacgccttgattaaggaaagaaagtcgcaccagcctccgagggtatcctaaatgaaagagacctggtcgaacttgctatcctccagaaggacatatcaaggatctcctagaggcaaaaggagacaactctaaatcaaattgtgaggactgagagccttgtgcgagaaacattctagaggctaaactcccaaagaacttcaagatgccttaaatgactatgtacatgggtgacacgaatccaagtcagtacctatcttgattcaacagagtcatgacagtcatgagggtcaacaatgatgataagtgcctatgtttcccactaacattgggaggttctgcagaagaatgattcaaaaatttagaactggaatttgtggattgttggaataaattgaaaactaattttatatataaattgtttgcaaccagaaagataaatcttgaagttagttccttgactaacatcaaacaactaccaatggaaaccttgaagaacttcatcaaggggtttaaagaagaggcttccaagaccaagaaagtagatgacggacaacagttagctctattgcaagctggaatttggatgggaactccgttctagaatgaattacaataggaaggtgcagctagccttcaagatttctaaaagagatcccaaaagtatatcaacatggaagaagcctaaatcacaaccttcgggggggtactgtcctaccagaggccttgggtatgcttccgaagtgaaattcccaagcatcacgcttcctgtcgctccccaaacaagtggcatgcctagtgtgcaatttcaagtaacacttgggtactcaccaaattctgtcatggcaccagcccaaactgattatgggctaccagcaagtggtcccactctcggggcatgcacgcaatatcttgttcaatccgattcacttgcagtgagtgcagctacagctcctgaagcttctcagagtaaacagtcatttaaaggaagcacctgaagtgaaagtaataagccgaaaaggtctgagtataacccccaatatactcaatatatattgatctggtggatacgcaagaacgcatatatttagccacaagacaaaatgtttattaccggaggccaccacctttaaactgagacaactcatgaagggactccagtaaaaaatctgagtatcataatgacattgggcatacaaccaatgaatgtaagaacttaaaaaacgagattgagaacatgatatggctaggccacttatacaaatggataaggaatcgtttgtcatatatgagggaatgacaaactagagctcaagtaccatccagagttgtggtgcaaaccccagatgtatatgcccctcaggaagtacttccccaaaatcaaggggccctactaggacagccacccaaactaaatgggagagtggctctgatcttcggaggccctcatataggaggtttgacccgtaatgaattaaaacggtacatcaggatcctagaccatgacgaagagatatgggaagtatgttagctaccagctcagaggcctcgtctcatgaactaaccgataacttttaccgatgaagatgcctaaacgatgcattttttgtaccatgacccactggtaattgaaactcccattgccaacaagatggtagctcgaattttggtagataatggtagttcagtaaacatcctgttcaaataatctttcgttgccattggcctcatggaccaagatttatcacccagtggttcctagctcatggggttcaatggaaattctcttatccccatggggataattaagctcccaatgaccatgtgtcctgacactcctcaaagtacatttaagtattgtaccttagtcgtggtagattttccaatagcttacaacgccataatgggacacccaacattagtggattttggagctatagcttcgaccaggcacttgagcctcaaattccctaacccattatgtgggagtgtgaactgtttaaagaaatcagggggagcatgaaaatgctatagtgtagccaccaagcaagctgtcctcatggttcaacacacgaaagaaggacacacagtagagatacaagatgaattggatccctgagtgggagccgaggccactcttaagcctatgaaagaagtaaaggaaattcaaatatgtggttaggatccaaccaaggtaattcaagttgggaaagactttaattctgatgaaagaaatgaaattgtggagaccatcaaggagtcagcatatgtctttgcatgactcacggagatatgaccaacatcagtccaaatgtcattacccatgttttgaacgtcaacaaagatatacctaccatttagcaaaaaaaaaaaagtccccttgacccagtcaaatctgaagctttaaaacaagaagtggacaaaatgttgtccaacatctttatccaagatgtatattacctgaagtgcttggctaatcagtactagtaccaaagccaaatggggcatgacgagtgtgcatatacttcactaatttgaataaagcctaccctaaggattgtttcctgcttccaaggaccaaccaaatggtagatgccacatctggttataagttgttggcctttatagatgtctactcaggttacaaccaaattaagatgcatgtggctgaccaagaatgcactagctttcagactgatgccctttgggtcaagaatgccaaagaaacataccaacggttagtcaacctgatgtttaagaacctgctgaataattaacgcttcaagtaggtaaacatatttttcttatttattctaaaatcatattttcttagcttaatcttttattaatccgatctaaaaaactcgataaatattatccatacatcaaaaggatcaccttgaataatagatcgtaataatactattcttgagtccaaaataaccatcaatgtagctatataaaagtttttaaagttactaagaacaaagcagattgctttcactttgggtgtacacataaaaaaatacgataaatgtcggtatattttaaaattaaataaagttctgtatttttgtaaataaaatcaaaagtacaatcgcaggtgaaatttctctagttaatagttggcatggttcatgagcctatattagagtgaaagacacataaagcctcttcgtctcctcctcatacgattacgtatgggccagataaggtatttgacatgttatcttatagaaaagcctctttatctcttcctcaagtgtttaagggccagaagatgtatttgatatgttctttcatgggaaaaattgtagaaaataagttagatagtaaaatcaaattaccttatgattatcttactttttgtgaagaatcgaaattaccatgtgtacgaactcaacatcacatctctagtagctcccactttggtcaatgctatgggtaaaatagcttgtgttgtcaggagtttaagagcaatatacttgacaaggaattattcttgaagagtaaacttttagagaattctttttggcggctagctctcgggctacctctagaaatgaatatcttctctcaatagctttacacttagttgctgaacaatttaacattctaaggaactgtctctaaatgtgccacatgtcaaagtaaaaaaaatatggtacatatattaattaaaaaaaaataacaaattaaaagcatgatatgtttaaaaatatgtattttatgaaaataaaaacacaaaaaaagtaatgatatatgcacatataattcacacataaataatattatatttgtgtgtgatttctgtgtgcacatattattactcttattataatatgtatattaaaaaattaaaaaaatatatgttaaaattaattaattacttttattgtttcgattcatcctggtttggagaatgctaaagtagctcaacttgtggtctcgagttctagggtttgggatgttgacttgttgtctaaccttttttacttagcgagacaaattgctcattcagagtgttgttcttaatgatgcgttaggagtggaccgatggtattggaatagggagagtttggtagtttggatatatatagtgtaaaagaatgcctacaagtatcttcaagttttgaatgggaggtgggatgaacaactagttctcgtcttggcagaatttttagaatattaaaatccctccaaaagtccatcatgtgtgttatggagagcttgctcatgtatcttgcccacatccatgcagcttctaggaaaacatgtagatattttgttgatgtgtcaagtgtgtcatactctccaaatgacttctccatggaccatgtaggttgattatttatgattgtaaacatattttttttttacttaaaacaatgtctttattatttttgttaaatgatttgcgaataaggtagttaattttttggtctcgtgctgcttattctttttttaggttgtcgattcagtgggagatttatcccgactaatcttcatgctattttattagcagaattacatttttaattaataatacaatgaactttcaatgaaaaaaaagttttaaataatatgtatataatttatgagtgatctctattattattttggtcccatttagctgaaaaattaaactctttacaaatttagttggcactgagacaaattaaataaaaaagaataattactaattttgtctcctaaatttttgacactatcggatcctgtctcctaaaatatacgagttgttaaaataatttcctaaacttttacatttacagaaatttagtcatttgttaggtttcgtcttattatttagttcaaatattaacgtatctttgtaaattagcaatttccccttaaattttgacaactatcaaattgtaccccctcaaaataaaaatgagaatgattcaatttttttgaagatcttaaaagattaatttagatcttaaaataaattattttgaatgattaaaaaaaattcaaaaagaaaataaaatcttaaaataaattaagcgatttaaaatttttatttatttttattaaaaagatatatttagatataaaaatgtatattaaaatttttgtaagaactaaattttacgagaacaagtttgagttcttacttcaaaaatatagatttgtttaagtaaacataatattttttcagtttaattttttttaaaaaaaatatatttttattgaatttgtaattattttcctttattttgtatgagtttgtaaatataaataagcttaattttttcttttacaaaattttagtttgtttaaattatttattagattttcaataattttagtttgatttctaaagatatttgtttataaataatatagtttgattttttttttttttgaataatttaggtttttttaagtaaacttaatttttttttattaatttaatacttttagcaggtttttaataaattttttctcaaaattaatagaaaattataatttttaatttttttcaataaaaatggacaaaattttgtattgagcatatctaaggagtaaaaatattaacttttcacgataaaagaaaaggaatttaacaaaagtggtatgattatataactgctatattttaagaaattttttaacaaaatatatattttaaggggcagaattaagtagtgttggaagtctagagtctaaaaaatactaattattcaataaaaaatgtaaataaataactaaaattattttgtagtttttatcaaattaataaaaatctttagtcattgttccttaaatagaaacccaaaaaatccaaaaatcataaataaatacataatccttttccttgaagacttattattattatttttagaagttattatcaatatccgtgatcttgagaaaataaaaggaaccaataagattttcttcaataaagaagagtaatgtaatctcaaccacaaagtgaattgggtatccgacagtgtgggccagcccaaatacgttgaaagcccactattagataaggcaaagataaggcgcgagctgttcagaaccgtcagatggatactctcctcgatccaacgtttataaactcgccacgtatggataattcccatagagctcgatttcaaaaatctaaataataaaaatcaaaacccatttatgtttctttaatttaccagaagaaagaaaattctcactctcagcacactccttctgctaatctacgcaccggcgcacgttagccgaatatggccaccacgacatcagccgcagccacgtcctcattcatcggaacacgtttacccgacgtgcactcaaactcgggtcgggtccaggcccgtttcggattcggagccaagaaaagcccacctaagaaatcgataaggcccagtaacgatcgcccactttggttccccggagctaaggcacctgaatatctggacggaaccctagtgggtgactatggattcgacccatttgggctgggaaagccagcggagtaccttcagttcgatctggactcgctggatcagaatctggcgaagaacgaagccgggcagatcatcggaacaaggactgaggtggcggacgtgaaatctacgccgttccagccgtacagtgaggtgtttgggcttcagaggtttagggagtgtgaacttattcatggacgttgggccatgcttgctactctcggtgctctcactgttgaatggctcaccggagttacctggcaagatgccggaaaggtatgtccgtacgtaaattatttttacagtaatgtaatgttagtgttttttctttcttttttaaatgataacttaattacactaattactatataattatttatattttgtaaaatttatacccatcaaattcaaactcaagtgtgagtttcaagtatgtagatttaatcactaaccttcacaagtttaattaattataattagtttaaatcattgtttctttttaaaaaaattaaaagatatgggaggaaatttattatttatatattttatggaatatgtatttttttaatttgaagcaaagttgattatattattattttcagttaatattctaatctatgtcaatttgtttataaaatatagacattaattgagtgacaaagtggcatgcataacaattaagtctaaactttaataacaatccaagaccaaaccaatatgaacattattacattaatttttacgtgattatatgaaatattaattttatgagaaatgttataacattttatatgtgtatatttgtaagtttcgaattttatataatttcgaatttttatataatttaatataataatttttatagagttttgctagttaatcgtaatccgatatgtccagatacattatagcaatactctaattttatatatatgtatgtataggtggagctagtggatggatcatcatactgggtcaaccactaccattctcaataacaagtctgatatggatagaggttttagtagtcgggtacattgagtttcagagaaacgcagaattggacccagaaaagaggctttacccaggtggaaagttctttgacccattgggccttgctgaagacccagaaaagaaggccactcttcaactcgccgaaatcaaacacgctcgtctcgccatggttgcctttttgggctttgctgtccaggccgctgccactggaaagggcccactcaacaattgggctacccatttgagtgacccacttcacaccaccattattgacacattcacctcttgaaatttaaaaaaaaaaaaaaaagacagatctaatgagaattaatcttcttgtacttttttcttttagttggactacttctctttatctctttctctactttttcttgtaaaaatattattgtgaaaatagaggtatgatcaattatggggatgggatcaatgtgtgagctttgcttgttttgtatgagaatgagatgtatgtgaaattggaattaaatttccccttcatttcataggaacgtaataataaaaacatagcaagttgctaagagcacacacaatatgcatcaaaacactttatttttcggttaaattatagacaacaagagtgttaaggaaactcttttctactttcttttacactctataaattagtgacaaatgtcatcctttgagattagtatatttgtatttaataattagacataatattattacattattatatctatgccattacaataaaattattctaaatttttacttagagctaaatataaatatatatcttaaacaaagttatagcaccatttaaaaaaacaaaacaaaaaaagaacaaaataataaagtatgattagaatttatttaacaattta

SEQ ID NO: 298784 - DNA, 1452 bp, Cannabis indica
caaaaatcctaattagccttccctaaatggactgaaagattctcaaagcatatgagtataaatttctattctacagaatgaacaaatgtagcttcataaactcatatgttacatatataacccattgccctggaaaaacatgtcttcatgaatacaattacagccaagaatagaagacctgctttcatagggagcaacaaaaagttcataaaaatcacttcattggtgcaagaatggtatagatcaaaagaaatgtaactaatacaattgctcccgcaagagtaaaccctggactagtccataacatgaggttcgacctctctgctcttttgatgggatcaacttcctcagacaatgggtaatttgaacgtctaggattccagctcacatacttgtttggcgagaactgtgagaaaagggatttcttcttccccccttgctttctaaagcttgaccaggccttgtcccaatccatagagaatttgtcatctgatatagtcaagggtaagcaaaattaagatcattcaaaaacttatttcaccttatatacttctctctgaaagtgaaaaagttttcatacagatgataaatgttgctgaattaactttgcataaactactgatagaaccctctaattctatcaagagaatttggggagttttagcactctcccaaagagcatcaactctcaaaacaaaatcacacaaaacaaaatcccccattcttttcatcttccatacaagtaacgaacattcctaaccaaataattacaacaaactatatgagttcattcagtaaacataacaacaaatacctagtagtaccctattacaaacaataatcaccccattaattgccttttggtatgtgcctataaactacatgaacagtaagtcagtatacaatagaatgaattcataaatccatgtgcatgtaatgtgaggcagattcatgaaccagaaatggagaaattcataaatcttgccgacataagtccattgttgacacagaaagtgtagatgacttttccaaatgggaaacattctaaaaagtgggaactcccttggaaagtgaataaggggcagggcgacttgaggagtgttcttttctaaagactcttctcaaagcaatgttatataatattacctcacatacaaggaagccatactgataagtgataacagaccagtcaccagactaccatgcaagagattttcttggggaaattgttggttcaagaacatcctataacgcatagaactttttttaacaataaccccatcaagcaagcaactgatgactaatgactaactgaaaaaatcaaatgggcaacactcccccatcatttcttcaaataaagctaattcagtaactatttacataacccattaagcaatggatgacttacaacaaacccatttaccaaacaccttacctactctgtatcatttc

SEQ ID NO: 298785 - DNA, 1153 bp, Cannabis indica
tcctatcatgacaaattaaccaagacatacaaacgaacaattccaaattggcatttgtttaataatcagaaatatactaaataattaaatcataagatataatgtgataagagcttgtatgataagagtaaaaaaagtgtacttttccagagcttcctgacactattgcaaaaaaataaggcatgacaaatgtttttcaactcgttcttacatctggaaaaaaatgggataagaattagtttgtctttgatggaggttggaaagggtaggaagcgtgtcctttgtagctcggtaagcaaaatgctttattttttaaaggatgttaaggtccaaagagtttttcaccaagcagacggttgggaatttattggttcgtgtcgggttaaatctttggtgaaactaaggtgacatcttgatttgacagtgtaaactcctgaattggtatgttgccaaataagagaatcattagtagggtgcaaagggaggagaatagtgaggatatcattaacaatatccgtcaggaaataataagataggtgagaagagtttaaggacaaattatcattgatgaaataagcaacctgcctaagtggactatgaatggtggtcatgtgtctaacatttaggatctagtaatcatgcacaaggtcaatgctttggtcattttcaattgataactctatgaaaatagagttatttaactctttttgtgcattaaattagttttgttctcaaacagctttagattattttagtgactttttattagttttccttagtattacatagattgtaagattaatatttttcatattatttttaattaccttttgtgaattttaatcattttatttagtttttcattaattaattattttgtctcatctaagtgtattcttgtaggaatttgaatgacaattatggacttagtaatgggccctatattatgaaaagaaagctacaaacacattaactaatgggccatgtgtgggcttggttgaacaagaaaataaaagaggaaattacactctataccctttttatattgtcctcttttatttttactctcttttttaaagtctatcatttttatcgttttttttaaacattgtaccaattttgtccctgtcacttcaagatactctccatgtga

SEQ ID NO: 298786 - DNA, 3692 bp, Cannabis indica
aaaaaaaaaaaaaaaagtaatttagattttcaaatttattctttttcatctttagttaatcaacgtacgactggactacgtcgtcaaaaaagactcaaaaattcaacttgtgatccgcaacacatcttaatttgattctttttctactgatattgattttgttcgtacgttagttaccaaccaaagtgttttgtcttgtctctcaaagtagttgattataatttatattaatccatcattgtgagctaaataacattgcttaccttaaccacatatctcggtattattattaattatgttaaattaatttgacattaaaaattacatatatatggtacaataatgtaataagttggtggtggtgttcagggttgacagcagacacaaaaacaaaacgtgttgaagcctttgcacttctaattaattaagtaaaagtaaataaaaaattactaaaataaattgggtttattttatttttggtcaaaaaaatatataagtaaccgacacagacaaaaatgatgatacttggcacttggagtactgcttcaatggaactacatgctactacagtactattattactgcatatatatcttggtgtgccacttacaatatataaccaacaaatgcacacatctacactgcatcaaaggatgtgttctcgaaggaaggacctgcattaactttggtttaaaaaaattattcatttatatataataaataataaatgtgtataagaagcggatcaaaaattaaatatgttggaagcagatgttgttccgttccatcatcaagtaatataaaatataaatcatgtaatattatttcttacttcgacagaactaaaaatatataaatcatttcataataggatagctgggaccactgaaaataagaaatacattaatcaaaacataaatatttatgtatatgtataaatagaatatttgaagaaatattacttttaatctcataacaattacgtttggtaattaggggtgttcatcgaaaatgtcaaaactgattgaatccacgaacgaagattcattatcctttagcctaagctcaccactatagtttaatcatttatataatcaaacattgtacactatatataaatttaggcagcagcaattttacagctataataatttttgtgcgatgacttccttttaaaaaattgaaaacgaagtaagaatacaaaaaataaaaggcaaaataataatatttggtcgaacaagccaccacaaagtaatctatgtggttattttcctaatttaatatttttatgttgttagtttggcaaatttcttgtggagaagtacgaatgtacgaaagtagagaaatctacagtatgagtgtgtgctcttccttagtttctaataatatatatgtgtttgaattttgataaatgtttcttacacaaagttagtgtaactctctaattaggtacgctatatatcgtgatatcaatttattgtgcactcatgtattaattaaagggtttattaaaaaatttgaataattttcataattaaattttaattttaaaatatataaatactttacatagtctgagatctcgttttaaagttacaaccgttttcaaaatactatagttacaaaagttgtcacctagtgacttatcaaaatgaagcatgttgtcctgaagatctgaacacttcaggtctaacaaccccaatattccgcatttgctatgcctttacctacacgtgtaaacaatatttgtgaatcgatagactcagtaagaaaagtataatcataacataaacataaaccatatcataactagacgcccatacactcaattataattctatcccgcatcccatgcgtattgagtttggaacgtttcatacgacaatatgattgaccataatatcaatctatactcgatactctagtcatactgatatgataatgtcaatcatactttgccaaacatatattcatcgatattcagtgcaactctatgtacactaatatagctcttactgatatgttatctattatagacaattataaaacatgcacgctaaacatatatacatatatgcaactattatactagtcttaccttgattttaaattcaggtgtgtcggtcaatgtaagtggaaactgctgctcgacgatttataggtccctaagtcacaacatacataaaactagtaagtgatacgctaaataacttttcggaaacttaaacttaaaactaaaagttttcctattgactaatagcgtgacaatactctaaatatcgagaaaatactgaaaacacaattttgggaaaaatacccccaaaaatgacaaactggttcttaaaaacggcagaccatatttcctggtatctacctgctaaaaacgataaaccattttaactacaaaattcaaaaatgtctcatctctcttagaaacaattgaatagggagaaattgataatagggtgaaaatcatattaggtcataatcaatagaaataattgaagtcgaagccctagtttttattaactgttaatttccttattagtttaattgcttattcttacactatttttattttctagttttaatcctttctaaatttttatttaaccaaatagaagtaaaagtttaattttaacgtacttaactgcaatccttgtgggatcgacctcactcttggtgagtttactacttttcgtgtacaaaattatcacaacaagtttttggcgtcgttgccggggattgatagttaatattattaaaaattaaattttgttctaatttggtttttcttttcaattatagtactaattttgtttgttttagaatcttatctttttcaggtttaattagtttatgagaagtcaaggtgcaactgacagattacctgttgatcctgaaatatagaagacttgtaaaaataacagaagaaggaagaaattggaaaaagctgcaattagattgaacaagaaggagtcatggctgacaatgccaataatggcaataatggaggagctgtagaagaccaggctaatggtcacaacaacaccgtagcctgagggactatttgttgccaaacttgtcaggggccggatcctgtataaggccacctgttgttgacgccaacaatttcgaaatcaagtcagccatactgcagatggtccaatcttcagtccagtttgggagattgccatcagaagacccaaacatgcacctcggcaacttcaaagagctttgccagacattcaagatgaacggagttagcgatgatgccctcaggctaaggctgttcccattctcactaagggagcgagccaagagttggttggtatctttgccatccaattctatcaacaattgggaggaattggccctgtaatttctctccaaattctttcctcctgagaagatcgccaagctgagagctgaaattaacaactttacccagcatgacaatgaacctttttatgaagcctgggagagattcgaggatttattgaggaagtgtctgaaccattgccatgaaaagtggttacaagtgcacaacttctatactggattactgaacaacacccgaacactaatagatgtcgctgctggtggagctttcgtgacaaaaagtgctaatggggcctttgaattacttgaagatatggccataactaatcaacattggtcaacagagagag

SEQ ID NO: 298787 - DNA, 1815 bp, Cannabis indica
aatcaattcggacttcaataatatcaataatattaaatgagaaattaagaattaaaaaaaaaatactattaacatataaatgagatattttaaccataaaataaataacttaattggacaaaaaattctaataatttataatagtaaaataaaatttaaatattttattaaatataccaaatactattttgaatgttgagactgatagaaattataccagaatgagtctttaaagaatatttatcaataaaaatttcttataaataggtaaatcttattttggacctagtattttgtaaaaattattaattggactttgtgttttattaaatgataaaatagataatgtattttcttaaaaattgtacaaataagatcctgaactgattttttgtcaaaataaaacataatactgtaataatctgatctaaaaatattatgacaaaactggttacattttttatatttgttcaggttagaaattgtcttaaagttggttacattaaaaaataaattgttaaaaattgagtttggggtcttatttttaccattttagaatatatatagtttattttgtcatttaacaaaacagaatgtccaattaataatttttacaaaacactgaagaaaatatttaccatgcatatataaagaataattttgttgtagttagtttagttaattatttgaaagagaatttttttgaaagaaggaaaaaaggggtatttttctaaggtgaaagaaagccatcagtttgaccatccagattcaatggactcaaaaatttggtctaaaagaagttttctcttgaacacgtgacaaaacaaatggatcatttcaagttttcaacccctttatttgtacacgtggattaatatacaccgtccattctatttctccacaactatatatttaaaccaaaaccaagtctagtactacacactctcacatttttaagccatgcaaaattttcatacaaaatattagttatatggataacaactcctcctcctcctcctcctcttcaggggtaaaatatagaggtgtgaggcggcggccgtgggggaaatttgcggcggagattcgagattcgactcgacatggggctagggtttggcttggtacttttggtacggctgaggaagctgcacgggcctatgatcgggctgcttatgctatgagaggcccattagccattcttaacttccctcaagaatattactcttcttcacaaaacaatactactacccaatcatcttcttccacgtcagcttcttcttcaatgcaggtcatcaccaccggtgacagtagccttagtagttttaatagtagtagaaataataacaatactaatcaagttattgaatttgaatatttggatgataaacttcttgaggaacttcttgataattatgatgatgataatcaacaaaaaataagtgagattataaatatatatttacttctcttttcttttttttttttcttttttatttttacaaaagaaaagatttttagtgttttttttttatgggaaaatctcatacattgtgttgttatatataacaaatgataattaaggttattttgttttgaatttagtgtaaatttgtgtgtgaggaccaaattatatatatgaatataatgcaagtaagccacttagccacatatatatgttttggataagttgactaagtcttcttcatttatatataaattaatgccaattagaaattattatcatggatgggctccatttctttctttctttttcttcttcttcttcataatcattttttatttgtattttttttt

SEQ ID NO: 298788 - DNA, 1167 bp, Cannabis indica
ttaactcaacttttacatctcacacgattatacatcaagattgattacctatatcaaccatagaattataatgctaataaaaacttaaaaatttcttaagtttgaacaagttccaggctgaagtgaagaactaaaaccaagaaccgatcttgagagatcaaactccaaaaagttgtccttcaactgatgcccccctaagactattgaagttgttgcttttactccaccatctacaaaccccaaacacaacgtattcttgtcaactctcaccatcgaattggcaccattgatattccaactcagctttcccattctccccgataattccagagcgatcaacggcacccttggtcccaactttgtccaacgaacaccctcgacgctaaaacacgcgccaaacggcttcacggccgccgctctagtgatattcctcgccgcggtgctctttacgaaagcgccaaccacagccttgtagactgagctgtgaagaatgccgtaaggaactgtggtagagagcttagtcgagccaattattaccgtctgtgaatcgaaatgaacgacccttttgtctatcttaactgatttcacatcaacaaagtactcgttagacgtgggcgacagaacgagtcctgtaaattggagcaaactggatccatcaacaccaccagcgaacatgtagggcccgggtccgatgaagaggtctccgaatccattgtcattggaagaaggtaagcatagagtgaatttggggatgatattgaatgttgaggaaagccgattagtcaacgtgtttgacgttcttccaaggccaagtattccattattatttctagagtttgagtttaggcaagaaatatccaagcgggtagagtttgtgtcggcgtaaaccatggtgccatctgttttgtgaatggtaacaatgtcgtcgcttagagtaccggacgacaaagtacaagcccctttggggtcacagacaccctttaagttttgacactttgtggatttgcatgggacagagcggagcgtggatgaggaggtgttgcagggcaacgataagaagttgcctccgagatcgattagggggttcacattgtgtgaaggagttcctgattggaaggaaccgtggtattggtgggtttttggatctactgagatggcaatgtggaa

SEQ ID NO: 298789 - DNA, 5280 bp, Cannabis indica
gcataaaacccaacagatatctcctttgatacagaatttagaatccaagagattacaatatttttgttacgaatccaggcattatacaatacgtgatcagtgataggaggttttggaatagagcaatcaagaaaaccaattttgttcttgacagaaatagaaagttgcatagctctactccaagaaacatagttatcttgaccagttaaaagttaagacacaagaacattacctggattgtctccgtgatgaaggaagtaaggattgctaggatcttccatgggatttttaacactgttgatctgagattgttgctctccatactaaattggagtctaaggagtttcaagaactctaacaagtcgattatcagattgagtagaaatctgatcttcatcagccatggaaagaaaagatcagaaaagaaagcacgatgaaacagagtatcgaggagaagaaggatactcgtcaccggagaagacgatcggagaggaagacaaggatcggtcagggaaagctcctctttccatgctctgataccattttgcgaaagagaaaaacagagaaaaataaaatgtttttattaattatcaatagaatacaaagttacagtttatatagttgagtaagaaaaatactagctgtattcataacagaatatagttggaggaaaagggataagttagttagaaagaataactaactaagatacaaacatgaaaaataaactatgtaaacttaataactcactagataatttcttaaaatagatcttcaatcagcctaggaatttctatttctgtacctacagaaccgtgagcagtgggactttctttttctcagttttcttcataagaaatctgatcaaacatattaagaagctagatattcatagctggatacatagaaaaaagatgagtgatcaaacttaccatttataccttattatccataaataaaaagctagaaatatttccttgcatatataaattgatcaatataaaaatatgaaaaccaaataacaactcacccaaaattaataaataaataatataagatttttatctaattaaaaatgctaaaaataaaattaacagatataaatcatgctattaattttttgagagagaaaactaaaaattttcgtttatgggcaaattagacaataatccattacatgataatatatcactcaaagagcagaattaacgatataggcaatccatgtcgtttacaaaaataggagtgttaaccctaataacaccttcaagtaaaataccaatcaatcgtcagcattgtagcatcaaaaaagtgcgaagaatgctagatttccaatctaaatgaatatctaacaaatcacaatgtcaatgactattagccaaagatcttccaataaaacttgagtaataataaccctattattcaatctagaataaaaaagaaatgaccaaatgaccaaccatagcgaaaacaatctactaattacacaaatatggtttaagccaattgagattccccaaatatctcaaaaagaaataagactaaaatcttctctcataaatgaataaagtcgtactaccataacaataataaggtggtgtaacaataacatattaaaaataattctatacctatgaccactacagtaatttacttttaaaaagtatctctttcatacaaataaaaaatatcattttttttaaataaataaataaaataaaatatatttaacaagagtagagtacccctaaaaagaagattagaagctaatttaagaaacaagatcccatagaacttatttgttttaaattctatccatcattcaataacaacttagtcttttcttttaaaaaaaataataaattacacaatctcattaaaaaaaaaaaacctatgaaacaataactttattttattatctacttttgccctttttattcgaagactaatctccttattcctttaaaataataataataataatctctgaccgttaatggtcaaccccattggcgggtaaagttgttggctaagggttttgattttgagttaggtctaaataagtagtggtgggtcatattctttggttggtaattaagatttttccaacgtgcacactgcacactaccttattattattcacttctataattctatcaaacaaaaactagatattcattccactagatataaacatgttcattgacccaaaacttttttttttttttttgtgtgtgtgtgtttcaaagccccaaaaaccttagtttaaaatcactttcagattagaaagtcataacagtgtgttacataatacatatatccgtaattatatgaaaataaataagttcagattgtactttacacgatttttaggattttagataattaataaagaaaaagtttcaacaaacgcggttcttctaaaaaaaaatagtttcaacaataaaattataataattactatatttgaattgaaccaacataataaaattattagtttttatataaaagagctatggtggagtttattagttttaggaggaacaatatctagagagaaactatctttgataagtttatgtacttttcctatttcagaagagataaatcccttggtttatcttcaattcaaagtttcaaacatctcttgttaacccagaaagatctatatctcccgatttgaagtttcttcgcttttctcccttctggggattgctctcgataggcacccctcgatgcttagatgcaggtgaagatgaggaatccccatcaaagatgcgtggatccctaaatgcattacagaagccatccctcaaatcctcagcagcttcaaagaaacggccaatactaccaaacaagttccgttcaaatgtgtcaatatcatttcgtagccctggaaagtcgaagtgttgtcctagtgaattaatgtcattgtgtagaccagggaagtccaatgatccctgccctgatgaccctaagggagaagaccctctgagcacttggtctgtgacatcgtcttcagtgtactccttgtttgattgcacaatttcaggaggcctaagagaaagcaaagcaagtgtgaaagcagattcatcatttataaatccacaaaaacacataatctcgtaaacctatacaaagatttatccaatgtttatagggtgttgattgttgaatatcatacaaacaatggtaaaaaaaatgaactattaagattcaagttaacataacaattaattgaaccaagatgcttcaaacgtccaagattaaaattattatataaatttctaacggaagttatatccacaaagcactacagtaaaattcattttacaaaccatgccagcttaaataattccagaatagttgttacttgttaccaaaaactttgtaaaatatatacggaattagtcacaatcaaaaacatccaaaaaggcctcttgattgccatccttttgtttacttaggctgaagggatatgcatccaattctctcagaacacacccaacttgaagttatacaagagctcagacatcataaactctcttaactaaaacctcccatcctcgtctgcgaaccaaatactttccaatactattcactataagaaaagcaaaatcattggatgctcaaagcaccagaatttgcaagttgaaccaaaattgcttaagctaagtaattttctgaatttgactgagtaccacaatttgtgaaattgcttaagctaagtaattttctgaatgatcaaaacagtttgagtaccacaatttgtgaacatatagattcttggagatgaggctctgataggaatttcgtaacattatgatataaacagtagcaaatatggaaaataatagatgatacattgataaagatgataaagagaacaaggttgctgggtattcgagagacccagcactctcccagaactattgctcacttaacaaaataattccctaccccaaccctttctaatactctcttatatatactacctcaataccccattacaatgacctatttgccctctttatttaataccctaagacctaacaggctccagttcagaaagaattcactttctggtgaccatatacttttattctttccaacagaggatatgaataggttttaagttctctggcttcatttatttatctttccaaaggtttttatctccattattcaatgcacacgtataagactcggaattcggaaacatacacaacattatgaaaacttcttcgttcaatttcattactcataaattagacaatcccaaataaaaatttgccactaaatttatgtaataacaggaagaaccttgcataagataaaattcgtaaaattcgtagcattcatgtcccaatcaatcactcaaacatccaattaatccttaatgtaatctgctatagaattccccccctgaagtttaactatcaattcctagtgtatgctattaaactcctagctattcctagaatttgtggtatcaaataatccttctctcagtcagaagctcaaccttaatttttgtaatatattcatatgcaggtacgtaaagaatagatttttataaataaaaaccgtaaaaaaaaaaaaaaaagcaaattccatggatgaattcgaagaggaaacagagaaaagagaatgaaggtgataggaatagaataccttccaacgcaatccctaaggagttgttcggtcttctcgcacttcctgacgaactttccaggctggacctcgtccgtcctgcagttggaggtgacgaccttcctggtggtgcagctatcggcgtgggcactaggattagggttttgaaatctgggaaagtccccgggtggcggtgattccaagtcatcatctctccaaatccaacccattctcgaattttgcaagagagaaagaaaccgctaagttgaagttgagaaggagaagagaagagggttgattattttatttacttacgctcgcaaattacaattaccactccaactctcctatttatttatatctctcttttttcatattataaataattaaatttaaaattagaccaacatttggcttttttttttaaaaaaaaaaatatatcatattttcataaaattattatgaataatataaaattaatatatgaaaaaaaaaagaataaaaagaaaaagagaaatttaaatgaaatttctttaatatacgtgtacaatatttacacattaaaaatggtaataggaatgagaatgggaatggtaataggaataggaatagaatggaatggtaatt

SEQ ID NO: 298790 - DNA, 4273 bp, Cannabis indica
tttttttttaaaaaaaaacattacagacatgattatgttgtgaccactaacaatgctaccaaaacaagaaaaaacaacaatcaagataatctatccattgaacaatacaaactatatacaaaaagaaaatgattgattggtaagaaaattacaaattaaaaattatggaacacattatttgttttttttttaatctttccgcataaaatacctgaataattcgttgttgaaaacaatcttaaaattcaaaatggaaacgaggaataatatatacagtttcggatgtttaacactataaatacgagtagagttattaacactatatatgaatgtaaatgggaaattttgactttgcatttataaaactaaaatttatctcctaatctagattaggtcaatttaatttgttattaaacctaaaattactttttccgtttttcaacttacttctgtttctctctccttccattctcgctcgctctattcaagagaaccgaaccgccacgaccattgccacgatccaagaccacccgtactgccgccatccaagactactgccaccattcaagaccagcaatatcgtcaccatccaagactaccatcaccatccaagactactcgacccactaaaaattaatcggacctaccctctcaactccatttcaatccgtccgagtccaccccaatctcctttcacaccgcgaacggagagaccaccgccacgtatggagaccacaaatgcagactatgagcccacaccaatcttgttaaacgcatgcatgttaaacgccaaatacattctcagctacgtactaagggataatagccaactaagactagtgcatttcaaacgtacatgccaagtgaggtggttccccaaactaaaagaagataatattcattaatatattttttctactaatcattaattttttgaagtatctaaatgtattattttttattttacagtggtgattgcgggatatacgacattgagtacattgaacaccttatgatgagccgatcactggagagaattaatgatgataacatgacggtatttagagatcggtggtgtgtagacttgttttaccaaaacttgacttggtaagataggaaaagtttagggatagtttttttgtactttgtaattatatgctgcaaacatacatcgatatatatatcgctacatgtcgctttttatatcgcaatgtatgtcgctttatatcgctataattaagaaatttggaaacaattaataaatggttaaatagcggcataagtacccaaagttttgagtttgtaagtggcataaacccaatgatttttttagtggcataagtacccaatatttgtaaaactgtaatttttccctattttcatcagtacaagctccgttttaaatttattaaaaaaatatttggaagtaactgatactacatattttcgtccagaccaaataatctaaaatttgggtcttatatgtgtcctgtttaagacaataacagagtctgtagtaatgaaactggaagaaaattacagttttataaacattgggtacttatgccactaaaaaaaatcattgggtttatgccgcttacaaacttaaaactttgggtacttatgtcactatttacccatacctttatttgctaatatatcgctaatgttattgctatatgtcacgttaaatcgctaagttcttaaaagactttgagaacacaaaaaatagttatgtttatatgctgtgaataacatcactacatgttgctatatgttgccaaaatattgtgcaatatttttttgatgattaaaaacaaaacttgcaaattttggaattcttattgttaccatatcaataatgtcatcgatagatgtcgcaaaaatattgttaaaacatgcccagaaagtaaaaaattacaaaatagagttcataaaccatactactaatgcatgaaattaaaatactacaataatgctcaaactcgggccttgcatgaagcttcgttgtcgcccaagccgccacagtttaaacaacggtgatgttccacaactttttgcctgttaaatagatatcggttactccgtattcttcctgcatcgctcttcctttgacgacctacgggtttcttctccactggtaccccgactttcatattctgcatgtgttctggaagtacccaataatcttcctcaccgacaagattaattgttgcattgtaagtattcttctacgtctcttttgtgtaatagggggaggtaagagcatacacgctgacattttgagtaatttccgctacacatgcatgggcacaagaaatttttaacaattggaacatgtcgcatgtgcatgttttctcaactaagttgacatcatcacctctttcaccctcagaacctctaccaacgttaaacaaatatgcaccattatgttggacgcttctgaacctaccatccttgtgttatgctatcaaatcttcctcaaaattagttgccaaatgggtagcacacttacttgccttttgagacgttcactgaaccaactttgtagtgtgaaccttatgaactcaattagagtagtaattggatatttccaaaattcttctactacgttattaaggctttcaacatcgttgtttgtcattatgttgtacttgtcgcctggataataaggacgagcctacttttctaatctttttactcttaacataagcagcgataataggatccatccgttgaagcacctaaaaatgtctatcacattttctctttaaccatgcgtaagcggccagccatatttacgtgttatatacatcaatcttgaacttgtgggtgacattcatagaaatatgtttacatcatgcatagtggcatgttttggggaaaacgacctcggcatgttcaatgctttgattcatattcgatacaaatactaagttttcaacctctccaattgcttcccttaacttctgcaagaaatacttccaagagtcgtgattttcactatcaataattgcaaaggcaattgaaaacaattggttatttgcattgtacaccacaacaactaacatattgtgcccccatatgttgtgttcaagaatgtgctattgatactaatcacaggacgacaaaacttaaatcccctccttcaagcatccagtgaccaaaaatagtaattgaacttgttgtcctctatgaaaatgtctgtattagtacccgaattcttttgctccagcatgtacaagtaataggtaactttgtataagattgtacagacatacccctaacatgcataagtaccttctcactgcacctccatgccttcttataactaattttgtttccataatcgtcaaatatatccctctgtatgtcttttaccttgtacttagttccatctgatgtgtacttgttcttaataaggtggccaacaacccatgatgttgcttgacgattatcagcatatttagtatccaggttacatgtgtgttcgttgtggaacacagtgacctcaaacatgtcacaacgtgccttcttcctcctcctcactcttcatttgcaatttgaatccttgcaagttgcgtaaaatacatcggtaacttaaaattcattttcaatgcaaaccttcccactacatttttcaattcagtcttgtttgtgtacaacttaccaacaattatttctcttgaaggtgtaccactaacagaagttgtataaatattatttttctttatgtattcccatgtccacacaataggtttgaattttgtacaaacttcaaaattagatggtacaatactatgagaaaaacctagctgattgctactagtgcctggtgtttgatgtttttttactatgagcggtttttcattattgctctgtcctctggttctttggagataatggacgtagttccaaactcaaagcaggtacctctacaacttcatcaacttacaactccacatcaccatcctggttcaaatctaccacaggatcattgttgtaaaagggcacatcaaactcatcaaattggtcaaatacgttgtcaactttttcctcatctatattagtaggggcttgctcattcaaacctaccgttggttctgtttcttgacaaaactcccaataacacttgttgaggggatagttggcggggtaggccccaaaatcgcatgcctcttaaccttagtcacaaacagtggcaacaagttctccatattcatttttgcttttaattttaagaataatcttacttgactatctttcactaaaa

SEQ ID NO: 298791 - DNA, 1808 bp, Cannabis indica
  modified_base (1719)..(1719): a, c, t, g, unknown or other
aacttatcttggtcttcctgccttctcggggaggaacaagaaggaactattcagtggagttaaagaaaagatttggcgactaatccaaaagtggagagaacaacttttttcagctgggggtaaagaggttctcttgaaggttgtcgttcaatctatccccacatacgcaatgagctgctttcggttaccaataacgttctgtcatcagctcgagtctatgatgtctaacttttggtggggctcgaatgaaaatggctctaaaatccactggcgtaactggaattatatgtgtaagacgaaatcaactggtggtttggggtttcgctctttcattcattttaaccaagctttattggcgaaacaagcatggcgaatccttcaaaacccaaactccttgctcagtcagctttttaaaagttggcatcatcctcacaactcttttttagaagctcatcatggtcattctccgtctttgacatggcaaggtattctgtggggacgtgagcttctacaatctggtttacgctggaaaattggggaaggtcgttctgttttgtgtgggagtgatccttggattccaggacacagctcttttcaaccaatttcttaccatggacctgcgaatggggtagttgccaatttaatcactgagaaccgtgaatgggatcttccactcttgcaatcttatttctctgtgatcaatgttgacaggattataaccatccctctcagctactttccaacatctgatcatctcatatggcatcataccaacaacggctttttctcagtgaaatcgggatatcacaaggctgccagtattgaggaagcttcttctccatctgtttctgcaacaaagtccacatggtggcagtatttttggtctctaaatctcccacctaaggttaaaatttttgcctggcgtttgatgcatgatgcactaccagtagccaaaaatctggtgcggaaaaaagtccttactgatgcatcttgtttgatctgtcgccttgcgttggaatcagttggtcatgcaatgtttgggtgtaaatatgcacgatctgtttggagagctgcgagttttagctttgattgggttcctgcttcgtcaatgatcaatggggattacatcatacatctctcttctatatacaacaaagctgaattgagtctgatcttgtgtatcttgtggtgtatatggaccgagcgtaaccttgtggttcacggtggcaaggcaaaaactgctatccatcttgctggttttgcaggcacctattttgagaattttacagcagctcaagcaaagatcaagccccctccgtctactgcgagagccactacttctgcttcttctccatctgcttctactcggccgtttcagaaggaagttccctggcagcctcctccctctggttctttcaagctgaatgtggatgcggctttaaatgctagtcaacatattattggtgtgggagcaattgttcgagacgctgcgggtttggttgttgctgctctctctaaaccgatagttggcaattatgcttcttctatgaaatggtaagctaaggctattgtttcatagcctctcttggttacttcagatgcaaattccaattgactacatagagacggatgctttaatggtttcaaatgctctgaacaattcggctgctgcttttactgcttttgatgatttaagtttagacatttcacatcttttancctttttccctagagttatgtttcacatgtcaaacgtggtgccaatatggcttgctcacggttttggctaaatatgctctagagttgga

SEQ ID NO: 298792 - DNA, 2023 bp, Cannabis indica
gcactactgatgactctgcataatcttcaacaacaattaatcattcattccttattataatgagttattcatcatgacttataataaatgaattaaatggggtacaattcttaattagtgtctcctatctccattttgtttcttttagattggtcattattttgaccttgacagtattgtattaatttatgtggttttattacaactttacacagttgcatgacattaatcttaatgatgtccttaatatgttcacaccaagtttgttattagggtttatgctataaaaataagtatttaatgaatagaatattagagaatatatgaaatataaatatattataaatgaataagttaattatagaaatattattcattaatatcagaaaattcatatagtgtatgatcagtgacggatccagaaattttattttgtgggtgcttatttatcattcaaaaatatttatacctatattataattattcttactagatttatttaattttatgggggctttttttacgattttgatctataattatcaaatttaaaaaattacatttaatttcttaaaaggcaatatttttgctcgtgggggctatagccccaaactaatacacttgggtccgtccctgtgtatgatcttgtaagagtataaaagaattaatatcataccatatgaataaaataagtcggtaatgtattaaaagtatgtaatctttaatataaaattaacaactatggtttattaaccactagcaatgtaacgccccaccttttgtaattagacaagacagtgaaagcttgtgtaacaagtaattgattagtaatatgataaaattaagaatttttatatctatttgtttttggtaaatcagaatcatgtattgctcaaaaaccaaccatttacacctatacatcaccttgatttaaggtgaaaacaaaaaaccaatttttatccttgtgttaactcttcaaggaattacatttctaattctgtgtttaatctcattttgaattcttttgacagtcacctttagcgttgggactctttgattccaataagcttcattcttgctctgccacacttggtatactatagcagccacagttgctgcttatacatgctttttaaactttgacactcaagcctttgagattcacttcagcactgtaatatttgacgtcgaagtcctccaatttagtcaatcattaacttattgctagcaagaccaactaagatgacactcaaagaataaatggtctctatattctttacaagcacagaataaatggtctccatattctttacaagcacaacaaatcaaacactccttattgatcttgcttttagccaacgataatgagtcaattaaagcgaatagaaacaattaataataataaattagcaaatagaacatagagatttttgtagacatttggccctgtgatagtggtaatagctactccattttttcttgtattgacttgtgagaagagagcaaggtgtccttgatcttctttgaaagctcttaccatggttttagcagcttaagtgctctctcgaatgaataatattttggatccttaaatagtgatatgactcaactatttataggaaataattacattgtttggtttcctaaaagaaataagagataaataaggaaacttaattactttcctcaatcaagagaaataaaaagggaaactaggtgggtttccttctttctcttgttggcgcgaatctatctcacaaaatcagagatttaatcgagatttgcattgtttgaacatttaggacctatttagtatgcaggattggactggattagacatgctaatttttctattccagtgtttgggcatgttggaagtctggacaactaatccagcttaatcccatttgtctggaattatttatcccatccagcatggtgaaattaataattccatgcaggtgagatttttttaatgttttttttttaattttgatttagttaatatattttaaatttaata

SEQ ID NO: 298793 - DNA, 1230 bp, Cannabis indica
taggccataatcaatagaaacaattgaagttgaagccctagttcttattaatcgttaatttccttattaatttaattgcttattcttgcactatttttattttctaattttaatctttcttaatttttattcaaccaaatataagtagaagtttaattttaacgtacttaactacaatccttgtgggatcgacctcactcttggtgagtttactacttgtaacgatacgtgcacttgcgtgtgcaaaatatcataacagctaggttttccttctttttgtagacccatttataggtaatagcctttttttaggaaataaaagaactagagtccatgttctttttcttttaagagtcactacctcagtactcatagcattattccacataggatattgaagagcaacttaaacattgtgaggaatagtactggtaagaaaggcttttggcttggtgatacatgctttggctctagtgatcatagagtgattgttgacatgtaattgaacttggtgttggtttttgtataggaacaggggctgaagtttaggaatgttgagcagtgggagatggtgcatgatcaattgatctgataacacctgttgaacatgtgctttgagaacctgtattaccagaacctacacttttagcgttagtaccatttgaattatgggaagtggtgagagtgggtgagaataaatgatagtatttgaggtggaagtgttttaaggtgtgaacagtgagggtaagtcaaattggtgaagtatgggaggtatagaaattggtatattatgatcaggatgagattgttgagtattgggattctagaatatgcaagatagggaaaatgatgctcattgaaaataacatctctagatatgtatactctgccagtgggaactagacacttgtaacccttgtgtttgagactataacataaaaaggtacacatggcagacataaattcaagcttgtgtctgttgtagggcctagtattaggatagcaagcacacccaaatacccttagttgacaatagtcaagttgtttcttgaaaagtaaattcaagggagtgtcattattaagcactagtgagggtaatctgtttatgatcaaccttgagcaatagtatagacaaatacattccttaggaggacaaaaataaagccgtctcaaggccagtttatagtccctctgtgttgaccaataatggaggtcgtaggttacattgac

SEQ ID NO: 298794 - DNA, 3247 bp, Cannabis indica
agatttatatatctgagaagactataaattaccttagtaaacctgctattgcatagaaattgataatagagagataatcatattaggccataatcaatagaaacaattgaagttgaagccctagtttttaatatttgttaattttttttattattagtttaattgcttactctttcacagtttttattttatagttttaatccttaatttttattcaaccaaaatagaagtaaaagtttaattttaacgtacttaactacaatcctcgtgggatcgacctcactcttggtgattttactacttgtcacgatacgtgcacttgcgtatacaaaatatcacaacaatgactggtattgaaggcagagtaaagtgtagctcctgtagaagtgattcaagccaggatatttcagtagctaattgagcaagtgcccaatgttcagattcggtacttgagcgtgcaaccacagactattttttagatgaccaagcaactaatgtatctccaaaatacacacaatatcccccaattgattttctgtcatcgggacagcatgcccaatctgcaacacagtagcttcatataatcaacttatcactatacttgatgtaaattctatggtgtgttgttcctttgagatagcgcaatactcttttaactgcacaccagtgtgaagaggttggccatttgagaaactggcttaatttattcacttcaaatgcaatatcaggtcgtgtatgggtgaggtactgtaaagcacctatgacgcttctgtattgagtaaaatcccttaattcttccccatcttgcagtgacagaggttttcctcctgtcataggtgtattacatggtttgatattggtcatgtcgagttttttgagtaactcagcaacatatttaccttgtgacaggtacattcctgttgcatctcgaaacacttcaattccaagaaagaaattcagtgttctcagatcctttaaggagaaggttctattgagtttctcaatgaagctattcaactcttgtgtgttgttccctgtgatgactatgtgatcaacataaattagtaccatgatgacaaatttctgtgtcttgagcaaaaacagagaggtatcagcacgagagttgacaaaattccacttgagtaaggtttgcttcagttgttcataccaagcccgaggtgcctgcttgaggccataaagagacttcaccaatttacatacatgattgggcttgttcttgtcttcaaacctttgtggttgttccatgtaaacctcctcctctagctctccatttaagaatgcattattgatatcgagttgcctaacatcccagctttttgcaactgcaattgtaagcacaattctgatagtagaggctgtaatcacaggactaaatgtttctccaaaatcgaggccaggcctttggtgaaacccttttgccattagtcgagctttcaacctttggaaactcccattagcattgagtttttccttgaacatccacttattactcacaatattcatgccatctttccttggaaccagaatccaagtcttgtttctgatcaaggcaaagaactcttctgtcatagccttattccacccctgatctagaagtgcctcttgaactgtaagtggttctgctgtgtttttgctgcaatttattctgagttgtataggcctttggcttggaagccccgaattttgatttggtaatcatttggtgtgttgatttgtaagtaacatcctttttccggtgtggtaattcagtattggaatgggtctcaaactctggtgattgatggtcagtagcagcaaacttagagaaatctaagtcaacaaagaggttgttagaaatatctacctgatttgtgggtgtagaacttggcattgatgatagttgtgtcatgagactgctcagaatggtccagatcagcttgagatgcagagttgtgtgactgagttttagtttctggtgtggcagtgagtgggtgttcaggatgagtttcagtttaaagagagtcaaaaggaagttgaaaccagtcacttggggattggacagtgacttcagattccttttggtaattataaagaaaacctgacttaaaggggaactctttttcattgaaagtaacatgtctagagatatacaacctgccattggagcttaagcacttgtatcctttgtaaaaatcactatagcctaggttgacacatctagtggagtgatactgaaatttttgagcttggtaaggcctgagacaaggatagcatgctgagccaaacacctttaagaaggtgtaatttggttttttgtcaaacaaaacttcaagtggggacttgttacaaatgactggtgttggcaatcggttaataaaaaaaaattgagctttgaaaagcatcacaccaaaattttaaaggcatgtgtgcctgagcaagaagagtaaggcccatttcaataatgtgcctgtgctttcgctcagcacgaccattttgactagatgtgtgaggacaagaatgagagaaaataatgccatttttagtaactaaattactaaaggattggtattcctcccccaatccgttttaatttcttaatttttctctcaaattgagttgcagccatggttttaaattgaataaatgctccaagggcatcagatttggtttttaaaggatacatccatgtatattgactaaagtcatcgacaaagtgaatataataccttaagttggtattggacatgactggggctggaccacagagatcgatatgaatcaaatctaaaacatgtttggctctatttgcagatcgtgtaaaatgtaatgcatgaaacttgccaaattggtaggcttcacaaaatgttaattgatcattgattggcatttttacattagtagttcttaacacttgactcaaaacatgaggtgaggggtgccccaacctcctatgccatagatttttctttgaaagaaaatattgacctacagaactaacagactcactatttgttatttcaactaaaccagaaaaaggtttgacagcagtagctaaagacgactcaagaatcagttgtttattatttgatgaagacaagcttgcagagggcatattggacctggttgtggaagctttaagctgatatagaccatctctaagcctcccttgaaggaccgccatatttgctgcctagtccttcataaaacacacatcagagaaaaattcaacaaacactttattatcagc

SEQ ID NO: 298795 - DNA, 6525 bp, Cannabis indica
tttttgattgcagattgtgttttcacgtccaggcaatgtagctgcatttagcaatccatataaaggatttccttctgcacatggagatgaatataattgattatgattttgcaattgtattcttctctttctttcattttgttttgtttttttacccaaaagcttcttcattctttatatgaacctcattttttagagacacattgttttatttgatggtaaatgttagaaagattttgtcttgcatgttatcttaaattttcaaacaaaatgaatggaaccaaatattacaatattcaacacagaaggattaatatgccttaattttgaccacataacagtatagtaaagtaatgaagacctgttattgataactaattgggatcttagaactcttcttgtctcatctttttaatatttataatgtattaataaaaagtaaaaattatagtgatatggttggaacttgcttgtgaattgtaataccataatttgaggtaaatttggctctaaaaaaaatatatttcaatgttatgtttggtctaaattttataatagtgttccaatacgttaaggataaaattgaaccatgtaaaaaaatcatcaacaacattacatttttattgaatataaatctttttaaatatgttattacatgtaatgagtgagtgagaaaagagtaaataaaaaataatatgtactgagatgtaaaatttaaaccttactatattttgtactaaatttgacaaaaattttaacatttgttaaaattaaaccactttatacaccactattaaaatttagaaaattgactaaaatatgtatatgcacacaacacttttaacactccaaatatgataagtagcatcatccatgtaaaggatagagccatgcataggtgtgtgaaaggatttggagaatgaggaaaaaggaaagagagatgaatatcatattttcaaagtataaatagacccaatcaaagtatcaaacttgtcaaaactacatatcacatagcaaagttgtaaagattgagcttaataatattgtatttgtcaatctgaataaacaagtgagaactaaacattattccaagccccaaatcagcaaaatattctaacccaatttgcatacctatggctatgatgccattcccaccaccaagtctacttcttctcaccaactaaacttatatgacatgagaaactaatccatggagttgagaagacataacatgatataataatgaaatcaagattaaacagttaatcctatcagaacaacaatctttctttcatcaacttctgaatataatttcttgatttcacctaatcaacccgaaaaactgcagttatgtctttcacttcacaagaagatttaactaaaactagcactactactaataatggcagtcgaaaaagataaggcgtagcaagagagccaagaagcagaattcattttagcctacaacaatagagtatatcagaagatctactacttcattccaaaattttatgacaagtgtttgtaacacctttctgatagtctaaacatttagatccatatccaaggatagctctaggtaggaactaaagacaagtcttatacaatcaaattctagaaagatgcagcattttgctgtttgctttactcaacataccgtaggctgttgtcctcgcaaattccatcgggcaaacagaaaagcacgtgataagaaaattagtgacttggaatgccgaggaatatgcaaagtttcacaacgttggcctggctgaaggaatgaattgtctcatgaaaaagcataatttcaactgaacaaactcctcaatattccatccattctgaacacaaccccagtgaagatgcacccactgcgaagctcatgttcagccatgagtggacacttcattcactttagaacccgtgcacctctcctcctgtacaacacaagggcaaatacagggggaaaatgattatgccatcgacaaagtgtcaactaccattaccactattgctatcgctatagctatagctacctactacgaagtgatcagccgataagctccattgctacaggtaaaaaccctcactacaattctgctttcctactcccacatgaaaacaggcataactatcgaatatctcaatgcctaaataattctaagattttgaacagacaacaaaagtaattagtagcaagatttcagcagcaaaatactcatatgtaattaagcaaacataaataaagttatataagctactttagcttaaacactaggagcaagaagaaatactagtagacaattgtaagcacgccaaattgaaactacactcagcaggaaatactaaataagaggagcatctacgatgctctaaaactataaatttattatagactagcaaaatagatactgcaatctactaggattcaagcaatccaaccagtcccaaagagtattgacatccaaattgaggctgctgcagctggccatgagaaaccacgacctcacgctgctgatccattaatgaagattcaataaaaacttccaaccattaaaattactgttgttgagcttgtcggggctgaccgctgccataaccagcaccagcataaccagattgaccattggtctgtggagctccataatttccagatgcttgtgatggatcactcctccatgccgcatttccatttgcatcactatagccacctcctaggtaaccaccaccacttccttggagatcaccactaccgctgtttggaccactcccagaacgccctccaacagcaccgtacccagcagaattcccataggacccgtcactgccaccatacccactgtagccataaccttgagtcccatatccagcagcacttggtgattgacctgcaggtgcagaaccattccctgcaccagttccactgcctgtaacgccccaaggagcagtattaccatagcccatagcaccatatccagcaggattctgtccgctccatgaacttcggccacctggtggaccacttccataagcaggatttgcggcattaggattcccataggcagcactagctgggctagtatagccagtatttgcactagcataatttccataacccccatagcccattccattatttgaaggaccataaccatagctaggcgcaccataccctgaagagccataaggaggaaaagcacccccagtattctgaggttgaataaatctgctggaatccatacgtccatcatacgaattttgattgccaccagatgcaccatatccttgatagccgccgccgccgccgccgcccatggaacggccacctccactaggattggcatctttaggaagagctcgcttcacttctacttgcttaccatttaaatcatgaaatgtcttatgcaaaaccctatcaactgcatcttcagaatcaaaagaaataaatccaaaacctcttggtcgtcctgtattttgatcatacataactactacatcagttacatgtccaaaggactcaaaatattcacgaaatccctcttcagataaagtaggaggtaaccctccaacaaaaatcttcttggtcctcatatttccaccaccgccaccaccagcatttctaccaggattaggatttccagatcgtgcagacgtttgttgctcttctcttgataaggccttcttagcgtcaacctgaaacataactgataattagagaaaaaaaactaaaactatacatcaacaacaacaacagagcataggagcatgcttcaactttcaaatcagatcagtaaatggtaagcaaaattcataaagtacaaaactttaagactcggaatgaaaaatgaaaactcccaaaagaaatgcacgcttcaaatccaacagaaagaaatgacagaattgcattgcgagctaaataaaagttatggacaaacttaggatccaaccacactccaccattgagtaacctaaaaaatcaatagtgctgaactacaagcgcaattaattaacttcctcagatcctttgtaagaaatctatccaaaacaaccaaagcagcaatagcagcattaacaaatgagctaaaccacttagtttcaaacagaacactaaacctaaaacaactccagaaaatggaaaattatcccagcaacaaaacatgtcaagaaaactatacagaaacaacaaatgaacaaaacagatacttccataaaatcgtagaaacaacaacaataacaaaaccccccaaaatgcccaaaaccaaaaattgcatcggaaaaaaaaaaaacaaagacccatcaattgaaatccacccaaaaagaaatgagaaatttggtaagaaaaaaaggggggtctcaccgttctaccatcaatggtatgagtttcctgaagaaccctatcgaggacagagggatctgaaaaaacaacaaaagcaaatcctctaggtttcccagtgaacttttccctcataacaactgtctgcaacacttcaccatagttctcaaaatactccttgagcttctcctctgtggtttcccatgaaatcccaccaatgaatagctttccttgatctgaatccattttatcttttcaacctatttattccccccccaaaaaaacgtctcttttctccttcccttattggttctgagattttcccacctccgtatttggagttctgggtgttgtgattcgaattatgagtatgaaaaaggaaggaagaagaagaggacgagagggtttgtggccgactttcggtcgagagagagagagacaaatgtgaggaggtgaagtgagagagggcatatacctctgtgctttgacaactcaagttccctttgtgaaaaaaagtattcaatatcaacggctggatttgattgttaataatgcagttgatgttgattagagatggacggctgtgatttcatttttgtttggagtttgtagaagcgttagaacgtggtcgtcaaataaggtacggattggtaatagtgattggctacttatcacgtgacacgcacgagatagtgacattttctttttctattttgtgtttaaaaatataagaatgagaatctagaatctaaatttctaataaacaataaataaaatagggtgattctacaatacactcctcgtaaaggagatgtactcatgcatcctctacttatttcggtctttagaaaaaaaaattagtctaattttttttcatatctatgtctttaagatatcatacaaaattttgataaattcggaatattttacaatatagaatataatgttcaaacagtctattttacacgcataaaaaataaaatagtcacgtgtgcaacacactgtttgaatgcaatttttggtgtcttaaacttttctgaatttcttaaaattttgcaggatatcttaaataactataatatacatgatcatgagaaaaaatttaactaaaaaattatttcagatactaaaacaatagagatatatcagtgcatctcttttaaggaggtgcattatagaattttctaataaaataatattttttaagctaattaagaattttaacatgtaccaaattttttccccttaattttgtaggcctttaaaaagagattattggattaaaaaaattgtcaaattttactaacagatgtgcgatgtggatgaaaatttagggaacacgacttggtacatatcaaagttgattcgatatatatagttctcggagtataattttgcacatacacacttgtcacattagtaaaatttaacgaaattagacagatttcttttaatttaacaatctcaataattctatgagaatttttaacagcctaacaaatttagaggtgaaaattctaactagtttttatttttaataattgttagaattctaattagtagctttataagaatagtttttgataaaaagttttaagtataattattttattaaaataataaaaaattattccaatgtaaaaattgcaataatttttgttgtaattaaataaatgaatagaataaaaataaatttaattttactctattatcccccaactaattatactataatagtactttaataaaatataaataattgaaatcgatgtaaaaaataaaagtaaaatgggtgagaataaaataaaaaagaaataaaattattatttgtgttatattatttattaaaattagtagaaatgaaatcaaaattattttctttaactttacttattttaacttatttatgttttgaattactaaatcgtcttttttgttatacatcaaaagaatagataagagttgcttaaatataaatatttaagtaatacaatttacacaatattaaatcttgaactaggttcgagctaaaatatccaattatgattataccacactaacttgagaataatcacatgtaacacaataaaagcaaatcatactatataataatataagtctatggcatttttacattaaaatgtatacattttttttaaattaaatttacaaaaaataagtgcaaaaaataacaa

SEQ ID NO: 298796 - DNA, 2905 bp, Cannabis indica
atctccaagtctactcccatcaactcaaactcacatagcaaacactccattaggtgacgtttggctggaagaaataaaaacacagctagaataagaatgacattccaatacttaaaataaaaccaaacaaatgaatggaataaagttgtttcacttgcattccattccatttcattacctccaattgaacgccaccagaaagttttcctttgtttaatttgtgattcttttgacttcttatgttgttttgtcttccctctattttcagtattcagattgcattaatttgatgtcattagttaacaaagttgctatttttcatggttttttttttggtctgggacactattctgcatttagatttgttttttcacttgtatatactagtgtgataataatgatgtttggcagctataaaacacatttgaaattcatattgataaaatcgatagttgctctgttagaaccatttggtagacctcacttcctttaaagtagcttacgagaagagggtgctcacgtagttatcaaccataaactaatcctgtacttagcctgcaacttgtgggtgctggccttggtatcatttgctgcatgtacttgtgtacaaattaatcccaaaagacttgcttatgagtgaatgatgcctgataagctatatactaatttcatactttttctatgtggaatcctaacatgccctttttgctgttgaggaaaaccaaattaagtaacttaaagaagacatactgtgtgctctctctgttttgaagtcataattagaatggttaaggtggtcaaccaattagattgctgggcatattgcttaagagtttgtcatattccttttgagtgagacttgttgacatctccctcatttgtttgcaacagagaaatcaacatgcgcctacagaaacttttgttgatctttctcaagctgtgaagaatggttctgatcttccgaataatgttgttatttccccatcattgcttcccagtcaacaaaactcattggagtctgacatgaatgttgctatggcttacaaaacactagatcacctccccggatcagctactctatcagttcctcctaacgtgcagcaaacaaatatgtttgaccctagtgggaggcatggtgttcctatgcaacctatgcaggaatctgtttctgatgacagtgaagtagatcctctgccacaaccattacctgaattgtggcaaggtgggcgtacaactgcaagttcactgttaaacaatgcactgagtatcaaggagggaaagaatggatctcttacaatgtcaaattcttactcccaagggtaagcattggccactagtttcatgatttggtttttaaataaaacttacatttcggcattgttttaatacaatgttgttgctttattaaaattctatttaaagtgctgtttcccatgtggtacttggcacaattacttgctgactttattttttgtggaaagatactgtatgtgctatttctaagtacagttgtgttgttgagcagggtttttgattctttgaaacaagcactgcgatcttcaggggtggatttatcacagaccagaatctcagtgcaaattgatgttgcgaatcaaacagatagtggactaacttcgattgcatccagttcaaaggtttttctcgagtcaattaaatatcagtgtttcattttagcattgcaatactttacattttacatagaaatctagaatgtaaatcgacaacgaaaggtcttagactttattcacatgcaaacctttaacgttttttatttgttttcttcttgacatgttgtttgttcaggatcacgcaaacctgtcactgaacagtcaggtaatggcaaacaatcaagtaaccagtacagatgacaagttcgatcgagctcataagaggctcagaataggtgaaaagtagtttattttttcagctgcctaattttcctattttattttttatttctttaatttggggggtggggtgattcgagttgagaggggtattggatgggtattttttttttgggataattgtacatgtgtatgcggcttgtgctatgctccaatttccatgcgcatggataaccttagaagaaagtttcagaaattcagttgcttgattgtacttcaatttgaatagacaattccatgcacatagtgaagcaactctcacatttgtaagatttattttaggtgtgatttttatcctattatgttagaatctacttggctagttggcttacccttaacacccactgagtacttcattatgtgcgtttgtgaatctgtgcataattttgaatctagtaagatggagtaaggcttatacttaatgtaccatttttgctgaaagaaagatgaccactagccacttatattcttatgagaataaagttcagagacaagaaattttccactgtctttatgggcactcatggtgcctatacttttataaattgtcgtattgttactagtctaatttattattagattttatttattttattttaataataataatagaaaatcgctaattatttataagacgtaacctagtgggacgtgaaactaattataaatatcttaaaggttgcttcttaacatggtttactatattatattattgaatgtgatgggctatcaatgatgttataatagctttcctattgggattatttcattaaaacaacaaaataattataaaaatacggttttacagaattttaaatatttttacgatttttttgattttatttacagaaaatatgatctttttatgttgtaattttattaatttattgttgatattttgttatctgtatgttattttttgttgttattttgatgtaatttttatatagttttcttgttgattttatgttgttttc

SEQ ID NO: 298797 - DNA, 1931 bp, Cannabis indica
aataataataataataaattcatgtgtcgtggataggagggagggatttcattggtgttggggggcgtaattagacactcatgaatgatgagcacctcaatcaatttagtgatgtttttttttggacgtgaagttctttcaacttcaaaaccaatgtggactctgaaccacaggagtggtccttcccgcaggcaatcctcattccttgccaaaataatagaattgcaattactgatattgttcaactgtgataaaaaaccatgagcaaaaaagtaaagcacaggtccaatttggtggagtttttctcttcttcagtttttcagtctgtcaaaatagcaaatattcttccagcttcttctgttgtctaaatatattcactgcaaccaaccacagccaaaccagcttgtccttcttattaggaaaaggactctcttggaatcttttgaagcttctcatattacaaagggctgattactttggtcaaaactccagcaaaacttgtattggtgtctgcttcccgtgcactaattgttcattttgatgtagacaagacagccatgtctcactgtcaataagaatatgaaagaaaactcattcatcatatttctggccaacactaccagcattcaactttcttgtcattaacactgcttttcatcttgcacaaagtccaaatttcatctcagtggtaaagcttctgctagtaccctccacagagacatgccattttgcatgtagatttttgggcagccaaattttcctccaaatccattagttgtgcccttgcagaccagagtattcttcgaacttccagtcctagtagggtatccaatggaagttacaagagagaagctacttttttcataatagttctggcttctaggattcctcttaccattggtcgctggtcttaatattgctttgcacttaggatttcaagtgggcgttgcctaagttataattagattgttatttcttgattattcaaaaggtacgtctgctctctttattctttgagaatcagttgattattttttttatctgaatttccaaatcattaataattctattattagtccaagagaagtttgtacatgtctcattgttgttacttgttagtaatatggaatttcaccgtagacttggaaacatgtagcaaaacagaattatttacaacaagaatatgaaaagggacagaagaactgaagcatcagaagggtttgaggattaagcgactaaagaactgaggcatttatgtcttgggttttctagtttaaaccatcagatttgtttttgttaaacccaaatacaaataacactataattacaagatagtgacaaatattatatggtttagatgagatttaataatggataacgaatctagacagacattgctattggtcttactcaagccaatggtctaatttctatggtatcccataataaacacagaaaaggaaaaaagaaatgaaaagaacaaatattggaatgtatcgacttgttcgaggccataatcaaaacgagattaatttgataggcacggagaatcgatattatttgatatagccaaccttcaatgcaaactgcgccattttatacgacgcttttgctctgcaaattggcctctatttttcaataacataaatcataacttaacataaacataaaaaacaaataagatgtggaaacctaaacaaaaaaaataaaaatagaacaacccacacagaggcaaatcacaattgtggaaatgaagctccttaagcttccattttataagcttcttccctaaccctaattgttatgagcgagtcacaaaacccagcccatcttttacttgttgggctttattacttcacagaccttccatccacttgttagtagcacaagacaacatttaatttttttttttttaaaaaactttttaaaaa

SEQ ID NO: 298798 - DNA, 5301 bp, Cannabis indica
aaaattagactaagtatttttttgaaataccaaaatagaattaagtgcatcaatacacccattttaagaggtgtattggaaaattttccaataaaaaagaattttgagtacttttctatttttattaacaaaaacaaattaataataatgtgtgtgtaagcatagtccatcgatcttgactaatgtaagggtgaaataaagagatgtggctaagcaaagttcacaccgtccaaacaaaaataatctgcaacatgtcaagatgattcgtcatgcatggacggttgaagtttagggatacattgtaaatttatttatttatttatttttgaagaaaagatcttaatcatcaaacaccaaaagcaataagtactctaaaaatgtgggggcaaataaaatttattcaaagatcctaaatacaattaggatttgtggccaccaaaccaaactattacttgccatcaaaataagtttggccgaggtatgaacaataccattataagacctattacaataaacaataatactaacaactttgagtctattgcaaagactaagaatatcatccaacactagatgcaaagaaataataaaagagacattttttttttaattttcagcacaacactcgaacaattagattcaataatgatattgtcatacccaaaagagagacattgggacaaaacctttctaatagccaacgcttcaaccacctcgagcacgaaacaaccatccaaacgccaacttgctgaagcgcaacaacacctgaatcatctctaataaccatatccaacccattacaattactcgtagaacttagagccgcatcagtgttgactttgagactaccaagtggaggggcagtcaccaccagcaagggaggatgagtaacagtcttcagacccctgtctgttgtgaaacgttgccaaaaaatcatgagcccaatgaacagtgagagcaggagacaaatcaacactattatggaccattttattacacttgaccaaatcttccacttgatcactataaccaattcaatcatctctttcgaaagtggatcaataaatcgatgaataaagtcaagaaaatccacacaataaacaagaggatctcccaatgcaaactcatagattttcttacattgaagcagagaactacaaccccaaagagcatgataagtagtttcatcttccaacccacacaaaggatataacccatcagataagagatcatgacgagccaaattagttaatacgtacaacgctgataagtatttcaaccacttcaaacttatatgtgttggaaagatcttataataattagccaccctttgaaaataagggtggagggaaagtatggcgccctgctcggcatggggtctagacaatgcacactggatcgttgaaaagacccttagcacaaaggttctttaatcacttgtcagttagtttggacaaaggggatttctagataggccttggtttagaagacttcaaggagatcaataatgccttgtcaaactcttccttgacatagtctcccctaggcacaagtcaccgtctagagggcaacaaaggttcaccttttgcatcatatcccttattgattacaagaggcccaacctcaatgtcaatctctatctcctccttagagggctcgtgcacctctggctcatttggctctacagtagccatgagttggctgatgtgtgggtctttggccggtatggtccttgtggtttgttttgtctttgctaggtttaacttgggcgggagaagaggttttgaggtatgtcttgctactgtaattgttaaatctacctagatggattttctccttaataaagttgggtggccagaagaaaagtgtctaggacgtctggtaggactctataagtccaccaagatggaagaaattgcctctaacctctatgcaactcccaaatatgatgtgtgtgtccttatctgccgatctggtcaggataatgatggtgttgaaactcaggttccaaagaatcacttggtacttccaactcggagaaatccaaggaaagggataattcacttgaagacaagggcgagtttgtcacacggatcgttgggctatcttcaaatagtaattggagcaggtcatagtctactcgattatcacctccccagaatttggttgggttcatctacaaaaaaaggacatagaggtgagtcactgaatagatgggaaattctttttaagaagaaacatcctaaaactccgaccagagaaaggaaagagatctaacttaaataaatccgtatcatcgatagaatccttgggtaaatagattttaggtatctataaaactaaagtaaaaaggaagaaaccctaaaatccttgaaaaacagtgcaagagaacgggatgaagaaaatacacatatgaagactcaacacggattgaatcgaccttgatagtttgggttcgttttaatcaactaaggttgagaatttgaattttacagtaaataatggcaagcatacattctagtacggttcacagaacaacaaacgagaaattgtagaagtgtaagggagaatgacttactcactgctttgttggctggttgaagcttttcaccgaggacagtccaattacggttgaacaaggccaatcgctcaacaacaacactcttttcttactctaaatttttttaaatggttaaaaaattgtaaacgactgtctttgatcctatttatagggtcaccaagggggtatgatcgtaatcaaattcaaaatatcatgtttccccctaatattgaaaaattaatcattacaagggtttgggtaactatcagtgcgcaatctccaaggtgtggtttccatagtaaagcaattaatgcagagatttgaaaggacggggggagatttgcatacctcaggtaggaataatgtctccttcgttcaagcacatgggtataaatgagtgtcacctagtcatgtagtgtgtaggcataggaagtccccgtatgaccagaagttcccacgcggatttggaggaaaaatattatcccaaaatttgtactaatggcgtgacaccaggaaagctaacacgtggcaaggaaactgaccctgggtggaatacaacaccaatttttaacgactaggccagatgataccaaaacactcgaatgagctcaaggcttcacctcgcgctgagcaaagtgagctacttgcgtaacgcaagttgtcgattagaggaatcgctgaagatattttagatactttccttaactgtttccataaaaataggaccaatataagattcctattttcatgggatttaacttaacataatgagaaaattgtgagattcacattcaaatccacactgatctttctcctattatttcaggattaaatgtattccttcttccctataaatagtaaggccaattcattatttagaaggattttcttttgacgcacttacaatagagaaaatactctgaaaatatttgtaacatttttgagagatattaagaaactcacttgattgaaccttgtgatcttaatattctttcataatcaatacaacaaaaaggtgagtaggttgttaccgttgaaaggggttgaaccttatataaattttgtgtgtcgtttacagttattcataatttttattattattcaaacaattatattatcattttattgacttcgtgtcgttgactagaaacgagactaacaataacatataaaaaaggaacggtgatggtgcagctacattatacactaaatatatactataattgcacaattttacattacatcatacttcaacttttctattttcttactattgtttctttaaataatatatataaataatacatattaataaaattagaataaaatataatttaagtactattaaaatatttttagagaatgaatagattcttcaaatattgaaaagagtttgaagaaaatggagatcttttaaaatagagaatccatttatatcatctctttgatgatgactttttcaccgttcttttaattttgtttaagaatcgctattttaaaggaagcattattacgaggtatccatagtgcctagtactatggtgaagtagcaaattataattttttttttttgttaaggaaatatcacaccataattggttagtaattttttataatatttattaaagtaaaataagtgagactcgaattgcgatattacacctcacaactaggtaccataagtactctttaacatttctcttttaaaggacttatagggagttgttttttttttttttgtaataaaagatgtaaatttattaaatcatctcttgagcaattacattaagaatgctactcgtgatagaagtcaccgagtagctacaatccgcttgcaatcatcaatacaattgtcaaaaggagagatccaattgatcgagctttgaataggttgtacagtgatgagactatccgtttcaacaatcacattggaaagatttagcatctttagccaacttaggacctccttcactctaatggcctcaacaagattcggatcaacacaaccaacccaagaccccgaccgagcttgtaacacatgacatacatgacatacttgacatacttttcctcttagtatattaaaaataaaattttaaaataataattaaaaaaatcactaaaaagcatgacatacttgaacaaatgagaaaagacgcggattagtttgttgcgagtttacgacactaacttggtggcatatttcagcttcaaaaaaaaaaaaaacttggtggcatatttctaattctaataaattgtagttagttgcctattatttaagattaagaaagagcgtccctaataatatttaaatgaatagttgtattgtatgttgcggttggaggagcacaataattgaccaaagaccaattttataatagttggttggattaattataaagtatagactaatcaaaaataaagtaaaaaggtgagtattatgaatattatgtttacatacttaataaatttagtcaatattttgattgattaaaactatagactaaaataatgtcaaaggtgtgtgttatgaatattgtgtacatttacttaaatttagtcaatatttggattgattaaaagtataaaatataaattaaaaggctgtgcattatgaatattttgtttataatgtttacattttcttacttaaatttagcccatatttcaattataattagtacaacctcaacctcttcttccaaaaaaaaaaaaaaaaaaaaaaacaaaaaaactaaatt

SEQ ID NO: 298799 - DNA, 3804 bp, Cannabis indica
tacataatggtttgagacagcatataaggctcttaattcctttctcaggtctgcttatattacatttgctagcaaagagtctgttgcaaagcagtggcgctcggtggaacgacatttctctcaaggacaattcaggtatacgagtgttgttttttaatacctttttcggctcgtgcaaaatcaatagcttagttgtaagattttaatgtaggtgttaagaatgacagacacaacattaggaccaatccatcccgggaagtcttcaaaagtttcgacgctgttacctaacggcaacagtgtgactgtccctgtccaagtccccaccaaaccatattattcgagccatcatctacaatggcgaagagagaataatacttaactatacagatgacaataaaacatttagatttgattttgttaaccatactctgcagcattaccatttggattagtttgatttgttaagtttagcttgatgcatatgtagaattatcatggtttttaaataccttgatctagagagaatcataaaaaatcttattgttcatgcttaaattttgatttgtgtatataataagcatggaatgaaaaggggtttgttttgtttaacactaattaaatttctctacttcagtttgataaagtaaataaatattagttgttggctttgtatacacaaaatttacactctattattatttttgtatttaactaagtagttgcttgtagttgttgtataagttgtgatgtgtaatctttagcaatatatcaataataatttctaataaacacaaaaaaataaagagtgtatttgagggtgtgattgtgatgttgatgattaaatgtgtaagaaaagaataaccaaattatagagcaattaggctgtgtttggtgtaaagtagaattgggagttttgactcaaaatgtaaatttgtgagttgacagttgagtttggcaagaagaaaataaatattaataataataatcttgttagggatgttagctaaacttggttgtttagagatttttatatattgactgccttagaagacaataatatgattttgacacctaaatttattccaaccaatcaagaaaatgacttatattaaagtcttttttttataataaaggtgatattattgtttctgaaaatgactaattacaactcattaaaaacaacataactaaattttaatcataaattgaagtacttaacaaaattttcactacatttgttaagtacagagtaataaaatacattaataactgcatttttttttacatagcagtaagagtaaaccttaattgattagtaacaacattcttaagtttaccaattaaatgaacatgtttgttgttgttgttggaagaagaagaagaagagtacttagtagtagctagctttggttgaaacaaagaacttagcttactctctaaactgttttcggtatgcttaacatacttaccagcactagaatcttgctcaaccaaggccttgtaactctgtatgtaacacctataagttgttacaactttctcaactaaaatccctctcattttttgcctcaagttttcatccgaaatcacccaattcgattgcttttcgtagctttctttgaatgcctcattgaaagcctttaacctactaattgaaaccgaaattagactagtagtaccttttcgggttagaagaggaagaagtgttttttcccatgtttccttaaagtacaatgttgcatagtaatccttgtattgatcatgtgaagttaaccaagtttctcccatcatatcaccaagatgagttcctcttagattggtgaaatgacaatggttattcatcatgaaaaggtatgagagtgaagtgtctgagtaggcctttgaccatgaatctaaattcaacccgatttccttcattatgttgtggaattggattgagagaagattttcttcatagatttcttgtttccattgttgatttatggttaagacttcaatcaaagttgccttgtaatcctctccaagaagttggttacaatagtttgttatgaatttcacaagccttggaacactcccatcttgaggaggcgaaaattgcctttgtgatcctacttgaaaagggagttgttggaatatgtcataagcattttcaacaagtctcttgacaagatcccttgtcgggttttggatttcaatgcaggctgagctcccataaagccggttgaaatccattcttagattgtttaagactttgaaaatgtctagaagggttaggagtttgatgggatcatttttcatgttggcaacttcatttccaaattgaatgaaggaaaggattcccgattcaatcgaaattcttgcgaaacaagtcatccaaatattcgatccaatcttttcgaaagcccttttgctgagtttgtactcatgatcaaaaatctctttcaaagccaactccaaatccttactccactgttcaatgtaaatctcaacattatttgatatcttaacatcatcaagataatccaaaccaagagcttgtaatctccttttagcaattgaaaccctaatttcgacaaacaaagatacacacttttcgagtcttccattcgcctttaacctctccattatggcatgaatctcttccaatgaagatgtcaatcaaaaagctttcccaactcaatttcaagcttgtctaaggcattagagagcaaccctccttggatatgacaactctcttccattccatgcaatttcttcaacacccccgaagagtctttcaaattcatcaggcactcgtccccttcaaagagctcgaaaacaccttcaagccaccgaatcgctagcaagctgtggctgccaagaactttagtcctcttcaagccttcttatgagaaaaaggtaagaaaagagctcggtatgaggctcagaaaaggcgatcgccttttcaagctcggtaacagccttataaactcttggaattgctgctataggaccaatgacacaatcaacttgattctttactctaacatatgtagttctatggttataaacctctctaaattcaacttctaaaggaactaatctttggttgatttctctcaatcttgacccggtttcatctaactcaataccaacttgtttagacttgtctaaacttgccttgagtaaatttctagcagcttcaagattcttagccattgccaaaaatgtctctctttttttctttgagtaattcttcaaaagttgatattataagacttgtgtgtttcttttggattactcaatcactttccttaccaaactcaccaaaacaaaaccaaacctcacttgcaaaacaaacatattatagcattggaaaaaagcttcactcaacaaccaatgcttctttgaaatttcagtttagaatttagtgaaaaaaacagataattcagtccaaaagaaaagaaaatttatttaagctttaaaagctaagttattttttttttatttggatatgaagtcaagcctaaataaataaataaaaaatatttgtgtcttgtcttaattaaatgtgattggctgaaaatactgtcatgttactaagtgagtgatttagtgcatattttatgtgcataactctaaataatttagagaagattacattaattgacaaatcatcttatatatggaatatatgtatttaagggcattccatcattttggataaaaatttataattttactgttacacgcaggggcggacccacattgtagcgagggggggcaattgccccctgaaaaaaaaaatcgagaaaaaaatgtata

SEQ ID NO: 298800 - DNA, 3544 bp, Cannabis indica
attattattattctttcggctccggtccgtgtgaactttgatagcctttaaatttttatacacataatatatatacaattatacatatattttaaatgctctatgtttcgagtcgtttatggctcattatatattggtttggtcttttggggttcttttggcgtttgttttatgctgtttaatatggggtttgttcgttttctgtgggggtatattttagttacccaaaatatatttcaatcggttaatgcgtgcacatttaaacttttgattagttattatcgtaaaacaaattcacggttgaattaatggctttggttatctaataatcctcttcctattttaaggagggagtaagtttgtggaaggtgagatgggagtagttatgataagcttagtgtgatcttcagcctaaaggattttttatattatattattttcatgaaaaacagtaaaataaaaaaccttcttggtaatcaaaggatttgtctgttttaagtgtcataaatattcataatcaattaaagattagtctaaataggattagtctgtttaagtgtcataattcataatcaattaaagattagtctaaataggattagtctctttgtctacctttcaggctcattgtacaagtgtaaactctttcttgctatttaataaacaaaagtgtgagctctatttgcatccctttttctatgtcagttgatattcattttgttaattcattttattacttctttcttgttcataaaaaaatcgatcttgttgcagcgttcttgtacagcaaggcgaactgtcactcctgaaccttcattttttgattctgaacctgacttcttgttggaacgccccgggtcagaggttttcggagcaagatattttcgccatgttcgacatccttcccctgaaggtcttgctgaggtactttacttgtctagttgttctgtttttgtttataaccctttcttatccactttgctatttcacataactctcatgtttaatcaactgaaaattttgacttattctcatccatatttgtctggataaatttagttatactctgttattttaacttttaaggatgctagtagtagtggagaaaatattaatgaaatcctgcaaaattttgacggagggatgcctgttgtaagattcattgctcctctgtaatcattggtggcatcatctcatcattaacatggacttgtataattatttgtatgttatcttatgacccacgagagttacgtttgtgtggttagatccatagctcgtttccttataggtttaaattcctgacggggacttgtctagcaatatgctagagtttcatgatttgaagaaattgctggttatctttgacagaaatataattctctccaaaaatgatcttttccattttcagtttatttgcggatgacctgattgagaaataggttgtgataccacttcttaaagaaaacacactctttttttaattctgagggtaagaaagtagacttaggacataaattagtgaattaatagcacaacacaagtttgggtcatttgaaaggagatgatgatatatcttcagaaaaaagtggagattatttcattttttttattattaactggcaagtgtttattgatgaaggacataagcttaaaatttctcagttttagtcaagtaaacatattctgtggcattgaagaagaatttagtttcccaacttgctgattatctgttcaaaataaacactcagttggacaaatgtatgatttcatgatgcagtttaacttccatctcattctcatgcaagatagcttaattcaataggttgtaacgaatacaaagctctatcatttaaaactatgcatgctaggattcaaataatatgcaaggaagtcttccttggtgaagttgtttatatagttgttgatcttcattccatgattttggtcttcctttcatgatcgctatcggttataactcgtttcactataacagtatgaccacatggaatgtcagcattttatttttcctggttagatgaaaggttgttaataataaaattcaatttgctgtcagttgaaacttttatttgacattatttttctaacaaatttaatatgattatatgctcaaaaatacatcatgattcatgtatatactggctgggtgcagataatgatgctccacagtggtctgctaatgggtaacagagtagacatacacgatcggtttagggaaatgagacttgatgttgatcacatgtcttatgaggtattgttaattatgagtttttttttttctcgaatgagttgttcaataatattttcgtctaatgctaatttgaatttcgtatgttcttttggtttggtgttaaaacaggaactccttgatctgggtgaaagaattggttatgtgaatactggactaaaagaagaggaaataggtcgttgtctaaggaaaatcaagctctcgatttcaaatgattggtcacgtttgcctgtgcaagcagataagaagtgcagcatatgtcaggtaagctttcttactaaactctccagagctcttaattggttcaatatgtttttcgtttatgtttgtgtatctatgtaacatgcttgtgtgtgtacaggaggaatttgaaacagatgatgacatgggtaagctggactgtggacacggttttcatacagaatgcataagacattggctttcccataaaaatacttgccctgtttgcaaagcggaggcagtggctcgatcctagggttgggtgggagctttttcatcaccttgttgcttttctttttgtcccacaacatagtgtataggtttcatttcacccaagcaatacaagaacaagtattcattcttttgtttgatgctttcccttcctattttccttattttggtatgatgagccttatctataatttggcaatatcttcttgtttcactattttatttgtgccttctgcagccctcaacgaattcccaggccagggttttgaatgtgaaatgcttgtttttaaaatataaattcttttttcaattgaaatctactaccacgtttaagttattgaatgcataaatgtttgaaaagcttttgctgtgtcagatcttgtcttgagactcttaactaatgtatgcataaacatgtttgattatgacattcaagttggagttcgtcgttcattctttggaccaaggaactaaaatgtgtaacctattagaccacatgagtaaacaaaacgccaatttattattatttgagtcggtataaccttaaatataaatatctattaacccccaaatctcaaatgttagtggaaacattttcaaaactcgtattttattagcaatttagagtatgtttggtattgttttctgttttttgttttcaaaaaattgttttagaaatgagaacaaaaaataatttttaaagtttttaaaaaacaagttacgtttgattagtgttttttaaaaacaatattaaccaaaagtgaattagtttttaaaacacaaaataacattttgttgttttta

SEQ ID NO: 298801 - DNA, 1229 bp, Cannabis indica
aaataatttccaacacatataacttaccacagaaattctcggaatgtcccataacaccacatatgaaacaaaatgtggggactttctcatatttgaaattagcccaaaaggcttcaccgtcacgtttcctaaattcatccttctctttaaaggtttgtcgagaggaatagaaactcttacccgaagatagtcacgccaaatgctttgaacattattaggatccgaactaagaaatgaacaaatatagtttccagctttatgtaccacttgttctgtcttaaatcgagattgtaagtcgtggatttgaacctacatgtcaatggtattgagttcaaccgtttttggattatcccctgctttcagtctcttcaaaatcaagtgctttcgatcaaaaatccaaggactaccattaagaactcgctgaatatcgatctcgtgatagaattgaaacaagaaccgattttgctcgagaattttcaccgtcattccctttcctggcttccataaatctgccatcatattttggaaaaccttataatcagatattctccctgtgtgctgtttccctgcaagactccaccgtacatcaaactcaggactttcttctcccacatcctccagaatctcctcactttcttcttcttcttcaagacaaatagtatcccatctatgttctaaatctgccatagcacgactacttgatgccatcacaaagaacaaaaacaaacaaccccaactgatcaaatcaacactctacaaaagagagaaaacaaacatgtcaaaggacatgacttattgatgcacttcacattagtactccctaacgtcatcaatttttctcatcaattccttcacgcgagatcatatatagtttgtttaacaaaaataacatcaattataatatggtccatgcatggagatattgtgttccttattggtgtgggataaggaaacataaaattaaagaaattaagaaatagaatttttctctgagattccccgagaaccctatgtgagaatgactttttgtgcttggatatccctagtgaggttcaagaaggagagaaagaaatttggcatagaatgaaaagaaagaaaaatgggctatttacaaaaatatgagaaaatgaagatatgttttgatatatatggcataaaaacttaattaccttaaatattacatttttttttaaaaaaaacttacaaatatgggaaaaagtcatgaggaa

SEQ ID NO: 298802 - DNA, 2422 bp, Cannabis indica
cacaatcacattccactgtattgacaatactgtaattgtgaatgaatatatgttctggacttaactgattttgtgcatatattaaatatgtatattaaaccataaacatgtaaaatacatgtaaacataaatcacttcaaaattctaaattgataactaatcagattgtaatgggttttatttagggcacaaaacccaacagttccaactcgccatattttagtattctgtacaattaagataagaagaatccaaatccaagtcctagaagctaaaaatacacgaaacagcaccctggaagtcaacccagacgcctagcgcccaagttaacattccaactacagttttggtttctaggtccatcctaatgaaaatggctcaaaaattgtactttgacatgaataagacatgtcacagacatatttgagtcaacagaataagaatcgaagcagtttcagttttcagcacccgaggcaccaagcacccagcacccaggttgacgtatgtgaacttgaggaacttccaaccataatattgaagaagtatcttgagtatttccttcatcttcatccaaaatagggaggcaagtgcttttaggagagaaataaattgacctaaaggccaaaatagggaccgagtgcccaatttgatttaggcactaggcagaggttgatactttataaacctcagccacttccaaaagcagtttagatgaagttttccaaacatattctttgttttcatcaagaattaatatttaagtccttttggggaacaaaaagagtcatttaggggtcagaattaaaacccagcgcttaggttgacctggtgccgagcctagtgcccaagttgacactttctcaacctaggccatttccaaggagtttttcttagaagtcttttggtcatatactctattttttccaaagattaagataaaagtatttctactttaaaaagatacaagtatttttagaatcaaaaagagtcatctggttggaaaagacaggacccagcacccaagttgacatttggcattggcctagcacaaagattgacattttgtcaaccttggctatttcaaacaaatacccaaaaaaagtgtttccatcacttttttttcaatagaaataatgaatatacaagtgatctcagggagcagacgacatttcaagggagccagaatagggccccacgacccaggttctcatagcactagaagctacgcctaggttgacatgcaacctggtttgtatgttttttccccttaaacataaattctacactgggaactcttcttaaaattttccaagatattgtaggagacctctttttcaatctcaaatttcatataagtatcaaaacgagcctcgggaaggcacccagaaagcacccagtgccaaggttggcacatgaccttgtgcatggaacctgcttattagattcgattctgtttctaggattcaactattttttttattgtaaatgagagctgcaattttgtgacaggtcaaattatcacattgatatttcatccttttaatgaggtaaatatcagcaaaattgggaagttttgactctacccgatttcaccaaaaagtgctatctacaagaactggtgaacaacttctccaaaatgcagaatctaactaagtactgtcaaaatatcacttaggcatcaaaacatacaagtctagggctttttagactcacctatcatctaggttgacgtcaaaatgtcaacctggtcgttgggtgtcagcttggacgtagggtgttgaacaacctctggtaaaatagtgataactccctcaatattgatcagattgatgcaattcaactcgagttttgaatatattttgaagacctatcaactcatgtctcacactcatatcacaattctagatatttcaaatcaaaaatttgtcctcaacatagttgcaatgtttttagcaaattacagtagaacgatccgacaaataagagtcaaattctaaaaattgacgattttcaccaagattaaatcattagataatcaacaatggccaagatcagtataaagtgaacttttcatactttttgtaattttttattattattttaaatgggcctccttccttataaaaggatagctcatttagttcatttttcacattcttctaagtctccatatggtaagagcatctatctctaaaaaattagagctgtaacgccctgaccctcaggaacgccacgtgtgtgtgtgcttttataaacttattattattaatctataaattttagaaaagtgtggtttaatttaaatctttaattaaattcaatataaagactttcattttaaataatgtcgtaatatagggatcccctgtttataaaataaaaataattctttactaataaattacatttccaaacatagaaa

SEQ ID NO: 298803 - DNA, 2397 bp, Cannabis indica
aaatatttattagttaattattttgaattatgataacaaaaaaaaatctaatttcaaacccatgctaaatcttttaaaaaaaaattaagataaccaaaatctctctaactaactagaggaagaaaataattaaaaaaaaacaccaatgattaaaccacaaatattttgaactctgcaaaaccacaaatttcatgtcatgtcatgtgattaaaaaaaatcaatataaagccaaaatttatttcactcaaagaaaagtccaatgagtacccatcttccacacacacatatacacacatgtgtattatttaacactatgactatatataactttttaaaaataataataaaaaagaagagctatgtatatatataggtttagaataagagagaaatgaaaataagagtaaatgtgactttatctttttgtagcagaatacctttctatcaaagttttgtgaaccaaccatttatccttatgtgaacatcttaaacaaaacatatatgctataacccaagaatccgtttctattaagcaacctttgctccaagtgattctataattccttctctctatctttcagtctttcatatgtgtatgtaaataaatataaatatatacatataaaaagctatatgtatatgtatatgtatagtttgtttcctcttagtctgcatgagcctatttgaacacaacaacaatgccaaaaacaaaggccataacacatgcagatcttgctccaagcaatggatgcactaatttggggagcaaacttggtgtcttcctaataatcttaactattctatgtggtttgttatgtttcattctgtgtctaatttcagaggccacacgttcagaggtgtagtactaaatcattccttgttctttttcattgtggaaaacagatactgaaaaataattctgaaatctttgttttgtttgcagatgacatggatagacacaggtagagaaggcaataataactatgaatgtgtatatagtggaagtgggaaaacacctttgctttgtgctgtggttgcttttgtgggattagctattgccatgatgattgagcacatattcatgttgattgcagtcagtaagcttccaccttctgctttggccacattggacccagattttggctctgcaaagaatttgacatgccaagcaggattcttctttgtcaccacttggtaagtaaaactaaaagtcacttcactttctctttcagtcataacatcaaacagttttgaatcttatttcatcataacatcaaaagcaataggaaagtacccaaaatatgaattttaattgtcatataacttgaaagccctcttttttttcttcttcttatttctgtttcaatcaaacagatcaaactttctcacaacttaataagtgtaactctatatcattatcatcaaactaacacctacaaaaatattcaattttcaatgagtcattatatcaaacagttaaggaacataatttcatcatgataaccaaacttacccaaaaacccattttcaggatttgttttgctgttggggaaatcttgttactgattggattaagcattgaatctgggcatttgaagaattggtataaaccaagagccagttgccttgtaatcagagaagggttattctctgcagctggagttcttgctttgacatcagtttttcttgctgctggattgtacttgacggctttgaaggcacaaaagattgcccaacaacatgaaaatgtcagaagacagattcttgagacgtctgcactctatgcatccccaccaacatcaccaaccattcatcccattactgccattgacagagagaatcccatattaatcagagatggccccattgatcacactagtgcttttgtttttcctttatcttatagcaaagacccaaatttagtgtagaaacagaattgagaatcagaattgaagtacatatttctgtacataatttttatgttactccaaagggctcttgttcttgtgtgaattctcttcactacttctttttctttttctttttttttttttaacaaaattttactattttttacatttcatatggtttgataaagaataattatgatttttttccagtagagttttgccactgaacttcttttctgataaaaattctttccaaattattcaaatggttacattttgctcaattttcaaaatcatttgctttgcttatctactagaattatccaaatttaatttattagcattaaatatataaatattatttgttagcatgtatatatacagtactttcacggaatgtattccgtggtatattagatgggtctcggggtacattaaatgagtgtcaggtacgttctactttttaatcctaattacccctagatca

SEQ ID NO: 298804 - DNA, 4643 bp, Cannabis indica
tttgaacgtatttttcggcgtgctaaactttttcaaatttcttaaaattttgcagaatgtcctaaataactataacttggccataaaaaaattttactaaaaaattatttcggttgcaaaaacaaataagagtgcatcaatatttcaattttaaagagtggtagaatttctcaatattattttagatagggaaataaataaagatgtatctattcaagtggattataatgtagaattttcctaaacattatttttccctatgttgtacaaaaataaataaaaaagcttcttcttctacttcttcttcgtcgtcctccagttccactgttccatctccagttacattccattctcaggtaaccctaatttactcatccttattcaatttcactttctaattgtaattcactattccataatctccaatttcaacaacaattttgctttgattcttttgaaactagaaaaatggggacaaccaccacaggctcaggcaccggcacaggtacattggcacctggtctctcccggaaactgaagaaagtcttggaatccacgagaacggagtcaccggatctgttggcttccctcaacactctctcctccttctacgccgataacacacctcactcccgtcgtaatctcagatccacaatcgagaagcgatctctctccatcaaccacgagtttcttcaagcctccgccactgctcaggaagccttggatcgcgtcgaggtcgaggtcgatgcactcgccgattgctgcgataggattgctaaggctctctctacttgtactgcttccactggcgacatcatttccaccaccgaacgtctcaagcaggagctggatgttaacaatcagaggcagaatattgtctcttgcttcctccgtgattatcagctctctaatgatgagatcactgctcttagggatgatgatctcagcccggctttctttaaggctctttctcatgttcacgatattcatgccaattgtaaactgctattgcggacgcatcaccaggtatccgtgtttgagtttgtgttattgcttattggtttgctatagtaatcaatcgattgttctattgcattccattttgtatagcgtgctggtcttgaacttatggatatgatggctgtttaccaagagggagcttatgagcgtctttgcaggtcagccattattactgttaaactagtttgttgtcctaatctctgcaaatttatctatgttatgtttggtgaaaaatcagttgtaattatcattgaaactaattaacaccctctcaagttggaatatagatattgatcatgcccaatttgttaagtagataattaacccgaaccccattcaaagttcaccggtcttcacatatcttgtagaaatcaagccttgtcgaatgaaatgatagtcaatttcaatgtgcttaggtagctcacgaaacacaggataagatgcaatatgaagatcgttatatgcaatttacagctaacatcctaaatgattatttcaattcttgctacaatgtcagagtttgaacgatgtatggtcttttattcattttatgtaggtgggttcaggctgaatgtagaaaattgggtgatgctgataatcctgaagttagtgaactactgaaaaccgcagttcgctgcctcagggaaaggcctgttcttttcaagtattgtgcagaggaggtgatgttctatcagattatgaatttgggtaacatgtcactaatgtgtgctttagtatggttttacaatatatttgtttggcaatttccaggtagccaacatgaggcataatgcattgtttagaaggtttatcagtgctcttactcgtggaggacctgggggcatgcctcgtcctattgaagtgcatgctcatgatccccttcgatatgtaggggacatgctagggtggttgcatcaggtggattacaggctttttatggttattatgggtttgagattttacttcttgtatgcttattagttattacttgctgttaatctctatacaggcattagcatctgaacgggaatttgttatcatgctactagatcctgatgcagtggttgataatagacaaaatgaggaccattcttccaagagcatgcacagtgattttgcaaacatagaatctgacttgacatttgttttggatagaattttcgaaggagtttgccggccttttaaagtcagggttgaacaagttcttcagtctcaacctagtcttataatatcgtacaaactcagtaatacccttgagttttacagctacactgtaagtggtatatactctgtttagatggaaagtaaagctatctgtaaacctttcctaacacacttcatttggcagatatcagatttgctcgggagagaaactgctttatctggtacactatggacgcttaaagatgcagcacagaagacattttttgatattttaaaaagtcgaggggaaaaacttctaagatatcccccgttggtggctgttgatctttctccacctcaagcagtaagggagggagtctctgttctgcttgaaataattgatactcataacagcatgatggtacctgcttctggaaataaacttgactttgatcctgtgatatctgccttactcaaccctataattcaagtaagtgtggttccttttctgaagattagattttttatgttagagaaacagaagagatactgtgagattttcaatatagcacttgtagataccaaaccttgtctacatcaaacttacgcttaatgttcgaaacacaaaaatttacattttctaaaatgtgttttcttaccgctctcgtttcttaaaagtggcatcacatgattcacctcatgtatgagcatatcagatccttgactgtaagttaatgtaaattttgtgtctttaacatctcttagatagactcgatcgtttggcagcctgcttcatcttatttttttatcatgttgtaatgggcactttggttttgtttccttttccgcaaaatgtgttgctgtggacataacagggaattgtatctgttgtagtcatattttagcctccacgatcagattattcaattccttaatacaattattgtagatgtgtgagcaagcagcagaggcacacaagtccaagggaggcagtcactcatctcggagaagtagacttagctcggactctgctcaaaacagtaagtcatcagttgacgcgctgttgtctagtagcatttctgcctcatcttctcaggtatgtcaaatctgggattttattttcgatgctctgttctgatctcgtataaaggtttcttccattccaatgtctgattttcgcaatttttacagaatagcgaggcactgtcgaagatattcctcataaattgcttgtgcgccattcagcagccattgttgggacacgaggttgcagctgaatacgtgaagaagctcggagtgatgatagagaatcatgttgcgatccttgtgggaaaagaagtcgatggcatcctaagtaaatgtggcttgttgcagaagatgaaccattttcgtgattctgctgggaccccgctggttgagatagaggacacgtcgccagcacatctcttggaatgcctcaaatcattctttggtttgattttgggaagtgagagttcactaccagagtttgagcagatgcaggttcccaagttacgatcggaagcttcagtccaggtggcgagatcgctggcagaagcttatgagctaatatacgacgccattatggatcccaagaacggttatcctgatcccaaatctctggcaaggcatcctccacaccagataaggaccattttagggatataaaataaaaccattgaaaaataattacctctctgtaacttgttagttttgtttttgtattatgattatcaatgtctgtgtattcttttcctgcaattatataaatgtgagctttttggtatagattttgggacattttttcactggccaatggctattttgagattccaatacacatgtaagaccacacttggcattcttctttcacttccaatctataatttgttagccgttgctgttggttttttttttcactttctcaaaaagaaaattaaaataagattaaaatgcaattataaacattaaacaatgtcaattttcttaatcaaatcagaaaacaactctagtaataacacaatgactttgtgggtgaaagagtaaaatttgaatttgaaaaagaatgaaaataggaactaggaagagtaagatttaagagatatcattacaaaagaaatttatacaaactactattttttttgtaaatttgttacacttatgtaaaaaatatattattttaatatttttacaacattctataaaaaaaatataaaaacaacataaaaaaaacaacactaaaataaaaccacatgaaagaaaataatatcttttccatataagaataatatacaaataacaaaaaaaatattaaaagagtattttttataaataaaatcttaaaaattataaaatatttaaaatttcctacaattatattttgttggtaattttgttatttttgtaaatctcataaataatcccaagaaaacaaaggaaaacttacaaaaatactgtttttt

SEQ ID NO: 298805 - DNA, 2933 bp, Cannabis indica
tgtacctttaagaaccatttgtaaaatcttgaaattgaaattgtccattaaaattgaaagttgaaactcacctggccaagaagaagaatgcaccgttctctttattaatatcaaattattcaataaaacttttaaaactccataggagtgccacaaaatggattgaacattgatatttgatcgttcaatgggatttatccgatttgaatttcatggctcggtgttcatagaaagagtggaggaggcacttagagaggaactgaagtccggtgtattagtcgactgggagtgggagtcgactgatcctagtcgatgatgatgtgactgagaaaaattagatttggcttttcgtgttagggttatacaattcatatacgattcaaaataatattaatttttaaaacattaatattaatatatttagataataataatactaacagtcttatttgatacggtttcttagagagatatgtgcctaagatgatttttttttaatttaaaaaaagattatttaatttttgggtttaattattgggtttatttgttaacggaagatcaaacatattaacatcgttaaatttaacagaatattcttttatttttaaggtatattctgttaaaccaagaaaccaagaaatgccgttagataggcacttttaatatataaagatatttatgaagtgcaaaattagtagatgattgcaatacaaaccaagaaaaaaccaagaaaaacacatgaacattcccaaatgtacgataacacaaaaatcagatgtgttgacaagatcaaatttgatagatacacataaaaactttacagaagtcatacataagagagtcgatattaaaatacataacaaagttgaacaacaaccatatgttgccatgatcttgaaagtaagctaatctacacaagtgtataaagttatttcaattttcaccactccaagttcgtgtgagtagcacagaatactcatgtatgaagtaggatttaacacaatatacagtgatgatgaaaatattcatatatatacccctatgagagcagcatcataacaatctttaccttaaaactaataaaaaagtataaaataggaactcattgttctgctgagtcatagtaccagcttcaggaacaccactgcaggaaccaaactaagcactggatataagtatactctaatagtggagtagatacagttcaatatagattatgcttccaagtagataagaaactttccacctactgattgctgaattcaagggcttctccaagtttctgctttgaaccttttctaaaggcattattgaaactctacaagactactttctaccttttctagggtactaattgtattctagtctaaaaactaaattttttctagtcttcttctggcctgtgattacaaatcaggagttgaagaagacaatcaatacattatatgaagagcgattccaattttttttttttttgaataggagagcgatttcaatttaaatatataaagtcttcacttagctaattttttggttcttaactacgaagcaactttgtacctgtttccactttccagatgttgccacagatgaacagttcttctgtggctggatctttgactctgagaagaagaagtcttacattccaataatcctcctgagaaatttccaattcctaaaagaaagcttcttcgaaccttaattgttgaagttcttcgaggaaaaggtatgttcaggcagctgtacttggaaatcaatttctcttttatttagtaccatatggagttgttttccaagcctttcttcaaggcaatggtttttggacaatatggattacaagaaattcaattttttttaagggtaaggcctttactaagggtgattgtagctataaatttgactacatgtttaagagctaggatgaactaatgatgttcaacttagccatgctagattttgatgctaagctctatggggtcattgaccagcctacgagcaatagcaagaggttggcgacatatgtgattggaagtcatcctagggactttaaggacaagcattccaattttgtgaagaggagtagattgtttaacaagtttgtaattagagaagattaagtagttgctgataagcaggagaactgtttagagaactctcaaagatgttttgggtgatactcaaacactgttgtgttgtttgtttctggtttttgaagaggacaagggatttaagtaggcgcttgtaaaggatggctttgaagccttggttgactaggtttttggttttgggtttcaaaacaataattttccttactattttggaggctgatcaaagaaaagaaactaagaaagaggaaagggaaaaaggtccatagaagaatatcattaaactactctctgtaataatgcattgcattattacaaaatctcctagtgatatccttctaaggggttcattagctattggactaaccatccaataggtaataaacagatttctttactcgcgattcattgacttcttcagcgtgtccataactggtaagtaggccatccagatacgacctcttcggtgaagttcgtaagttggaggcattggaaggatagtctgttgttgttccattgttgttctcttcaggatcaacatcataccaatttctaaaatactcgttggatacatctggtgagtatattgggcgggatagttggtgattcacttcatcattgcaagatgcctacaattatgtgttataaacaagattaataggaatactttaatgatgagaaatgtagaatagaacagtgcttgttcttatgaatggacttacaacaaatggtactggttcttgagtgtcaaacatagaagttaatgtctgcttgcagaaatctgatgaggatatttgtgagaccggttgaaaactagcatagtcatca

SEQ ID NO: 298806 - DNA, 1289 bp, Cannabis indica
cattttgtgattaaaaaattaaagaacaaaagtgttaccaaacgacaccataagtatccacattttaacattaagaaaaaagtttgcatatgtataaataaaaaatcgataaaagaaaagaaacaaatcaagtactttctaaacaaagaaaaataaaaatctttaccaatattacaatcataattaattaaaagtaacttaatatttcttagtccaaaaaaaaataaaaatacttaatctacttacaacggtatggatatgataaataattcaagaagggtgaggtccgtgaggatgtgagaatgggtaattcgggtagacaggagggtttacaggcataattatttgacgtggattatatatggaaagctcattaatataattgttgtggtaatagtagtaattataatagttgttgttgatactattactattgtagtagcagtacatgttgttattgttgttgttgatgttagattgtgcaagtacaccaccaacacgattggtctcccttcttttggccctcttaacctctacaagcttgttcttgaggttgtgaaaattatttttcaagacttgttccacagcttcttccgtactgaaagtgatgaatccgaaacccctgcctctaccagttgccacatcacgcagaatttgggtttttagtacctcaccaaatgtggtgaaatacgcttttacttcagtttcatcaatcacgtgaggcaatcctccaataaagatcttattcttgtagaaaatagaattgttggcatttgtttcttcccctactacaccattctatatataataataataataatcaatatatcaacacacaaatacaaaatgagaaagaagaataataattataactcttataatatatagtagggacatctttattacaaacctgtggaatagaagaagtgacctgtactggatcatcagaaccaatggtagtaacctcaggaccattgtgattactaatttgtggatcattgttagaaattagttgttgatcagattgaggagcaataggttgttcagtattagatgacatcttggctctttcccaaatcaattgaaactttcaacacgtaaaaataattagaaagaaaaaaaaagtaaatcgatttaattagaagcttacgaattaattttttttggagataggaagctggcattctctgtgtatttataatttactggtagtacgtaccctattacactataatcctattaggaatttcatttctaaaaaataattaaataaataaataaatcctatt

SEQ ID NO: 298807 - DNA, 4930 bp, Cannabis indica
gataatcaaaaaaaaaaaaaaaaaaaacaaagaaaagaagagaaaagataatccaaatgtattttgattttaaataaagcgagtcggtgtaaaagattaaaactaaaattaaatccaatccccaaacataaataaaacaggtaagtaagagtactttctcttataaataggtaaccacagcagaaccaagcataacagagatagtttcccttattttctttcttgccaaacaagttcagaatttcagactcttgaagtcttcaaactttcttctgaatttctttggcttcttcgcctaaacaaacgctcaacgtctctcactttttctacgagtttctgatctataagatcaactcatccgccatgactgacaaagctgaatcatccgaaacgtgagtcaactcgctctacattttttttttattattctgtgtatgtatgttatataattgtaatttacggttttgttgtattttatttttcagcaagaaggatttctcaacggctattctggagcgtaagaagtcgccgaaccgattggttgtggatgaggctattaatgacgacaactccgtcgtttcgattcaccctaataccatggaaaagttgcagcttttccgtggagatacgatcctcatcaaggtactggggttattatacacgaatacttacagtagaaatatttataaccttttggctaggacgaataatttcatgtggaaaatttagggtttacgttttttatgatatgagttgaaatgtgggtatgagtagggtaacgactggtaactgcgccctttgtatgtgaatatattaattcgggattttgatgagggttttcaaagtttatgctttatgctgaattgatgatagctttttatgtccgatgtgctttgttctttagattttttggtttgtagaggtacatgcgtaaaagaaaacatttggtatacccattttccttcgtagcaattttattctaggaaccatattaacaagttaaactttctacaggtttccgtgtcttcatatgttttagttgctgtgtcgttatttaatataatgcaaaagcaaattgtagacatgattttgtcttagatcgtttactgtgtagtttttaaaggtaagggctttctagactatgtaatagttatttctaagattgagttgcaagtggtttgaaataaaattggccattccaaatattgtctgttgaacaaaacataagatatttggttttctgtttgataatttttctgtcaacatattatgtatcaagtttattctggcattatttgaaactctagtctcaaatgctctggtgttttatgttttttttccctcctttttactttctatttctgttattgctgcactttcttttttacttgtccctttatcttcatgattgtttttgcagggaaagaaacgaaaggatactgatgcattgcgcttgctgatgatacttgtgaggaggcaaagatcaggatgaacaaggtcgttagatcaaatttaagggttcgtcttggtgatgtggtgtctgtacaccaatgccctgatgttaagtatggaaagcgtgtccacatactgccagtggatgatactattgaaggtgttacgggaaatctgtttgatgctttcttgaacgtgagtataacctgctgcatttgctcttttctcctttgttctgtaatcaattctttattattttgtgtccaatattattttactctctctctctctcatctttttcaatttggtcttacattgttaaccactttatctctacagcttactttttggaagcctatcgtccagtgcgaaagggggatctgtttcttgtaaggggagggatgagaagcgtggagttcaaagtcatcgaaactgaacctggggagtattgtgtggtttctccagacactgaaatcttctgcgagggggagcctgttaaaagggaggatgaggaacggttggatgaagttggttatgatgatgttggtggtgtaaggaagcagatggctcaaatccgggagttagtggagcttccactaaggcatcctcaactttttaaatcaattggagtgaaaccgcccaaaggaattcttctatatggacctccaggttctggaaagacactgatagctagagctgtggctaatgagactggtgctttcttcttctgtattaatggtcctgagatcatgtctaaattggccggagaaagtgaaagcaatctcagaaaggcatttgaagaagctgagaagaatgccccgtccatcattttcattgatgagattgattcaattgctcctaagcgtgagaaaactcatggggaagtcgagaggcgcattgtttcacagcttctgactttgatggatgggctgaaatctcgtgctcatgttattgtcatgggtgctacaaatcgtccaaatagtatcgatccagctttgagaaggtttggcaggtttgacagggagatagatattggggttccagatgaaattggccgccttgaagttctgcgtatacataccaagaacatgaaactgtctgatgatgtaagtttaacattgcattttttttctttcttaaaaccccctctcttaaacttctaaaaaggctactgtaacaaaccattgatcatgtacattctacatgaaccagcaaccttcttgtatttttttcccgctaattgccaaaaaatgtttccaacaggttgacttggaaagaatctcaaaagaaacccatggatatgttggagctgatcttgctgctctctgcactgaagctgcactgcaatgtattagagagaaaatggatgtgatagacttggaagatgaaactattgatgctgagatattaaattccatggctgtcacgaatgagcacttccaaactgcacttggaacaagcaatccttctgcattgcgtgaaacggtgaggctcttttgtgtacctcccttgtgtggtcaaaaaaagagaaacttgctttttcttgagatttgtagcttttgctgttgtgctaataattatttatttgtttttcaggttgttgaagtccccaatgtcagctgggatgatgttggaggtcttgagaatgttaagcgggagcttcaggaggtagttattgtttttactgaagtgactttaacttaaagtcttgtaattttgaatctatttacagaaataacattcttctatgttttgtgtccttacagactgttcaatatcctgttgagcaccctgagaagtttgagaaatttggcatgtcaccttccaaaggagtcctcttctacggaccccctggatgtggaaaaactctgctggctaaggcaattgcaaatgagtgtcaagcaaatttcatcagtatcaaaggtcctgaattgctcactatgtggtttggggagagtgaagccaatgttcgagaaatttttgacaaggctcgaggatctgcaccatgtgtcctgttctttgacgagcttgactctattgctacccaggtatgtgcacttttatatgaaatcatctaagttggcttaagtaattctttggagttttgaatagttctaagctcaatggagttggtggaatcttcgatctcgattgcttgtttccttctatccccatgtatccgattcagtgatctttgtttttgcaactaatttttgttttgcaatattacagagagggagcagtagtggagatgctggtggtgctgctgatagggttttgaatcaacttcttactgaaatggatggcatgtcagcaaagaaaactgtttttatcattggagccactaaccgacctgatattatcgacccagctcttttgcgtccaggacgtctagatcaattaatttacattcctctccccgatgaagattcacgtcaccaaatctttaaagctaacttgagaaagtcgccaatctcaaaagatgttgatttgagggctttggcaaagtatactcaaggcttcagtggagctgatatcacagagatatgtcagcgagcgtgcaaatacgccataagggagaatatagaaaaggtttgttcttgggttaattgctttgattagccttgcaattgtttacatatttgttgtcttgtatagttgtttaagcctatgcaatcttttgttgtgatttttaacgatcttctcaatacaatacaggatatagagaaggaaagaaggagaaaggataatccagaggccatggatgaggacatggaggaggatgaagtgtcagagatcaaagctgcccatttcgaggagtccatgaagtatgctaggaggagtgttagtgatgccgacatacgcaaataccaggcatttgctcagaccttgcagcagtctcggggattcggaacagaatttagatttgctgagtcggcaaccgggggttctggttcagatccatttgcagcttctgctggtgcggctgaggaagatgatttgtatagctaggctttacctctgcccctaagacttgttctagtttcgtatttagcaatgatttcattttcccccacacagtagagaagcaggctctccttgtttccgtgattaactttatactgtcgagttgcaatgttttttttttaaaaaagttattttagatgaatcaattaaaaggaactgaaagatatttcacggaattcttctcgtttatttgattatgttatttatgatcattatctgtcctgtggggccgtcgtcagaaggctgagaatgtctttaagtttgataattttactttagatctcgtggttttgatttggaaaggggagaaagtagttaatagaggcaatttaatgcaaatcaattaatatatagaggtttaaattaattttttgaaaatttaaacataattaataatttttttacatttataattagttttaaatattattaattagttcttttttttttt

SEQ ID NO: 298808 - DNA, 2167 bp, Cannabis indica
aaggtactaaataagtattattgaaaacacaagatatcaaatgtgttttaagagaaaagatagggtatattcctttttttataaaagtttattccaaaaatgtataatttcctataaaaggatcttttattttcttcagatcattcctctacatattataaatttaaatatttatattccaatttatcgttttttaattaattattttatgtttgtttactaatttctaattttatttaataaaatatgcttaaatataatcataatttaacgatgtaaaggagagtagtaatgtcaaaaaaattaaatattttaaaaactatttgcatattgcaatggcacaaaccaagtttacccaccaaagagattgcgtgttaagagtttgaaaattattttaacatttttttttctatcaaatttacaaaatccaatacaatgcaatctatacaaagtgtgattaattttatacctatgaactaatgcaaattataaattaaattgaaatgtcatattggatccacatttcatatactatgccaaaattgcatatatatatatatcaactttattaacaaaacatttaattaaacttcaactagacatgaattgaaataatgataaggaaacaaaaatgttataaatcataagagaagatcatgaagtttattgataaatccatcaatataagaatcttcaagtccttcacttaacaaaaactctctccatttcttatgattttctctaatttccttacccaattggctatcttccttcattacagcctccacagccttaaaaacaccttctttagtaaataaaccatcttcattccctttctcaacttcaacaccaactttaagatcattactcataattctagcattcacaatctgatctccaacatttggtaacaaaacaagttgacactcattcaccataccctccatcaaagatcccgagccacaatgagtcacgaaacacccaactgagtcatggctcagtatcaacggttgttgaacccaacccccacaaaccaaccctctattcccaactctttgggtaaatccatctggcaatgctgactccactgtttcgaacccaattggggtttttagtgctaccagaaacggtcgaccggttagctcaagaccaagaaggagttgttgaaattgatctattttcataacacactcacttccaaacgcacagtacaccacacttcccttctcgaaactcgagagaaacgtagctatttcgccttccaatactgaatttggtgggactggaaccacaggaccagccaaaaggactattttgccccattcttgggccacgtaatcagagtaaacaccttccatctctttagaagtgttgtaagcaatcgcatcactatttttgattgtgagtttttgtcgtttcatgaatgtaattccgcttccaaattctaatgatgataccttagccaagtcccgagcttcatgagctcggaacttaataacagatgacgaaggaaaacccaatgggggttccaacaaatcatcagcccgatcacattcgcttcccttacgacacaggtacccgaatgtggccgggctaatggtacaaaaatggagggacttgatcccgaaacgacaagctaattcaggtacccaataagcaaaatcaaagaagatgaattggggtttgagtttttctagagaagcttcgagttggggacgagtgagatccatggcggtcatgaggaagttaaggagagggaatgggacgtcggcggtggtttcggccccgggagggaggcctatcacgtgaggcacgtggatagggatgaaggtaatgagatttgggtatagattaaacgacaacaatttggactgcgttttgattggtataaagaatgaaattttgtgacctcttttggctaatttgttggataaatgaagatatgatgtgagatgtcccatagcaaaccatggatacatagctatgtgaagcttcttcttctcatcactaatttcctccattaatgatcccattttcattttcttcttcaatcaattaatcttactttattttcaatttgctatttatatatatatataatataatttaataattacaaaattaaaattaaagagaaaaaactaattaagaagggaagtacgtagta

SEQ ID NO: 298809 - DNA, 2346 bp, Cannabis indica
tgttcattttatatgtgtagccgacccaacaattaaaaggcccagatatatggggaccttttatctcgattcttatgtaaaaaccggaatagaaagtcccatttaaaatattaaattgtgtttggcaaatgcataaaaatagtctttccaacactgttttttgtccgttttccaaacaaaaccctattccaaacatttatttaaggctccaaatgtataagtgagattaaaagttttttatcttacttttttatttttttagtgtaaaaagtaggataaaaaatctgttttgttgtagtggtttacaactttacaagaataaaagaattcattcacaagtttatagagaaaatttacaagaaaaataatgtttggccaactcaagggttaaagtttttatttataggtgtttagctactaattacaaaaaatagaattggaaatctttctaacagcctagctaacttggagtaacttggaccaataagaataggatttgatgactggaccaactaattgatactaaataatatattattttttatattataaaagggagggatttcaacttggcaattttttttaagaaaaagaatgggtgtcatgaataataattagtgactaattacataatgaaaaatgccatgtattaagcatctcacgaggtgatatattgttattggatatcacataatttaataattaactcactgcaatgagccacatcactataatgttgaacacgatatgatatatgctcttaaacaataactttattgtgtcgtcgaatagcattctgtatacaaagtaagtacttatcaataaaatctaattatatatgctcttaaacaatattaatattaattaatgagaattcccctgctgagagggagaacgtagttggccttggcctttcacaaagcgaccccagtaccaatggcgctcccaaacagtggccatggaatccaaagggattcctttggtctccggcaagaaaaggacaacgaaaacagtcatggccgcaatccaaccggcgtagaagaggaatgtgccatatttgaagtgacaaagcattgtcaagaaggtttgggacaacacgaaggtggtcccgaagttcaccgcaacactgatgctttggcctgtggctcgaattttcattggaaagatttcgctagggatgagccagctcaaagggccccatgaccatccaaaaccagcagcgtacgtgcatattagcactagtattactatagcgtaccccttcgttatctccttcgttcctgaaacaccactcgtagttgctaccaccccagccaccgccaccttattatatgtacacaaccattactatagaagtacagaaaagatatatatatatatatatagcttataacctacgtccatatatatatatttatatatagcttatatacctggcatagaaacatttgaatccctccaacgatgaacaaaaaccgtcgaccatagcgatcaacgcaaaaggagagacgagaatggcaccaaggttgaccaagccaagtatgatggctgcgatcaaagccgaatcgtttcccaatccaacggactgaaagagaataggtgcatagaaggcaatgatattgatcccagtcacctgttgaaagaatggtatccctatcgccatcaccagctgaggacggtactgcctctccaatatgctcaagaatggagactcttcttgcccagctacggctttagccatttcgtttcgcttaactagctccgccagctcagcttccacctcagactctttgccacctcgggccttgagtagcgacaacttggcttgagttagcttcccacgctccaccaagctgttaggtgtgtcggagatcattagcgccccgactgtcattatggctgccggcaccatggcaaggcctagagatagacgccaaccccagctgcggtgggctgtgccgtagtttatgcagttggacgctaccactccaattccgatgaagaattgaaagcctgtgttgaatgcccctcgccactttgggggtgctacttccgacagatagacaggagtcgcctatatgtatagtgagattattaacaaatcttatacaaattaattgagtattattattgggaatgagtagtctctaaaattttctagatgtgtcgacttgtgattggataacgatacaccttaaaagttataacattaaacaaggaataattacataagacactattttttgtaaaatatttacatttttacgttcaaagaatgtttttttacatttttacggtttttcaaaaaataacaagaaaacaacataaaatcaacaagaaaacaac

SEQ ID NO: 298810 - DNA, 3493 bp, Cannabis indica
aaataaaataaaaagtcaccctgaatttctcataaaccaagaatttcagttatatagatacactttatatagaatagatatatttttattaagcacactagtaattaacagagtccaacaccaccataaggaggagtatataaaccgttagtgattatttataatatttcatgatagtgctaagtattctagtgcctttttttgtttcaacccaaccataaacaatgaccaaaggaagcacctttaacaatagctttatactagtgttataaaataataggaaaattaagttttttaaaaagtaaataaatgataataattttattaatttttataatgcatatcaaaaaaatttctattaccactcatttgttttcattactcccaaatagtaattgtgaacttaatattgtattcactttgacttcttgcttttgtacttttttattaatgttataaatatatgaaaatacatttcaaatcatgacactatagttaaagataatctaatgtagttatgtttgatgtaagtgttagagccttgcagatttgaagtggtatatatttgagtcgaatatagagtaggtagtatcactctaactctatctcagtatcactctaactctatctcaaactcacgtcaagtatataaaattgcaccccactccattacccattaaggcgagtaatctccgccctattacccgtcccaacaggtcaaattttcatcactacttatcctactagtagttataaaaaaaaatattgatatgggcactccactcacactcaaacccaagcttgcacttactaaacttcagcttaacacaccacatgtccttgtgttctttggaggtgtattttgctagacatatcatcaacaacatgatatctcacttagtaataaaaaaaaacatgatatctcacttaacaagaattgcaggtgattatatctgcattcaatcattatttttgttttcttttctcatatttcattgaatcaaaattgtttgaataaatcaatgtatatacttcccacaaaatgagctttgatcacttaaacagcaaaagaatatgcagaagctagttcaaatgtagggagacagtcttcttcatccacaatgtgcttccatagccttcgtatctcggcacgtatagctccaatctgtggatgcaactcatcaccaacaacaaacacatgaactctactcttcaactcaatccagctgcaaccaggctctttactaacacctcgtaatttcatcaatcttcgaacccgttcaacgtcttcttttctacccaaagaagcatatacacttgacaaaagaacataagctgatgattcttgtgatcctaactccattagcttctctccagcataggctcccagctcaaaatctcgataatttctacaagcgcttagcaaaattcgccataaacacatgccatgatcaactgtggctgactctataaactctttagcttctttaagttttccagcgcggctcaggatgtcaaccatacaagcatagtgctcaactttcggtactaagccaaacttgtcgaacatcatgttgaagtaaaaccagcccctatccaccaaccccatgtggctgcaagctgataacacattcacaaatgtgatatagtctggttttgtgccttcatataacatctcttcaaagagttgaagagcttcattaccatggccattgtgagaaagcccagatatcatagcattccaagatatgatatcttttgtaaccatcctcctaaacaccttgttaccatcttccaaactaccacactttgcatacatggtagaaagagcacttcctactggtatttcgagaccaagtccgtacttaatcgtccggccatggatttgctttcctgttccaaagcagctaagcttgaacaagctttcaaaacactagccatagttagctcattaggcataataccctccatctgcattctacaatacaaattcaaagcagcttcattatcaccattagtaacataccctccaatcatagaagtccaaagaacaatatcaggttctagtaaataatcaaatccctttcgagcatcactaatgctagaacatttagcatacatatctaccaaagctgtcatcacatacatttgagactcaaatcccagcttaagtgaatagccatggatttgtttcccttcttcaattgcactaagatcactacaagcattaatcaccccaacaaaggtaaactcactaggactaatcccagcaaaatgcatacttgaaaaaagcttcaaagccttttcaaagtcaccactttgagcaagaccagtcaccattgctgaccatgtaatggagttcttatcatcaaaaagtgtaaacatttgaagtgcattatctgaactaccacatttcgaatacattgtaacaatagcatttcccacagcagcaaaacacaacaacccatatttcaaagcaagacaatgaattttcttaccagtatccaatagttcaggaactgtcaaaccactaagaacactagtgaaaataaactcattcccactctcatcttcctcaatccgcaccaacccgaaaagctccaaagcctctttcgccattctttgagaagcatacccagaaatcatagcagcaaaagacactaaatttctctcagacatttcatcaaacacctttcgggcatccgaaacaatactcgatttgcagtacaaattcaaaagcgaactaccaacaaacacatccccaaaacacccaatcttaaaagcaaccgcttgagcttgccggccacctgtaacatccaaaccgccggagaaaactccggcgaaagtgtgtgcattaggcaatacattctccaccatcatacccttcaaaagctccatcaccacacccaatgaagaagaagaacccagttgagaacagccattgatgaggcaattccatgaaactacgtctctgcatggaattcgatcgaaaacgattctagctttgaccaagtccccgcatttagcataaagattgacgatacaattcgctatatataagcaagaagaagcttgaccgtttctaatgagtctaccgtgaaaggccttacctttaggcaagtttcgcttttgaatcaactcaacgagttcggagaagaatggtctggactgaggtggtaaccaaggcataaataaataattcgcataaaacctataaaggaaaattcgaggttggttcttcttcgttattacttgctagtacggacaaggaaactgtacattgaagcgaaaaaggttcggtcttggactgttggatagtgtaaaacaatgctaaaaacgcgtcgttttgggtcttaacctgtttatgtaagaaaccaccgactgagtgaactagccgccgccatttctcattgatatgactctctccagtgctttcaatgttctcaagtcctccaaattcatttcatggaaatcggtactctctctctctctc

SEQ ID NO: 298811 - DNA, 1472 bp, Cannabis indica
aatagtcacatatctttattagcaacttttctaaaaaaaactaatttgaaaactgtcaagaataagcctttttgtagtagtgacaatatctttgatgaaatagaatttgatgtcaataattttatatgtttcatggaacataagatttttgacttaactataaagtaccttggttgtcacaatacacaactatgacattagaattgaatcctagttccttggtcaatccattaattcatattgcctctataatggattttgtatcagcaacatactcaatttctattgaggacaatgctacaaatttttgatgcagcctccttgagctttgaaaacataccatgtagttactgttctattaatttcagaatatcaattacaaggttagattttccaatcccctttctaatggaggggtttctatttatagtggctctaattgttatagtatacaagtagtcacaaaagtaaaattacaccatgatttgtacctacaaaattagcattggatagtggaggtagtggtggtcgggtgtcaaattgtactaacacttatgaattttgtctccactactctttgtacatccactacttgcccaaactttttagaggtaggcccatccacctggtccctagtcaaacgctgtacacagtacctttgtaccatcgagctagccacaaactagtgtgtataggttcttctaaataatttgctgttcaagtattatgagacctatacttagtaatgtcattaagtaatttggtcatggtatgttctcatcaagcacctctcttactccatttaaatgtctggagtagataaagtaaggtctttcctccatgacttagtgaagacaggaaaaggataactgcggggcctgtatacagaacaatatagtcacatcttagtaccttaacattgtagatataagaataaacaaaataagcaaggtggtcgagactttttgggcacatacccgtgtgagggggcgccctcgctcacctcgggccacaaatgcgagggggtggcttcgatcaatctatgtcatgcacgtgaaggggtatcctcgctcctcttgggcccacgcacgagagggggtaccgtcgctcttctcagaccaacacacacgaaggggtaccctcactcttctcaaaccaatgcacatgaaggtacccctcactcctagaacagaacattttgacctggtttgacccgaattcgaccaatccgcccggacccgacccgctcaacccaaaattttttaaaaaacccgttctgttcaggcgggtcgggttaaacccggtgcaccatcgggcaagttcatgggttggttttttatagttaccgagtcgggttgaacccaaacccacccaccaacccggtcacttttttttattacatatataatatattaaaaattaaaaaaaaaaaataatttttttttattacatagataatatattaaaaataa

SEQ ID NO: 298812 - DNA, 3067 bp, Cannabis indica
gacataagtcatagtgttgaactcatcttggaaattattacaatggctatgtaaaattcctagaagaaactcgaatcttagttttgttgtactcatcttgggtaagagtgggtgcagtgttatcatatgcaaatgcctgaactgaataaacacagtggaagaagttgttgagttactttaccttagaaacaatggccaatgagttagatgcatggcattttcctaaagcaaacttctgacagctaccttgaggagttccgtagctcgcgaactctatggaagagattgtatagccattttcacaacgcaattgcatttccggtgtcaaatcgtttttagtcgaccacttatggagaggtggataatgagactctgaaactagaccacaaatgtatcgagtcgtacgagtcttgacagaaatctccaaaggatttcctcccgtttcctcgaaaagaacgagtaagttatttgaatcctttaaccatgcccgtggtatgtggtacctgaggatcaataggtacagttagcaaatcggaatgatttttagtaattactagttcgtgttgcctaagtttttagatagaagcattacaaggtctgagtaggcttcccgcaattagttgtgcatttatcggagttgtatgctcctcgatagtcacagacattttgacatccaccttttggggcaacaatagtccagtatcttccgatatggtggccattgacccaagcttggccctttcccatgcttgccaaatctaaagcgactggttcagtaccggctggagcatcaaaatatgactgcatagattttgtgaaagaaaaaaagaacatttgtgagcaaagagatcgaacttcagacatcagaaacaaaccgctcatagaattgacttaaaaaacgagcagcaagaaatgtgttacatagtcatggacactttctattctcaagcaatgtaaaaaaacatgtgaccccccttatgtttatttgagtagcaagtaaaaatggctagaattgatttacatagtgagaacagagccaagcatactatatcttgtgagaataaatctcgaaataaaaataaaattacatttgctattttcaaaaattactcttttagaagataaatttaccttgtaccaagtaaatattgatggatcagcatctggacttaaatcagtccactctgccttgtcattttcttctgcagcatatatcttcaagaattctcccttgagcccaacctggaaccaagttaagcaacatgaaatccacttgattaaataatgatgactttattaaagtgtgtctagaatttttgcctataaaaaatagtctttctttatctttttcgaaacaagtcattgacttgtattgaagaaatgtctactagaccattatctatggttaaaaagtgaatttaggtggaacacgatttaactgactagcaaagcatgagaaagggaacaaaagtatagccaacaacttttactttcacggccaatacaaagaaaatgaaaccttgaaattgaatacatacctggtaggtccataaagactttgagagatctatatccccatttcgaaatccagtaagtttcacttctcctcgaaaccctgctccgtctttctccaagaaagcgccataattctgtatcattaatgcatcatatgataacaagtgtcaatatatagtcttcgtgttatagtacttaaaactttaataaagaataggcttaggttgggttagaaagaaataaaattttcaatgaggtagaaaaggacataagatttatctgagaaaaagttaaggcttgggttggctggctctatggttttacaacaagaaagcattttatggcatactctttctcaatgcttctctgtaattggtattttaagcagtctttcagaggctttctaggatgtaatacaaaggaaatcatccattgtaatacaaatttgtaccattaaaactgataaggaaactacatgaaagattcagaaagaaattaaaacactggcttggaacgtgctgaatctacctgcaagccgactgtttgagataagaagactagatcattgtatcctttgacaaactgtacaggctggaaaaccttcacccaacggccgctcacagtgccttcacttcaaaaagtcgcaatagcttaaatatcaatggccaaacaaagaagttgtaatataaacaacattgaccaagtataatcaagtataatctgcttccatataagatcaatgtaatattcatactcagaaagactgcaactgctataggtattcgagaagattacaatcatgaaactccaaagtagaaagcatgtgaactggtaacaatagattctatagatatgtatgagtcccaagaaaacaatacaactacacagtatgcacttacatcacagatgtgtatagatgaagtcacatacataaaaaaccaaagaggttggcaagggtatctactaataagatcaggtatcattgcttcgccattagcattgactcaatttttcatcaacatcgaaagttagaacatgaatcaagaaataaagatatgtaaaagtgatgaaagtggacttaagtcaatttatttggcccaaagaaccgaaccactatcacctcaccaaagagctaaattaaatattaataaatggcaccatattatcacaattccatgcataccttataaaatttatcatcgctatttaccttcaagcttgccattgacaaatacacgtagaacatcacgcatgctatcaattttaactgctgggctaatattattctcctcccaaaatgatatgtcctcatccgaaatatatattctacattttgaagaataggtattaaaagacagcataggaaggtttagggaacgagtaatgcttcaacattaatcacacgctacatatttttgttattatgcttcacaagtcagctactttcccttttctttaatgaattttctttttacctactttactaagaagagaaaagaagtatcatgtttaatgtaaggaaaaaaaattaaggtgctgggaaggtacgtag

SEQ ID NO: 298813 - DNA, 2206 bp, Cannabis indica
ctatacaactacaagccacaaccccatatgtgaataaggaattttctgatatttaatataaattattcaataataaatattaataatttaatattcaagcatatattaacatgttcaactctttattaataattagaaatgtctttatagacttttcagaacataaaccctaacaattacatcttaggaacctaatttctctacttctgatcctctttatgagatcattgattacaacaggttgtctcccaggttttgcgcaattatgctagctatttctagtcactttaagcaagaatttttctatcaagctaaaagcatacttgtttgggacaatgctatggatatttggatccatgctcttgaagataatgatacatggattattgttactttacctgatgaccaacatgttgttggttgcaaatagatttacaaaaccaagtacaatgctgatggttctgttgaaaggttcaaagcaagtcttgttgctaaaggatacaatcaattcaacaagaaggtgttgattataatcaaacgtttgcccctgttagtaagcttgtttctgtcaaccttatacttgctcatgcagccattcaaggttagtttttacaccaactagatgttaacaatacatttctccatggagattttaatgaagatgtgtttacaactctaccactagggtatagtcctaacagcgagttgccacctaatgttgtgtgtaaattaaaaaaatctctatgtgatcttaagtaagcatctagacaatggtttgagaaattttatacaacattaattgaagaaggattttaacactcagcttcagatcattccttattcatcaaacataatggatctcacatcttaattctccttgtttatgttgatgattctattattgctagcaataacatgacaactttggagaatttaaaagttaacttgaataacagattcaagctaaaggatcttgctgcacttaaattcttccttgagattgaagttgctcgaactaactaagagatttcagagacactatgcacatcagcttttggaagatctgggaaacttggggtgtaaacctgctagcactctagtggaagtcaatctaaaattgaatcaagaaggagaagatggactagttgatcctaaattgataggaaaatcatatctaaccataaccagaccagatttggcctatacagttagcaaactaagctagtttttggttactaccagagttactcatatgaatgttgcacaaagaactcttcaatatgtcaaaggcactcctggatagggtcttttctaccatgcaaattctgagataaagcttgaagcttatacaaatgctcactgggctatgtgtagacacaagaagatcaacaacaaaattttgcatttttcttaggtaatctttagtgtcttggaaaagtaagaaacaacataatgtgtcaagatcctcgattgaagttgaatataggactataacaaacactacttgtgagctaatatgattattgtcattggtataggaattgaatattgatcatgaagggtctgctatcttacattgtgacaacaagacaacctaataaatagttgataatccaatttttcatgaaagaacaaagcatatagaaatggattaattgttaattagtaagagagaaggttcaagaaaagatcataaaaataactcacacttcaagcaaggaacaaatagctgcactaaagttttactgcctaatcagttttagagttttaaagacaaaatggaaattatagtaacatttctactccaccttaaaagagagtatcaagattagtagtaaggtgtagtgttagttaattgttagttcgatgtttctgtaaattagttaagttgttacttgtttttagctactgaactgtgtataaatacactatgtattcctttattttaagcaaatgagaattcagttcattcatttatctttgtatctctttctctctttcctaaaatctaataaatacatcaatcatatataataaaaaagagcattgctattaggcaccagtggtacctagcaccttctcgacatgttgcgttgcgattgactagcgatactccctaaaagctattatattaaattatgtgggacccgatactagttgaaccataacgatattgacacataggaaggtactaagcaccactggt

SEQ ID NO: 298814 - DNA, 3682 bp, Cannabis indica
aataaaattttaaagaagggctaccttctctagatgtggagagggatttatagttccttgtcctttttggctttggtttatgtttagggataattcatgattatactccatcatcatcaagctcaatcaatatgacagtcttgtgctgtttgtggttgtttcattctatggtaatctattcattgtctttgagaaatatgcaaactctcccttcaaagacaaaatgtaattttcttccaagaaatgatatcacaagctcctccacttggcacctgaattcactaatttgatgtaagccttttcaaaatcttcaaagaacaagttctgattttcggcatactttgttatccagctgcaatcaaaagaaagttcagttgtttgacttcagcataatttggttatgtatctcaatttcaagtttcgatgtagagaaatagaaaaccttaaacattcttcatcgtcagcaagagctcgatctgatggaagcccaaccatgcctgacatgccacctgcatgtgattaataaatggcacaatgttagagcatggtgaatcgaatcttccattgggtcggtctaacctaaaagttcgctgtgcaacattggtcggtggagtttaattatgagggctttagaaggtctgtcagagtaatattttttttgacatgatgattgctttctttttctcatgtcaagatttttcacgtaaatggcataatcatcgtcgatttttctaacaagtagcttaagatatagtgagcaaggacaaacaatgaacctagctaaacatcatgtggcatcatacaacatacacctgaattcatttagttattcagttaaaccaataattcgctattataaaacaacaaccatttgatccaagagaagccatctttatctttgtcatttgatccaatggcgtcctttagatgggaacagcttttataaatactaataactcttccttgataaaccaggtcttgttttgagctaatattataggacattgaacagtttcactaacctgacttccatggtttcttgagaagaattttgaaatatgaattgtcaaagacatccgggtctccaaaacctttacttccaagagtatgggctccagtcagagctacgagttcttgcgttctgaaaccaaaagcagaagcacaatttgtatcaaacatgttaggtaagcttaatattggtaatagattataattatgttaataccttgctcttcaattacagcagtacttaagtgaagtttattaataaaatgactaacataaagaaacttcagagattgtacaagtgtcttaactacccttgccattttagctcttacaaaatgacagaaataaaatcaacttgagaataaaacagtcttgcgttataagatgaccacaagaagaaataaatttaaaaatgtatcaaggattcaaaatcaacaatattttgggggatggatttaaaataagataggaaaaatcaggcagttgatacactagattagtatttgatcaagaaaactaatcccaagatcagaaaaattgaaattaaagtaaactgactactttagccaatgaacatacaaatgtggaaaatggtatttgctatttgtaaactcacgataagccttttcttcgaaagctttccttcagagcagaagcaccgagagtttcaagaggaagcttcccatctggatcttcatccctaaaaagcacaaaattgtcatcatgtcagctgtgttcttctgtaatagcaatttttttttaataaaaaacaaatttttacatagtaacttcatttttatgtcaattgtttacttggaaaaacttgaacctttcatcttaagagttttaacttctttctttcttcctttgtttgccgttgacacatttgaaaaaccagattcgaattaatgataacttttaagccgaaatctgatttacatggtagaaaatcaaacttcttacttcgaatccacccggcctaacgcaacaggaattgttgggcctccacatagtgaaacagcttcggctccagctacagcaatcaaatctgcccaagatactggaaaaataatacatcagttgtaatactctcttatttattcattgcttctgaaaccttagctgcagcactaaaagataaaaacctggctttatagcttccactacactctttgctttctgtataatctgaaaaaaatgaacatttggaggagttagtaagtttaaggggcaggattttttgttgggacacctaaaaggtcattgaagatatgactaaaaacttgaccaaagacagataaagagaaggaacttgccttcacagggcctttaagacctgcattttcaggtctttcgagttcataaatgatagagccattcataccacctgcacaaacaaaacaaaagcttatgcaatttaagcagagaaaaccaactctaataaaaccttttcaaactaagtccaaaaattccatcagtaagaatcgttggatcaccacttattcaatacatggagaaggatcaatgtatagacataatgactaaaaattaaaagaaaatacctttatacttcgatcaaaataagcaaaataaggagtctgaatttaagtaaagcgcccaactcataattggcatattcattttgttgtgcaggtttggcatattacaagtggcatttccactcaagatttaaaactaaatttgataaaattttcatattattcaaacaaatccttgacacccattacttcaaattagatacctgaattgtcattgatgtcaaaggttccagcatcatgaaaaaccaggcgaagtacaccagcagccctgcccttgggaactacttttcttatctcatcctttaaaagcttactatattcattgttacttattgaccttcacaaatatcatgcataacaaagaaaaattcagcttaatgccgttcaggtagctagaaatttgaaaccctttttagttttgaaaataaaacttactctgctgcttttacagaaacactatccaaggattcatacagaggaataagaaatggcagtgtggcagtaaatactagtccccttctgttccaattatgatccccaactgccactacaagaaaattttcaatccaaacaaaaagtaacaccactagaagaacactgggaagatgtccaaaggcttaatttttgtttttctttttttcttttcatctgaactattttctaagcaaccaaacaggaaagagtgggaagaaattaaaaatgaaagcttggattggaagctttacctgaagtgtgggtggaataggaggcagtgggaaaagttggaccaaaatagaaggcggaagagggtgagcggaggaatgtggcgggaattttgattctgcggcggagggaagcggagaatgacggaggagcgacaacggcgctgacggatgttggtgaagccatagccagcgctcttattaactatttatttatgtattatttggactaatacatgaagagctgtgttctactcgccagtcgccactatagataatcttattatacgtgttttttttttctctctaaaaataatatcatccaaattaattttgctaaaacaattgttatatattattgggtgattctacaatgcacctccttaaaagggatgtattgatgcacccttaact

SEQ ID NO: 298815 - DNA, 1694 bp, Cannabis indica
ctatgttgtcgcacgagcaaccaaaattacactctacgaccataaaacgatacacaacagtcgttagcaaaccataaatttcattggaaaattcaatgtggttattttacaaatttttacaatttcaagttgttagtttggcaaactatatcaatctgtcctaatccctatagagtttttttcgattgagattccatatattttggatattatccctatacagttacttttttacctgaaatttgttgtgttgattcttttgtctaatctttcagggttcggaacctagcacaccgacgttgagaatcgttaatgtccaggatgatttgcattttattcagtttcaacggactctgtccgtactacagtctttctcgattgcagtagcaataatccattcacggagtcatactctccggccaaaagatgtacatgaattgaagtagcaagaacaaggttgaagttagtgtagttattgtatttctcttactgtattacacctgtgagtaagttaccaattatgatatagctatttatactaagattgagattatttttaccttgttttctagaaatcaatattaagtattattattttttcttaattttagttggtctgattgggttttgtgtcttgattcttgcccccaaaagttacatgtagttgaatgtacaatcttttgatagtgttgcctttgtatgaaatctacttctcgacgattttcactcgtctgaagcaatattattgaactttcttaccataaaatgtgcaagtttctctgtgagtaattcttaccttgaaggattagatgagccatggagcttttgagtaacttttgcttagtttagaaatttgattgtggtgctcactgctctctgagtagcatcttcttgtatcaagatcatcagggctttttgttctgtgatggctccccaagtcttgactcgaatctgcgtgtggagcgagataaagggtattgctcataccgtgcctaaactactttgttcgattcttgccattattgcaaaaattcttacttcaaagttctaacacagattttccctacaggatgtactgattcatacaataaagctggcagttcgaagtgactaatcgcttctagcgtgattgaagaatagtatgctttcctttctcttgtatttgtctatgctcgtaatgtttcgggggatggtttgcttctattgacatttgtgtttttctttaaaaaacttaaaacttcatgtcaaaagtcattcctcgagcagatgtgaaccttcgaccccgacagaaaatcaaggtgaattgggagcggatcacaaagaaatttgtgggaacatgatcagagatttttgaaattgaggggtattgattctatttttttgtcatagaaatgcttgattggatttcagtgttgggactgattctatttttgtcacagaaatgctagattctgtatcatataatggcaatttgtataattttgtcatggcagatattactgacttttttcagttttcagagtaatttttagtgatttgattctcttggaaactctttgcaaaaggctctttttcatgttgtgggatgtggtgttgattgagtttggtttggaaagaccatattgtaaggaaacttacaaaaatactggaatttgggttaacttttacaaaaatactatcacacggaaatcttt

SEQ ID NO: 298816 - DNA, 1596 bp, Cannabis indica
tttttttttttttttttcttacgaaaggttatttcaacacaataaccaataaaaagtcattggctttcatttaagcatacacaccactagactagtttatatcaatgtgttcacacaatatatttcatctatttttaaactatgattcattgatgcagcaacatatacatatgattagatttatatatacatatttaaacttctttatctaccaaaacactgttaagttgacttaaaattgtatttggatttggctctttcaacatcagtccaaaacactcttttggtattactaatgagcacatgcttccatgtgaaaacatacacaaaatggagagctatgatccattcatgcacataatttctccatttattcaatggcttagatttttgacacttggaatagagaagggaagaggaagaggaagtatttttctttatttatttcttttcatgagtttggaattgaattgagtacaaaatccatagctaccaacaaatttattgccccacaaatggtggacaacttaggagtacatttcattgcatttatttcataaaataataataataataacacttctagtgttgtttgtcaaaaaaaaaaaaaaaaaccacttctagtgtttggtagctacttttaggacaaaatacttgttataatatcaataacattatcatattataaaatattattgtgattttacatttcacaaattcgttatgaaaaacaaataatttgaaatgtctactcgatgggtccattttttttttgtcaatcttgcaagttgcatggttattgggttctatccaaaaggtgtggtgggggcatgggacatggaatagtgtcaccttaccatacccatcaccatcctaagttaatccaatccaatcaagctcaactcaactccaagtaaagcacacttgtcctcttttaagcaacacaaccaattcacttgacaacatttttgttttaaataaataaataaataagaaatcaatctgattggttgtgttggtgtaggaccaaaacatcacccataatttgcttatagttatatttatatttgtgtattttggggcaccaaaaatggactggactacacctggaaagtgttggtcttagaagtttggataaatgcgtagtactcagtactcactcactactcataatgaggcccataatgaggaagttgcctaggttcctttagctgttaataattaaaatacaattaattaaaggagataaaatagagcagggaggggactatgctaaatgctactattatatactaaaaattatgagacacatgcacctaaagaaaaggttatagtcttcgtttttattaatttcaaattgattgttttggcttctttctttattactattactagagtaaagcatcaattgttctacaattcaaatatatttatgaatggctaatcactaaagtcaggggccactttatcttatacttaagggttattgttgcaaattaattttctattgttttgattagattacagaaaattttcaaaagaaaataatgaagaaaatgttgaaaaattctcattacaagagagaataggagaatt

SEQ ID NO: 298817 - DNA, 5629 bp, Cannabis indica
tcattataatcgtgcatttaagctattatggctatgttgatcttcactttcctccactttagaggttgagctttcattcttagcatgaaaacaaaggaaagacagtgattgtagccatgaaactaatgcggacttccgtgtaacatcgtcggattctgcaactagtgaatataactcatttagaaccatcacctgaccatcttttggtagctgtacaatcagctgtgccaacaacttcatcaactctggtagcacctgcgtaaataagtaaatacaattatcgaaattcgaacatgaaaatagatgttctgtgtgtctattcaactactgtttcgtcaatatctcaattcaatgtaaagatcctaatagtatgaatagtttgatgcaatcaattctttatgcaaattgtaagcaaaatgacaagagagatcaaaccagtttccacaatggggatttaaaacagaaagcacagcagaacttctatctcccttctggaaattcattacatgaaggtaaattaaaattgagcttgcctgtatatcaaccatggaaataagccgtaagagcaaatccataatttttttacaaggttctgattccccttgccagttctgccatatatcagtctgctgggagaagtcttctctgcatagcctatctgttttttcaacgagacaatggatacagtaaaaaatggctggacttccagcaggaagctgccgaaccaatgcagctactccagaagccataccctcgaaaggggtaatgcctggatatccctgcacaatttcacataaaaacagaaatgaaaaaaagttttaccgccataaatatcgttaaaacaataagacagaaaaacaggagtaagagaacactcaggcttaacaattaggcataccaagagcgacctttgcatgtagtagaaagcaagctgctccttcaaggacactctttcctcttcattggactccttccctgaagataagaatgctacaaaagtagaatgggaagcacgagctacttttccatttggatctcccaaatatctgatttcttggtattaagaaagtacaatattccttacaagcatataaaatatattcatgaagaccaagtttttggcacaggatacaagaacatggttggagcaaccaccttcccaaatatagggctaggcaaacgttcaatgcaagttgcaatgactcgtaggtaaaatagaactcgtgcagtttgaacctcatcttcacaccataaatatttcgttttgtgctggagaatgaaggctgaaagattatatgcacacaagttaacatatactacaataaaaatatcagatgagtggaaaagatttgaaaaggaaatctacttagacagcatgcataccaggtccatttgtcaaatcaagataattgggcatggattctacaaacgagatacaagcagaatcattctcttgaatggtcaccacaacctcgcgaattgtatccatatactcgggcaagcgaatacgacgaaagtactctaaacaagaaaaggcaaccagtatacgtacagataagtctactttagcctggttcaatttggagctaaacttatgtttggtgactgttaatgaaaaaactacaaccataagaaaagcagattcagtgattttctctatatcggtaagtaactcattagattcgcctcgcagtgccaaagccactttccgatgctccatgtaaataaaatgacagtaatcccacataagattctccaccatgctttggctctcttcagtcactgaagcatactgactgcaaagaactctagttatggtccctgcttccttgaaaagggcatttaccaaatgttttttaacctcattatgcaatattcgcgctggatttccatgtgaggactcaagcacttttgtataaaatcgtcttaagggaaatatctctatcaataatgcagaagcaatgcataaaaataagggagagcgagaagacactggtccacttcgtgccaatgctaaagagagacattgtaaggaaaggctgaccataaggtcgttttgagaactataaaaatctcttgtggaagaaatcaaatttcttgctacagattctatcctatcctccgcagaaactcttagccttgaaataatatctagccgcaggccaccagctgcagatttattcaatgtcctcaatactcctgcagcagccatgacaacagcaaatggaacatagttttccttcatggtttctaaagcctcatgagaaaaaacattaacattttccagagaccgggaactgatcaagccagaagttacccattcaatcaaatgcaaaatcatgagcccgtgagtaaggctaccttgagggcaacctactttgccccaaattcccaataaaatgtccaaagtcctaacataataatcacacacagaagagcatagagcatacccgattcctgcaagcacatccggaacaattgcttcaaatgagcccataagttgatgcttttcttccaacaacttgcaaatcaactccaaacaaactcttttggagctttcagatgctgagcgcacgaaagcaagggaacccaaaaggagaacaccttctgaaaacaagagagggttctggacatgatcaaactgacaggagaaatactgagaaatgacctccacaacagaatcaataagagctaaagtgggtctgttggacttcctgacccaaatataaagaagcctaaagaaaggaggataagattcgtgagggagattaagttttggcgaggaaagaatggaaaggacaagctttgcttggggttctgcaacatgaagagaagcttgagaattaataagagtgttcaaagcttggagatgattggaatgaaatgactggtgttggagggaatctctaagctcagcccatgcctgaatgattgctctagctgatgaagaagcataagaatttttggtactactactataaccacagataccctttagccaatcctcaaggaaaatactattaacttgctttgccatcttaaaaacgtccaaatttcattcataaaagcccaattctaaactgagcacatgaacaaaataatgcttcccacaaattaaggcttacccaaaacttcagagagatttttctaactaccttaaagaataatcatgaaggaaccagaaatctcactaaatatgtcccaggtatgtactccagttattgctgcgagtgacaaaaaaacaaagagagattttcagccattggaaaagaatttgactcaagttgaacctaaacgataacgataattttctaacagttcgacatggactacataccaaatagcagagaaattctagtggccggcggaaacggcttccggcgaagaaaatgataatcgggccgtgagtttccgcctgggtattcgctctttcttctaagagccccttttcagtattcagtataaatatattattaattgaaaagagcagttaattatttagtccttccttcaaaggagaggaatgaagttacccacatacacaaatgcaaaatttactgtcaaaatttcaaagcttttcctagcaaccgacgaaaagaaagagcctttttcccagcaataataaaacacaatagaccacttcataggaaataccttctcttccatttctcatgactaagcagatttcgggtaataaaaattccagccagctccatctgtatcgacaatctctatcagctttatctttatcggtaatctacgacaacctccatcttggcaatgtgaagaaggtaaaaatttcaattttattgctttttgttttgattatttggaattttaatttgcttttgtttttactttttttgtttgtttgattttgatttacatgtttatcggcattcttcatcagcaacataaaatttaggtgccttgttttttaatggggttgtactcctttctttgatgtctcatcttccacaacatctcgaacacatgaaactgtgtctacttttctttctttttttttttagaaaagatcggttatcataaatcaaagatcttttacaacaacagaaaaaatagccgaaggaattttctcaagccaaatacaaatattatcctacattaaagcatgtttcgctaatccatgagcagcttgattagcatctcttctaacatgacgaacacaaactaaaaggaaattggataaatgttgatgaatatctgcagccgaatcatgaaagtgagacttaatggttgttggattgttaatagcattagcaagaagcaaagaatcggtttcaataagatccaattgtatattcatattctgagctaaaagaagaccatgaaacatggccttaacttccatttcttgtggccgatagcgaccccgcactaacttagacataactgctttgacacacccagatgaatctcgaataatgataccaaaaccaattttgttgttagatgaatcataggctgcattattgttcattttgaggcagtccagaggagaagctcgccatttaattggagttgcatctccaccaggatgacaagctacaacaccagaggaagagaaatttgcaccatctgcaaatggaatatctgcaacaccagcagaaaagcattctacaccagcagcagaaggaaaatctgccacaccagcaggaggagtaccagaaacactaggaagactatttccagtgtcaccagtagcataattgccagtaacagagtgtattgaagcagcagccttatgataattgataagataagctaatgccttagaatggatttgtaaagaccgcttagtttcaatttataattagcagataattagagtttaattatgaaactagaatattaattatgatttatcattttatagagatttatttgaattcgggatgtattatttatactatatatgaaagtttacgttttttatgttttgtgtcacgcaacattggaacgcggcgtttggtcattagaatcacattttagtaattttgtagttgcggggcaatatagttagacattaagaatgtcgggaatagtcgagattttagagatgaccaaattacccctaagtaacttagaagttttttggtttggtgatgggtaaaatgatctttttggccatttgatcccttatcctttagtgagatttatttacatttattaatctgattatttctttaattagtttagttagataatacttaaattattccttttattattcaaatagaaaaaaaaaatctaataaatcattctctctctctctcaaattgtagtgttccaatccaaggtatacctcccttagctcttcctctttcatttcttatgtttaaagttaaggtttgtgcatgtttggagttcttagttgttgtagttattgtttatttgtgttggagtgttctaaagctaaattaaggataattagattggtttgagctaggtttgtgggctgtctgtggtgttgtttaagcaagctttgagtttaagaactcatcctttgctctttaatggtgtttttgaattatgagtttattacttgatgttgttgcattgattctattatatatgatgtaattaggtactctcgaagttattgtga

SEQ ID NO: 298818 - DNA, 2900 bp, Cannabis indica
gacgaatcttgtatgtgttcttaagaaaagaaaaggaatttatttatttttcagggtctcttgaaggggcgtggaaacacataaaaactcttgaaaatgaaaaagagatttaactccagctccttcgaaaatggtaagatcatatgataaaaacaataactaattgattaaaatccattatgacaacaggaagagcagtagagaagagagcataaaccttgagattcgaagcctctccctctaaaccaagctggcttagaaatcgttgctgccatggagaaggtgcagagaagtttggggaagaaactccagcagccatacttgcagcatccagaagagctccatcatatctcagctcgatacagtcataagggtttgatggtatcacaaatccataatccagtagaaaaaaatcattatttaaattgccatagttaattgctaaaggatcattctgtttaattgctgtttctgccacaacctgaattaaaatagtatcttaactcggtgacaatgaacttattaacctacccttaatttcttatccgaaaacaaggtttaagatgaatcttttaccttcactagcatctttgtattatccacaccttgctcctgaacaattcgggcattgggttcaaagctatggttacacatatcaatgagaggaagcatcatgggatcatcctcggaagtaccatctgggagctttttaccatgcagacgaaacgcccgagatgaaactgctgacatcgcccatccaagggaagatgcatccacatctaaaccaccaaatgggtggttaattagctttaaattttcaagagcacgtctgacttcttgctcaaaatcaagaagaaatcggcatctcttattcacctgaattaagaagaagccacaactacttcaaataactgcagaaataatctttcaatcacaaaactaaacaaaaaaaaaagttatagagatctctactttagtgcagtaattgtaaggagactctttcatcaattcaaattcgctcaattttaagtttataacaaaggattaccaaaatttgattcttttgctaatcttttaactccattctagaatcaagatagagatgagactagaatttatcttagttgttgcataaactaggctcttccattgtagtttagaacctccttgaaatatagaattccacttcaataggagaataatgtccatgtaataaaacctttcaaatcacaatgaaagtaatgacagtgtctgaaatattccacaatttatatgtgaataggttgttgatacaatattgatctaatccaatacttgaaagaattagaataaatgtatcttaatcttatcgatatcaaagaaagaattacaaagttccaaagtttttgagacagtttggtaacaaattcattcctaatccttgacaataaatcaaccgctctatttatactaactcctcccgattgttttaagctcgcgccataggacaggaacatttgatctcagcaactaagaatttgaaaactcagccgctataatcctaatcaattacattcaagagacttatattaagacctaacagttttctataaataaaaaaaccatcttgaatatcttatcgtttgtgtcatttcaaagctcaaacaattgtacttccttggtttgtataaataaactcaacattaggataaaactaaggcattttcacagttcagatattactccatctccacataacactttggcttggttgatcatataaagtacctgataaagaagaggagcatactgcaagttcttaatatcctcaccagggaagaaaattggtacactgtaagcttctggaagattgctgatgtatggccaccaaaaagatccaacctttgctctttcttgaagaagcttcaaacccaacttcattgcccatagttcctctgccaaatgcttccctcagtgtccattttactcaatattcataattcagtatagcctaacgtagacaacttcaagttactatacttaatgcattcatagaagtttaacatatgtaatagagatcattaagcatttactcaaagaagaaaacccaattgactaaaacatggcagaagctatcaaagtgattgaaataataatcaaaactataaacccaccaggaactttttgagccaaatcgaccagaacggagtgaatttcatcagattcaagagacccaaatctcaaaggaatatgttgaggaagggaaatgagttcagacccttttgggatttcctcagaagcaagaagcccaagaccatggctactgtcttcacctatcttcaacccatggtgaacgaaccctccttgccttcgaacccacttgaccaaatcatgtggctgtgccaccaaacgcccaggataacaacctgaagaggaagcggcggcggcgcacgttagagggcgaaagtgagtcagagaagccattaccatcttcgaagctgccattgttatggaactcgactcactactcgaatccacttcagtccctcaaatgctaaaaatacaacccgtcgggtcaacccgaatagaccgaacaacccgttttaacaacccgatgacccgcaaacccgacaggcatcttcgttgtacatgaagaaaaaaaccatgaatgagcattagaggtcggaaactgagctagagaagccattgccacccatctccgtcctcactttccactgaaatgcattcccattggattttaagatatgtcgttcggtttcgggctatgtcgttttgagatcaaacccggaaactaacccgagggtttttcaggaggtatttttgccggataagctttgtaaacctcccagaggacggtggctctccattgccgcctgcttgaatgaattcactgctttttt

SEQ ID NO: 298819 - DNA, 2114 bp, Cannabis indica
agaagcttcctgctgcgaacaataagttcacttacaactgcgatggccacaccttcaattacctcgttgacaatggctacagtttgttctctttccatccttgcttttttcttcttgtttgtttccttaagaaaattatttgtagtctttcgatgcgcttagttgttgttatgaccgttattggaagatatgtgttgttcagattcgttttcttcataatcctactatttggtcttgcgatctggtctgactttctgttttatcccgtctttgatgcgaggaaatggcaggtttttgggggatgtagatatttttgggcttttttctttttaaatatttattagttcgtctgattgaatatgagatacggtgaaaatgagatgaagccttaaaggacttcttttgccaattgaatgcggttcctgaaaaaaaaaaatttgcagcaaggatgatgatggctaactaatgtctagataatgatcttagggccattattccacacaagatggaacatgtaaagaatataattcacatagtgtattggtaggaatattatcaggtagaatttcatgcaaagatgagttcattgaactacagttaattattctcgcatttctttgtagttgatgttactaacacagtgattactgttgagtgttttgaaacatactgaaagtcaagattgagcctctgaatttactatttattgaatgttattgaatttgtaagtttggctaaattatcaccatggatgttgaagttatttagatggcttgtacatttcttgatgaaagtgaaatggggtatatttttgtttctctttggattattaagagctaacctcataacaatatagtaatataagttttgatctatgttataacagtattataatagatagtgatgatttgagattttataaacacacatgcaataaaaaaaaataatatataaatgttaatgttgaagatagaaaatatattgtgacactaatgacctgatcatgtaggattgtagccaaaaatggtcaattaaacagagcaaatttgttgctatttaaccatttttgttcttcattgtatgttgtgctttacaattttctgtttcttagtttggtttcataatcttaacaatcttgtaatattgttgtgctcaaacccaacctaaaattactagcaagattcacgttcaccttatatcatttctctagttgaaatatttctttaattgataataacagtataattgaaaatattttgtcctaaattatgtgcaagtgtacttgagtacttgaatatattcaataatggactataataccgagcatctaaattgttgaatggacttagaacttcttgaaaattgacttaatcgtaatttttaacagtttacaaaattaatttaaatggcaacactatattacttaaatgattttcatttactaatcaaagtatgttcatcttgcagcttattgtgtggttgctgatgagtctgtcggaagacaagtacctcttgcttttctagaacgtgtcaaggatgattttgtgtcaaaatatggtggtggcaaggcagccacagcacctgcaaacagccttaacaaggaatttgggtattaagtccttgtttagatcattgagaaacttaatttatgttttttattgttgaagtaaatgaaatactcgagctattccttgcaggccaaagctgaaagaacacatgcagtactgtgtggatcatccagatgagataaacaagcttgcaaaggtcaaggcccaggtttcagaagttaaaggtgttatgatggagaatattgaaaaggtaggcatgcgattgtccttaatatgaaatgggcagatgctacatgttatgtattcaatccaattgcccactttaaagcacttatgtttacttgatcgtgaaaagggtgctttccagattgggattgatgacttaacttgagagtttcaaatcattatgccaatctggaaattctgtcccatgttatggcaaaattttggttcttggaggactggatataattgtccaacccactcaaagggtgggtgggttaatatagtcctaaggaaagaaactattttttaaaaataaaaaat

SEQ ID NO: 298820 - DNA, 2698 bp, Cannabis indica
aactgtaaagccaaacaacttcttagcttttcgtgttctatgcaagaaagtgaagagaaacagattttaaaagagagagattatagagattatctgtcaaagaatgtgacatgaaatctcctacaactttgtaactattcaagcttggattatagttgaaagagctaaacttcccgaggatagctcacaaggacgtagccaaaagattggggtgaaccttgccaaaagattctgtgtttgatctctactttgctctaccctgttttctgtcattatatttttcattctcattccgcattaatctctttgatttgcattgtgagttgtgtaggaattcaagttagaatcccaacaattacttttaccacaaatatcccttcatactaatgataatggtcttattcatgaaaatagtagtgacaccaaaagtggaatgcaacactaaccatctctagagatagattatagttctcatctcaactagaacgttctgttttttaatcttgaaatgaatagcataactatacaagttgtgtagtctaaccttaagtagattttagatgcatattcagtttgaaaataggctcctgtcatagctccagcagcatgtagcatatgtctaatttctatgctctcaaacttgctttcattctctaagatatccaaggcagttaaaccaaccatgttcttggagttaacatctacttttgactttactagccattttatcaccttcataataggtaaaccaaatagctaagtatagtagaatgaaccattcacattgcagtaaaaaaaataaacaatattattcttggtatcatgtgaagagagctaacctggctttgtttttttgatgctgcaatgtgaagcagagtgttaccatcctcatctctccagttcaaaatcttcttctcaaacctatacacttcctcatagcatacttctgtaagccatctaagaaggatctcaaaggcttcaactttgtcatttttcaaagcaatatgcagaacagtctcattccgaatcgtgacatcttggaaggatttcggacaagctgataagaaagcaatcaaaagttccaaatctccttctttagctacatggtgcaaaggggttatgctttcccttccttgtacacgaacaaggtctcgattgatatctataagccgaagcaccattcgggattttccattttgtaaggccaagtgcaaagggctaaattgatcttggtttagctttctagctaaggatggttttagtctcatgatttccatggcaaaatgtatgtggccttcaaatgcagctatgtgtaaagggttatcaatgaataagagctcttcatcaaagctttgtaaaacttgtgaacactctccaatgactgagtacaagacattgatatctccttcttcagctgcttttatcaacttcttgtccattatgcaaactaaattatatattattggttattggtaactttccaactttgattcttcactacaaattatatataatattgagaattaaaaagatatagacagacacaagagcctaaaagtctacaaattgaaggaagtactgaaatatatgaaatattcaaggacttattaatgacataaacattcctttaactatatatttatataattttgaagtgaacaaactatgtgtacttttgtttataaatattccaggaagcaggaactagagagaatagtatggagtttaaaagtatatattgaaatcaaggtgatgaagacaccaaatatgagatgtaatttgaattggtaaacattaacatttagcttaattttatgactctgtctttggtcagtctgttcaagtctttttgttcatgaatctagaagcaattaattcacatatgtttggattaattcataataaaccacatccacatgtgtataactataactttggttcaataaatctaacatttatacaaacatttggaaagatgtttcatccaatcattatcatataggaaaatttataagtgtagggaaaaaaaaatggtataaggtcaagtcatcctcacaagtctataagcgttgcttcttgtgaattacgttttcttcttatttgaattttttggctattaatagaagaagacttgtgaacagttggcgcatgttagcattgtttttgtaggaaaatgagttaatattttaagagcaaatttttttattatttgactttttttagtgttgaacttgaaattattgtgaacaattgacgcatgttagcatggtttgtagtaaaatgagttaatattttacgagcaatgttagttaattgctcacttctttcctttttttagggaaatttttaaatatgctcttttattatattttatttataattttacggtctaaatttttttattttaaaaatacgtttgtaaagttttaaaattacgaaatacattttactcagtaaaagtgaaagaaacaactaaaaataatgaaaaattaatctcacaacaactataaataaattataaaacaacacaaaataaccagaattataaacacatgacaactatgatacaattataaataaattattaaacaatcaaaaaacgatttattatttttattgaagaggtatttttgtaaataaaaaaagtttaaagagtaaaaatgaaaaaaaaaatccatattgaagtatttttgtaatt

SEQ ID NO: 298821 - DNA, 1692 bp, Cannabis indica
gatttaaataacatttttacaggagtattaaaaacagcaaatacaactgtaacatatcatatctttggcgctaactttatttagaattaatatatatacagaagctaatcttataagaaagagttaaaggttttctctggttctagctcttgcagccttcggctggtgctatggcaagaacaaggtcgaaaagccatggaaagcctaattctgctactaaaaattcgaagaaaaaagctaataaaataacttctgatgagattcgaggtgaagagttggatcgaatcacggagattgagcctttggaggtcatggatatggaggttctgcaggaggatgatgctctcacagatatgtttcaacctccattatcccctaattcatccttggaaacgataaagcgacaggaggaaattcgaattgatgctcagaatgacttcatccacttcctcaaagccaatgatcgatgtaatagtaaccttcagcaaggtaagaattcgatttcccctatattgcgatccagttctgtgaagcataatctggagaattcttttagagaaaccagtcagagtaatagggtgaagataacacttgatgatattgaggaagaaatcttattttggaaaccctcaattgtatgctatgttctcggggttaatcctcctctgcatattcttgaggggtttgcaaataggatttggaaggaacaagttgatcgagtgaaggtgttgtcacatggcatctttctcatacggttcaattcactggactatagggatcaggtcattaatggaggatacaacttcttcaaccggaggccagtcattatgaagccttggaatcctaatgtcaatttcaagaaggaagatgttaaatgtgtcccaatttacatccaacttgaggacttggaattgaaatattgggggggaaatcactttctaagatagttgggcaacttgggaagcctctcatggttgactctatcaccaaggagagggaaaggctgaactatcctagggttcttgttgaggttttcatggatcaacacctcccgaatttgttagactttgagaatgaatttgggtcgaatacgttagtaggcatcaaatatgaatggaaaccaataacttgctccaattgttatggcattgtacatgccactgctgactgtaagaaagttgctgctgtaaaacagcagtgggtggttaaaaaagatagcaggaaagtcttggaaactgatgaggagggctttactaaggtctcgaaagggaagaaagatgatagagaagtgaagtccaaagaagaaacgagtgtaacagtgatcaacaatacttttcagcctctttgtttggaagaacaaaatgatgtgctataatatgctgctactgatgctgcagctgatttcaatgagacaggggtgattttagagtcaacacagggaggggggggggagatccttctctctccaatggataaactccttcggttgaatgtccgaggagccaacaatcaagctaaacaacaattaataaagcaatttattaattcacaaaaggttgattttgttgggcttctcgagactagagttaaggctccaaaacttggagccttatactccaatgtatttgatggttggtgtttctcttccaatatagcttggcatgcaggaggttgttggattttatgccctaa

SEQ ID NO: 298822 - DNA, 1448 bp, Cannabis indica
agatcaaagattttcagctgaacgagattcccaatggtctctggtatgctcccggagagtccacatgacggcatgaaaagagtctggagcttggtcaatttcccgatctctggcggcagagaactctggttcagagtaacgtaaccaatacccaaagtaattaactcggtgagattccctaaagaccatggaatctggccagtgagatagttagacgacaaaagaagcactgatagagacgaaaggaaccccaagctttcggaaacattgccggaaaagctatttgccgacaggtcgagatactgtaaactgctgaattccggcgagaattccggtaatggcccgacgaggaggttgttgttgaggtcgaggtattggaggtgagaacataacaagagtgcctgagaagacagagtcccgttgatttcgttattcgaaagaatcagattccggagactccgaacccgacaaaacccggacggaaatccaccacggattcctgttgcagatagattaaccgaaactacggcgagaggtttaaggtcacaagtgattcccgtccagttgcagggattacggtccttgttgggaacccaatcgtcaagagctccattcgggtcttcgagttgggcatttttgacccgaatcaaaatatcagtgtctccggcgagtgatgcggcagttaaaataacccacgaggaagatatgaagaacaatagttgaggaagtgttgggttgaggtatgtcatggccaaatacagagaaagatggaagcttttgtctgtgagtgagagggagaaatgaacatagtttgaggactaaaataaaggttgcagtgtggtgtttgaactttcatgcatgatattggtgacgttgacaaggacgaggtagacttgatttgatgagtggccattgaaatgggccattttgtttcaaagtcttcacatggaatatggatagtggtggtgggtgtttgggaaactgtgaaacattttagagagaaaaagaggagggtattaattgggttttgtttaatgttaataggttaattattagagagagagagagagaaatgcatgagaagcgtgggtttagtatttttggctttttgttaatgttaatgggttttgggaagtgatttgttttactgcactaagaaaataattaaaccgtttcaataaaatattaaatggtctttggccaaaaaagagtagcgtgttctgtcaaacgaatatatctagaagaaacaaaaaaacgtgaggctttcataattacaaaacttacagcaaaggggtaacggtttggttccatttatagtgtgtccgtacaaacccgaaagtggtaatttgttatgttttgtggatgtggattttgcattttggaagggaaatttaattttccatacttaaaaaatgttcaaaatttttttttttgaaccaatacatttt

SEQ ID NO: 298823 - DNA, 4313 bp, Cannabis indica
tcttcacttcattcacactcttgtttatactttatttatgcttctaacaaataacaagtgtatattgactggcattttggtgacaggaagctaaaaagcacagcaaaccatatattgatcaggttgctactgtggcaaagcctcacgttgaaaaagcacacgaggttttgaaaccctatacgaaaaaagcagttcttgcttatggcaagtttctacaatctgcaacgacataccaccaccaggtattgaaaagtttttgtagaagttaacctatctaaacttgattattgtattctgttttacacatctctggttgacagtgccagtttggcgctgcttctatctttatcattacacttacctcattgagtgccagtttggcacagcttctacgtaagctaaaagcacttttttaataagctatagataaaaagtcgtttggtaattttcttctcttctctcttgccactgcctgacgccagttgtttgtacctgttgaatatcctcttttacatcatcagttgatttttttcctcacaacatagttatagcaacttttcctcacagcatagtttcagtgcagatttttctcacagcacaactacatttgtttttttttccacagtgcagctatgccaaaatggtcctgaatgatgttaatttatttttcatgtgttaagtctatgatatcttttttatactctgaattctgatcaagttagtcaattcttcattgcatcagaaaaaacttgaatatgataattattgctttgttgatgaaaaagtgtaactattaaacacgagtattgtagatgcccttaatgttggtaactcaagaattgtgttaggatagatgatatatatatatttatatagcaggcaactatagttagggcataacacacacacaaatgtgacacacttatgtggcaagtcacttttgataagtgagaaataattggttgaagtgacttgacacataggtgtgtgtcacatttgtgtgtgatttatgtgtgcacatatcattacttcttttcttttaagtaatgcttctattttgttaaaatctcttaataagaatacaattagattggtcctaaagttacctattttagaaatattgagaagtgtttcacaaatatattcatatcctatttctaattaatgtgtactttctaattcttattatatatttcctattatgagcatggcacgtgtagtctgccaagtaaagtgccatggaaagtatattttctgggaaaactgtagcttctttgctattctgactgtacttcctgtttgtttggaactattgtctgtgcctactgatctatattaaaaatgtatatgtaatgcttaagctatttaatttgttcaatcaagttaatagttttttccattctctcatcaaggttcaagacactgtcaaagagacactgaaaaaacatgaactgacaaaagctcttgctactaaggagctggagtggtttgcggtatgtatatgttgattttaaaaatacaagtcgcgtgttttagctattttctactcaattattcattctccaatgtctgttttctgttcgttcactggtaatgcaatgttcaggcctcagctttattggcgctgcctatcatcattctgttcagaattttcacatccatttttgggttagtttttagcagtaatttttttttgtcgtctttagtaaccattaaacatggactgggtgtctttatgcttcttattgtttattaaatgtgtcttctctgcagcaaaaagacaaagaaaccagttagaaatggtaatgcccaccattcacgtcgtaaagctaaaaggggacattcagacaagtaggcaagggcttgatatttcactaatatcacggtgagaatattagttctatttaatagtattgtgaaaaatgtttatatatcaaattctgtctaatttatgcgtttccagtttagttgtaatgctcaagttgatagcgagctcctcatttttgtgatcactcttttgctgagctcctttataattgttctgatttgtcttttctattgaatcactaatcacctaaaaaaaaggctgattcttttttactgtatgtggggcatctaagttgttgcttgttacttaaagtagactacttttgtgaagaaaaaaaatcaattcaatgatttgctaggggttcacattcgatacagggacccagtgagtgggaggtgctttgtaaggggatggtttttgggattgttttcctgtactggtagttttagctttgtttgttgggggttcttgggtgaggaatgctctcaaacaatctcctttggtatttatatttagaatatgtggaaattttcatttccattgaaaggagtgtcagctatgctgccctcaactgggttactcactagcttaaacttgttttgtttttcaactttaaatgtttccaaaattcagacttttatgtttatgatgaaattccgagaaatgatttattgccaaattcctgtcatatgctctatttttcccttttcccttagagatgtatgtttcctatttttgcaggtaaatttgtgctctactgaagggttttttgtggctattgtatcagtcaaaagtctatgccagctttctcccctttttgtgaaaaaagtttttagcttactttatcacactacgcaaatagacataatggtgagagtttagaagttttgtgtgctagtttatgttattttgctaaaatgtgtaattttattttttattcttacacatacacagaactaatatcattttctctatttaagtttcacaacatctgtggtggttttattttatgttaggaggtgggaattaggattaactgtgtaatatcttctttacagaactaggtaataataataatatcaatacatactctaggattggtgtgtttggtagtaaaatatgaagaccgacgtggttattagataatgaagattgttaattataatttcttattataatttttttttctcacgaattcgaaaaatgtgtagtttttttttcagcggagtttattatagttataatattattcatgatatttttaaaattttttaaatagcttatagtgttaaaaaatgtatttaaaattttctgaacacacgtagtaaactaaaatatttaagaattatgttgttgatattataaattttagtgtttttttttgaaaatgtatagatttgatattgtaattataatatgaatcactatgaaagaaatgtagaaaaaatatattgcattatgtgttttcggatgggaaggttgagaaagtggttgaaataagagattagtagcacttataatatagtttgtggtagagtttcgaggggtaaatgagcttggcaccatgctattacttgttggatgaggatttaggatgggttgaatagtatttagagtagagaactaaaaagtgagaattatgtcgtcagtgactcagagtagttttctcctgtattttgttgttgttgttgttgtacaatattttgtacggattgctagaacaaaagtggtgcaattgtttttttttaagattcagacctcttaatctgaataaacatctacataataatttactaatttaaatattaaaatatttaaactgttttttttattattattttcaaatttgaatgtttttataatgttttattttaggtatttaatattaacaaatttattagattgtattttattctaaaaaaattatccaaaaatttaagtacaaaacataattattttaagaaattttaagaaccaaatcatcttggaatgaaattcatgtgttctctgatttctcaagttgctatccgaagtcttgtctttgaacaattgccttccaaatttgagttttttaaacgtgagttatcggttttaaatttagttaaaaagtttgatgtttgtaaattttcttttttgagagtataaactcttttgcggatggtcttgctaaaagagttagaatttttagcacaaatgttggtttgttttaaagagagggatttttctctgtgatttcatattttgtttttagttttaatgatcttcggtattaatgaatgaaataaaatgatgttagtatcagattataataatttattataaatttcttttagttaatttataaattaattaatggtattaggaaaaggccaaaaactaatacaatcatcataggtggcgtttggttgaaggtaatggaatggaataaaaagaaaataattttaattttatttttttgtttagttgcatattaaagtattgaaat

SEQ ID NO: 298824 - DNA, 3427 bp, Cannabis indica
aagttcattcatagcaggtgtaaccaattggggaatagactacaaacgttgcatcaagagcttcatcatccatagctgatgctgaaaaataccagcaaaacagattcaatgacagcagccataccatccttggatgtaatccttgctcctgtagaatccaataggaacttaatttgtgttagcttttcgggaagaagccttggcatgaaaaaacttggtatttcagtctccaagtccaagccattcaacacgagaacgttgttgccaataagcttcctcttgttccaataattcatcaaggatggattcagattttttaatttcagctacatggtcccaggtggttggtcccaggtggttgtcgaagcattgttgagtgcagaaacttgttgttgagctttttttatcgaattcttcatgttaccatactttcgaaaatgccactgttggagtcgattagcacaagcatctaagttgtttttgaaggcagcaattaagtcgacagaggaatgcgaatcggaccaaacattggagatgatagccttactatcggggtctgataaccaaatcttttcaaatcgaaatcggcttcgctggtttataggctgagcaaccgatgtggggaggctgaaagtggccgagatagctctatggtcagaattgaagaaatccaaatgctgtaactgtggtagagtgaaagtgttctcccaatggtgattgacgaagcaccaatcaagtcttccttgagtgaattcacagtgtgccgattcttaacccaagtaaaagtatctccaaaacaaggtaaatctgttaagtgacagtaatcgagagcctgcctaaaagcttccatctgagtttcatttcggagtgagccaccaagtttatgatcatttgacaagatttcattaaaatcaccgatggcaagccaagggagaagcggggcggtgtccgcaagtctttttaaaagcaaccaagaatgtggacgattaccaacttcaggagcgccataaaacccggtaaagtggaacacaggttgcaaatcgaaggacaaatagcaatcaaagtaagttggaccatagtggatcaaagtaacatcaacattatcgagccataacaacagaagtccccctttaagaccaatccgaggagcttctagaccatgtgggaatttaagagactgtttcaaccgagaaattgaattctgagaaagttttgtttccattaaaaacaaaacatggggagattgctgctgcaccagcaatcttaagtgcttgaatgaactcgggttccccaaaccccgagcattccaactaactattttcatggcgaagagcggggttgcatagcaacctccgcagagaagtcatagcaatcggtagaatccccagcaagcgaagaaactacagattcaacaccctcttcaactgaccaaggagaaggagtagcagaggaaagtccacgacaacgtttaagtgttttccgcaaggataaggaatcattctgcctcttacataccgagttaggagcaatgttttccttgtcgatgtgaatggggatatgtatggtgggtggggctggagtgaagatctgtttacccttgttggagatggtagtatttttattggagacataggaggacggaaaagtattagtggatggaggataagtagcataagtgttcagagacatgtttcccaaatcaggtgtgtatatatgcgataagacagcgacatcaggaggagataatgatacgggaactgatgatgaggatagagatgagatattatagtgttgggagtccttgacactaggcagtatgggtgttggggatgatgtagaggtattcgaatcaaccataataccttttaatttaggactggtatgggccggggtttggtatatagtgtgagagggttgcagtgagtgtgtgttgatctgagggatagtaggcagagtaggtgtcgaggaagaggagttggtaagtggtagtgtatggtttagagcaggtgttgatgaggattctcctgcaaaaagtaatcgaggttggggttgtattcgggaagatgaaccaggaagagttgccgtaatggactttcgagccaagcgggtaagcaggggccaagcattcccttttgagaaatcagtacggtatcgatcataactatccgaaggtaatttagagcctttcatccatggaccaaagggaagatcatcatcattaccgttatccattctctccatgaaagaaacacattgttcaaaaggatgaccaagtttcccacattcaaaagaaaattcagggagtcgttcatatcgaaaatccacccaaaattcatctcggatatttggtaatttaatcatacggcctcttggtaaaggtttggtgacacaaagcttcactcgaactctcagaaaaggtccccatccttcattggtggaatcatcgtaaacctcaagaaaatcaccaataagattggccaaggcctcagccaattgtgcagacttactcaagaaaggaaggcgataaatctgaacccagaatggagtaaaaaccagatcctccattgaggcattctgtagagcatctggtgtgtgcagcacaatgaggtgattttggaagtgccatggttcttttcgtaacacacgaagtttatcacctgcacaagcaaaagaaacatgaaagatttcatcattgtagtcagagatggaaaccggaaagcgacccttccacaggccagtcatttgatcgcaaaatctcggtttgtatactggtgtagaacagagtacacgggcaagaaggacatgagcagaaggtgttttatttgaagtgggaatagagtcaggaagcacgaaaacattactttcttcattagtgagtgagagtgtagagtgtaaagaatgcgaaagggaatccatggaagacaatcgaagaacagagaaaggtggaatcaagaaaattgagaaatcatcaagaggcagttaaccacgaagaaggagaggaaaaaccaccatcaggatagaaacaaatttgaaatcaaaatgaaaacagttaaaaagaaaataacggaaaaaaccgcaacagaccccacatgggcacaaaaaaaaaccgatatatggagaatcttcattgaaaaacaaaaggaaaaaaaataaaaagaaaaaagaaagaagaagaagtattgtgagagagagagatgtatataaaacaatttttattaaaaattaaaaaataataaaaagaaaaaggaaggaagaaaaaaaacgtgagatacagaataatatataaatatgtgttttaaaaattaaagaagatttaaagttagatatttaagtttttaattagtttattaaataataggaaatataatttatagatttatgctataataaaatattaaaaatgagagatgatgagtccatatttatc

SEQ ID NO: 298825 - DNA, 1474 bp, Cannabis indica
ttttctttttcttttccatttgagtttgttgtttgttttgcttagtacgaggacccaatgcgccaggaggttgctcgacaatcagtccctatagatgagctccaggagaaagcgttggtttctttggcaaaggtgagagaaccacaatttatattaggaatcttaactttctataagagtgtacagatgtaagaacatgacttactttatttgttgccaatcggttttgatttagaaattcatgataaaaaataatagcaagccaaaaatagctgctggatatttgtttatatatattatcatgtcataggagggtgaatttaatccgtctaaagcagaaaaagatcacgctttcctgctggagcttcttttctggttcaagcgatccttcaggtgtgttaactttgttatttgaaatgttaatgattacaaattacaagttacaagtttctttatcaaatttaatgccaaagactagctaagcttgttacaattgtttttgctgttgctaagcatatcagttatcattttagtttggtatgatactattattattttacaagctctttatcttctgtttctccatggtgtgattgttgtagttgggttaatgcacctccttgcgatagttgtggcaaggaaaccataagccaaggtatggctgctgcacttccttctgaacttcgttatggaggttctcgagttgaaatttataggtaaaacttactgagaaaatagtttttttttcctgagttttacttttacttattgagtttttgctactttcttagtattttttatcttcaaaaggtaacgtatctctgttttacatgttgtaaggttgaccaaaatttaagtcaattatatgatttgtggatatcttgataggtctcataaatcattccctgggtctgtcttttcatttattttttttatacttgtgttcttgtatgtgaactggaaacgaaccctcccattgtcttacatgtattgtattttatataatgctttgcagctactttataagaaccatgattcagtaacattgtattttaccccgattgccgaattttagctatatgttgtgtgttatacttttcacaatgggaagtttgcgtcttacttttcagctgatagaagcatttctttggttatggtttttaaaaatggatgcttattattgcatgtgcttcttaatattctcagatgcaaattttgttcaatgatcacccgtttcccacgctacaatgatccattgaaggtatatatgtatctattaagcacttttaggcctcgtttggaacgccgtattgggtcgtattgtattgtattgtattatattgaattggattatatatcatatttttatataatattatgttaaactttaatttatactaaaatattatatatttaggtgtctataaaatttaataccacgtatagttttacgtaaaaatattgcataaaatac

SEQ ID NO: 298826 - DNA, 2423 bp, Cannabis indica
caataaatcaatctcacaacaacgataaatatactaaaataacaaaaaataatcacaaaaataaacttatgataactatataaaataataaaaaattatttattatttttactaacgagatgtttttataaatgataataaattttaaaagggcaaaaaattatgttgatgtatttttataatttttttgaaaatttttggtctattttgttaaattttttttttaaaaaaaaatctaaacttattaagagtatataacaattaattttttgtgaagggaaatagagactaatttttattatactcacatgcaaataagtttatattcttaccaatatatatacataaaaaatacatgatttcttttaagtgaattgagatataataacttcttcttctttttcttttatttttgtgggatacatttcattctatttaatttctattttttctttcatcttatataagtactattgaaaatatataaaatagttagatgaatataataaatgcaaaaaaaacctaaacaatgttggaatctaattaatgtatgcatgatgtagttcacacaaactaaatattttttttttttgaatggtacacaaactaaatattaaaaataaaatgaaaacatatatataaaattatgccactcaaaaatctcgtgagcttcattcaattcttttgtataaaccacctaacaaaaataaataaaaatatatatatatgaaaatatatattatcatcatcaccaaaaataaataaataaataaataatatatgacactcctcctcacactgtacccaaccttaacttctacgtaaagtcttaattttaattacaaagaaaaaaaaataataataataataatatatcaatatatcatttttcccaaacaatccaagaagtgatatataattttgttctgaccattttacccttcggcgataaaacaaaagttcaaaactgaaaccacaactcatgggggtagaataggccaatcaataaacattagtaccacgtgcaattcacgtgactcttataagtaaaactcacacgtgcgaaacacaaagcgacgtcgttacagcaacactcgcatggtctttacagcttaacgccttgagtagcttccatgaggtcttgccggaaccggagttccggctaaccggtaaattcccactgacggaatcgatggtcggaaaaagcgttgaaggattccgtcgaatttgccggctttttatatcgctgagttccatttccgccggaaatcttgccatcccaaacataagaaacgacgaccaccgtggtcggaacggtttcttcggcggcgattccgatttccctgaactctttaccgacgaatttcgatcgatatcaatcggggcaggagaaaccatcgagtaatttggagatctccgaagcttctgataatccaaagaacgactgttcctcatcgccatagctttagtactattcgatcgagaaacagagctgctctgtaaatcagataaagattccgatcgtcgccggaaacctgtttgtttcttgagaaaatcttcgggaaaattaataccattctttaaagacatcatattatcattattattatgactttccgaacactgctctttaaagggtattaatcttccacaaaagataatgtcttcagccgaagacatgttttcgccggaatttacatcactgaaaaactcaaagaattccggtggctctgaagaagatcgacgagtgagagttttgaaggatgactcttgattggaattattagttagaggaagttcagaaagagaaagggcttcatcatctggttcctctggttcactttcatcttcatggagattttgaggttgaagacgatgatcatcaagattaatatttttaaacttaaaaataatattttcttccattaatatcataaatatgatcaaaatagttgagaaaaatagaaagtttgaatctttttgagaagaaatgagaaaagtttgaatcttttttgtggtttaagaagagacagagatatagttatatatatatatatagagagagagagagggaatttgataatggggagaatgtattggatttttgtttggagaatttggtttatatataaataaatccaaaagaaaatgattttatttatttgaattgtaatatttatttgagagaggtgtgattgtattttcttttgttgttgtttgtcgatggcttctagaaatgaagagagtgatataagaaaagggtatctatctattaataataattctagaagaacaaacacaaagagagatctacacataaactaaatacttaatacttttttagtgattactacaatacaatacattttgtttgcttaacactccttttcttcttttttttttttcatttaattaattttttt

SEQ ID NO: 298827 - DNA, 3029 bp, Cannabis indica
aaaaaaaaaatgctatgaaaacatgtaatattcatttactattaatttaactcaaagaattatataagaaatttataaatatgtaaatcccatcttttaaatttatacaaagattacaaataatttcaactaaagaaaacaccaaatacaatatctctctattgacacaatcaccaccatacaactcgatacaaaattaacaaattaacacttcaaacacaaatcaatcattttacaaaaaccaattattacacacatcactcgatcgtaatactatcaaagatttgagtcgtaactcaaccctaattagtcaaattactactcgaaatcattgatagaaaaaataataaaatgaatgcgataaacactaattatactcaaacatagttttgagaataaattttgtgtttatcgtcatatcattatactctaatagaaaacgagtttttcgataattcgaatttttcgtacttctattagaaatgtctaaaaaatcaaagatcaacgctacaattagttctatcgaaagtcttggacttagaaaagtcaatcaaaatagagggacaaaatacaattaaggttcgatgagaagatttccaaacacctactttaaacctaatccttgccttgagcgagagattgagctcgatctttccagacttcttctcgagcctcaagtctttagagaccgagctaagtagagttgtatacgaggctgtgagtttgacttggaggcgagtcacattgtgatgaggttggaagaaagggctcaccacattgaaggctagggtttggtcatcgtagtcaagcctagactcaatagagtcatagtagacagacactttggagttagggttgtatgaccgaacagcaaagttaaacgatgcatttagatgattgtcgttggagattttgaagttgttgactgaaccatcttcgacgctgaaaatgaatcgttttggcttgaggacgagccatattataagcacagccaatccaactaggattattagccctaaaatgaatgtagccacccaacgaaggatgtggtttcttggtggtggcttggtcaccacagtcgtttgttgagttggtggatttgccatattgaaattatatgttatcaaacaattttttttaagagtatagttttgagtactagagttgagaacaatgagatatattgaagatctctatttatataatggagagaatattatgattatagagagtaacacttttatatattaatcacttttgggtttcttgcatgaaactcaagaaatctataaggggttgtaagaatataaatatataatatatatgtatatatataaatatatatatgttcttttcttcattatgaaaattggaacattcaaaagttggtaaaagaaaaaggtttatataatgataaaactaatatatgtatatagttggaacagagtgagcatgtacaatttatttatttattattatcttattcttaattaatatgttaattagaaagagcaaacatgcctcatcatctcctccatttttttttgggtaattcagtttaatatatatagacctcacatgtatatttatataaatatatatttttaattaattgaaagaaagattaatatttggagggagggagtttaatttatggggtcatacggtccctcaacttttgataatttaaattttatatgtataaagttttaaatattttatttttcgccccataaaatcaataatccccagtattttaaaatgttagtatttagctgttaaaaaacatatgaactgaataatgacaacgtgtcaataattaatacatatttttttataataaattaatatataattatttggaggtatataatttccaacttagttcactattttgtagttagatccctttttccatctaaatccccaatattttaaaatgtcagtatttagtcccctgcatttattaaatttttgttagaaaactttgatcttgtagcaaaaactacctaattaaccgaagtagctgttacatttggtttatatatacttatttgattgtaaatattaattaattaatcatagtattttttagacaaaaataattaatatatacaaaaatacatacacataaatgattgttctttgttacaaaggcagggccgagtttgggttcagacggattaggcccacattagagcccacctaattaagaagaaaaaaatattttttttttaaaaaatatatgtatattttagcaatttttaaaaatattacatattttttaaataaaaagcttaataattttcttttcttaagacccactcattcttctatcttgtacaaaaggtaggactacctagcttagggtatatattttttaaattaatttttagaaataccatatttttttcaaattaaagtctcatttttgtatgcccactaatcttggcaattgacaaaatgctcaatcacaaggatcatttccattactcaatgttaatattgggaatgggaaggagcattggacaaaaccactttttacaaagttcaagatcaatgtcgacggggccatcttcgaaagtgaaaatcggtttgggtttgggttcatagttagggactcggctgggaagcttgttcaagcagtttcgaggagtaaaattggcgtggttgctcctgagattgttgaggtggtgggaatgaaagaagtcttgagttggataaagacgaagaaaataactgatgtggaaattgaaactgattctttagttactgttcaggctatcaatggttcagttcaaatgccatctcagtttgggttacttattcaagactgtcgttctttattatctgagttacaagatgtttttatttcttttgttaaacgatctgcaaatagggctgttcattgcattgcaaggcaatcctgttttatgtcagattgtatgtttgatgaattttctgctccatcacatttgctttctattgtaagggatgatatcattttaagttgaataaaactttaccct

SEQ ID NO: 298828 - DNA, 5072 bp, Cannabis indica
atttataccctaaggcctaacaaagtgttactcaaatgatagtgagcaagttaataggaagcaatcgaaagggtacactttggaaaacagctgtcttcgcaacattttgggctatttggctggagagaaataccagaatttttgaagattcggagaacttagcagaagtagtttgggataaaatcaagttctggacagcaacattggtcttcagaaccaagcattttgaagatctatctttcttagatctgagtagagattggagtgttctgttgtaatttaggctcgggattgttacttcttttattttcagaatcttgcgctgctgttattgtttttactttctttttctctgtgtatgacggttttcctccacctaaagtgagggtgttaatcttttcttcagggtggtcaaaactttggcctctcctcttttttataatcactaagaaaactagcctctcatgatgtggttcataatctgaaaatattgctcaatatctaagaaagcaaaaaataaaaataaaaaataattaagaatgttgagaaactcttgaatcttttttttttcttttgatgagaagaaaacaacttcactaatctactaaccaactgaatacacaagctgcccatggcagccaaagacctactaacaaattcctaattttatcaagcatatcaatctcacttctagagagtttcctatacatcaggtttcgaattcttaatttagcgtctctcctaattatcatatctgatgagaaaatgaaaaagaccaactattatagatacaattgttcctatttatccgtattctgcacactgttgctgcaaaactcaaatctttctctctaactgtattcgatgtgtttctttgccttcaaattatgtgacgtcaaaatatcacttttcaaatttaaatttaaaactcattaaaaatatcaaatagtcctaaaactgtcttatggcgacattttgcttgtcttctagggggcatgttgcacgattatgttaaagttaacctttgtaggggactggcaacaagttgctgcacaagctctgacatgtcacgtggagaatgaaatcgcgagcttcgaattcttcatgtggcgccaaacatgtcgctatttaataggcaacatgtcacctgaagcttttatttttttagtttttgatttttagcgccatgtcaccagctaagctgcggcacttccctttaactttaatgctccaaagtcaccctaaaatcaacaagtgagctcattcatgcacatctaacataaaaacatcaaatccatataaaaatttgaagtaggcacaccaactcaaagtaaaagagtcacgaattagtgcctaaaataagcactcatcatacctccaaacttgaatggttgctttttctcaagcaagaaaaacttaaataccaaacacaatgatgtaaaaaccctttaaaaagaaaatcctcaatcaataattttaatgaagctttgtaaaactttcactaaggtacatttcaaatataaagatactttatgaacctgtactgttaagtgttagaaagtgggactatatttaaacaagtgcaggaatgttataatttgttaaatataaaataggacaatacaaaagtaggtgtaatgttcttgagaaaattactgaactttgcattttagtgcttggcataaaaaattgacaaaattgagtttgcatgaatacactggggtatataaacacattttaacatagtgagagcaatttggcaatttttgggatgattttggcaatataactgggtcaaaattctggtggacctgcagtacgtcacttgtctccatggaatgcgtagcgggtcgaaagggcgacgctgttgtatgggtggtggtgcgtagccacttagtaggtgacacgttgcataggacgcgcaaatgtggcgatgttgttgacatgttgcaaacttgatttttttggctccaaaagtagcatattttaaatagcaaaggggctatgacagttttgcactctctctaatgtgcaaatatcaaccattttcttcaagaaatagattgcttgaagaattcaaaggcttgttatatctcaaaattcgcatgctcaagcagtcattctagtgggttggaatagaaaatttggacattctcaacttattcaggactcttttggtgtttattgttcactgtgttatttgttgttaacactctctctaatattaactttaactctcatcacctaataaatggcacaagcccgttcttgctgaactcagtgaagttccgctgaatctgaccatttggttttcctctcaacagtatcccaactttgtgaccatgtgagaaagctacaggagaagaaaactctaaaagtctgctgatttcttatgataatttactaaaatataaagaaagacctagaatatatagataaactcggggcagtatcacaacaaacaaacttggaaactgtaggaatttcatataaatctggtagatatttttaatttattaggatctatttttctgaatttttttaattttatgttattaggtcgtatactattttataggattattgttagttttctaggtttcaaggtcagcggcttttgccgtctattttattgtatcttcctcacgttttcattattcaataaaagagaatagttatatctctcctaaccaacagaaacaaatcaacaataaatcaggaaataaaatcaactagaaaaataataatagaagctttgattttattactaataacaaggattgactaaagcaattcatgattgcctcttagtctctcgaaagtctcccaagagaggctggttttcaacatatagaagttttaaatttaataaacatatgtctcacaaactatcaaataatgtgacaatgttccctgagcaaataagagtagtccttaacgtaatgataagtgtttatattattacaactcagaagtagctttagttaatcttaggcataattcttggagcgaacattatttaatgaaagagtaaagagttgatttttataagctcctcattgtggtggttgaggttttcaaaaaaaaatttagaaactgcccaccaaaatgaaaaatttgacaaaatatacaatttgaataactcaacaaaaattgaaaccgttcaattaatatattggataggctgaatattattccaacccactcaatggaactcaaataaaccaaataaattaattttacaattttttgttttttgtttttttgagttacataaattatgtttaatagttaaattatttttatttaaattttggactttatggtatttaatttagaatttggacttcatagctattaattattcattatatatggatattgaagttgaacattagaatttgtactattaatattttctttctattttgggataatacaaaaaagtcctttggtttagctaaattccaatttggaccctctgttttaagaaattatgaaaaggaccatctatataataaaatggtaaaaaaatggtttcgtgaacatatttttggtgaatttatttattttatttttacagaaagactaacagtgttgtttatttttaacaattaatttttcaaatcacctaaaatttaatttaagttcaattaaaaaagaaattatttagtttgttattgttatcataattatgagcattaaacaaacacttaccaagattcatattttatttagagcattcaacacatacctcccatttgtgcatccatttgaaccatccaaactcaaccaagaaaatctgaatgtggaataaaatagagacatttgtggaccaacccttgttcccttttgtcataccattaactaaccttaacacttaatatatatagacacccttctaaccctaaggggttattttgcttatagggctaatcaagtgtaattaatgacgtactataacttaatgggccaattatagttatatatgggtgctctcatgtgcctctaacataatagataattattaaccatcccattttgattgttgacaaatattgggcacatagttaatgattgtgtttatggtattaagcttatgattatattagtccacaataataattctaacattcttccactcagacaaaataatcaaccaccataacattgtctaccacacataaggtaacaaatcaaaacgtatataatatcatatcgacaggatacataattatgtatgaattgacctcgaagacatataatccaataacaatcattaacaatcaaaccaaatatgcatgaggtacaacaaattgagactatgcgcattcatctcccttttgtacctgtcactttagtaagcaacacatatatacataaatatgacaacaacaataagaagtgactacaatatcattatgcatgtttgagggcatatcaataatattggattccaaacaaaccatcacaagacaattacctttcttctctaagtgagctttgagctttcggcaatcagctttcttatgctcaaagcattgaaaaaagttacacttccatttaaaaaactcattcttatgaccagttgaagatgagcttgcttgtccatttcccttaggaacggtgactttctaaacctttggtcactagagttgttggaagtgaactttcttttgtcaccatgaagatacttcttgctctttccttgttcatgtcctcttcttccttggcaagaatagcagtcatctctttaatggtccactactccttttgagcattgtagcttgatctgatcgaatcaaactgagaaggaatggtttccatcacgaaccacatcgtgtaattctcaccaaggtccaatcccatacccttaaacttttggtaacaactcatgagcttgtcaatgtgagctctaatatcacccgtatcaacataattagtacgatagaacaaagttaagcactcatttctctcattctttgagaactttttatacttttccttaatggctgcaagaaaattctttgcattttttgtctgaatactatcacgaatggattcatccatgt

SEQ ID NO: 298829 - DNA, 1759 bp, Cannabis indica
agtgaaaatctcacatttctgatagtggtacccctttgtgaaatgtagcctggacccatctcagaatattttttgccactagttacaataaatttgtactactaagacgttgatatgaagattggtttcgcgttaaaatttgttaatatggcctcgaattaaaaaaaaaattaaaaatgttattcttttagggtaaattttaataatttttttccttactctttacactcgtacatatctcaaaaaattataaaattttacggggacagtgtcaagattgtcgtgcattatttttctattggacacaatcagaataaatttcaacaaatttttttttagtctaacactcgataatgttctcttaaaatctctctacacgcctcgaaaaatcataaaattttacagagaggaagtcaagacaaatttctaaaaggacgtcaataatgatgaattgatttatcaaaatgtttaaataagaatttggtaccaaaccaaacatggtggtactaatgaatacttgttctagttctatgttaaccaataaaatttcatgctcaattcaatacaagaatctatacttattgatgaccatcaagaagagaaggctctaaagtcatctctcatggcagatcatatttcacttgtccgaggtagagaccgcacgcaggcgccattggactcgccgcattcacactcctcgcgttcagaatcctttcaactgagttgtccattatgttttataaatgattgaaaataataataacaaaaagaaaaatagaataacataagaaatcagtccatctcaaacagaatcaaaacatcaaggaaattaataattagaagaagaagaacaaagccatagaagagaagctcaccatcagctattgttatatctcccgtgccaacggctttgagtacaccaacaagtaatctaacctgaatagacaatgtatttgcaatttagtccatgatgtttttcaagagtgtagtaatagagattggacaagcagaatatcatcaaaacctggtgataaagaaaagagcgtgctcgcgcagttaccacaaggcaacggtgtttcctcctcgcgccaaagcctagattactttcactatgaaagctttgagtatcatcgtgagtaaaaccatttcgacccctctctgcaatcgaagggaaatatggagtaggtgccatttcggaaacattaagctcatctaatgttctcactggtgattttgcctattaaccaaaaagggttttacaataatgcataagaaagagttgcgaaattgaaaaataatgttctaaagagaaacacgatgatgaaagaacctgacagccagatccccggaatgtgctaaaatcatgatgaccaactagaactttacaagcttcctgcaatgattataacaaacatatttatatgataaaacaacattactagacataataagagataaaatgtcaacctgcatcgcactgagattaagctcctcgggtatatgccaagcacggcctttctccaatgttgataaaggctctggcccagacaacaaacgatagaagtacctgaaaagcactttttttaagtaaataaacaaaaaaattacgagtagatctgctccttaatgcattatattgttaggctattttaagtctatgttttggatctaatttatgtgcgtttttagctgtgttgggacggaattacgcttgttttctatgttttcaggttctttggaataaaagaggtctcgggtg

SEQ ID NO: 298830 - DNA, 2716 bp, Cannabis indica
aagtttatttgataattaattataattattaaataaatagtagtgacatttataggattaaaattgaaaaatgtggtatttgtaaaataaaagatcaatagttgtaaaaatgataaaattataactactgggcccatctatatggccgaccacttaaggcttatttttgctattattttatcattttttattccatataatttaaataataaccctaggtaaaatagtataaaaggaataagatggtctgattcttatcaaactcttttaatttagtttacattgtgtcaaacaactagagttcttgagacctccttcttccttcttctatttcgaatctccttcattgtgttcttcatcaaattttgagcctatagtgagtgagtgcatgcccacccacagcaaatctaatactagtgtgtaagattgtgaagaactaacaacctgaaggagaatcaggctcagatcttgatagtactctgcgttaaaaaggaacaagggttagagatctgagtggaaagagtcatatattctgttgcaatcaatgtaaggtttcttgatttcatatgtgtttaagttctattattttagaaattcatattttggacgttaataaacatactggttagtaaatctagatcctagtaaaaatatattccaacaacaagttcttctgatctatctttgaatagtggtgaagctttctttgaccaaactctctatcgaagcactttaggtgctcttgagcaccttacatttactcggctaaatgtagcatttattgtcaataaattaagccacttcatacatgatccaacaattacacattgggatgcttgtaaacgcttgttcagatatctcaaaggcacaattcatgaagactttttgattagaccaactattagattatgtctacaaacatactcagatgttgattaagcaagttgtcctgatcatgacaaacgctcaacaagggctacacagtgtccttagggggaaatctcatctcatggtcagcaaagaaacatcaagtagttgcccgttccagcaccgaaagtgaattccaaactcttgttgatgttgctgctaagtaaaattgttgtgttctgttttaagagagctttagatttctatactagcacctcttattatatgggttgacaaccaaggcacaacttctttagcaagtaatccagctttggatgcttgatccaagcatatagagatttgtttgagatcaaatctttgcgaaggaactggaagctaggtatgttccatcaatttattaaacattagacattcttaccaaggcattctcagtttctatatctaaaagacaagctcaaagtgtgttcatcacttgagtgggatgataaccaatatatatttttctattttaagaaaattagttagcttttattgttggctaaactgttagttatgccacctattttttagttttacaacttgtaaaattctgttacaagttgttaattacaactaaccctttcttgtatctcctttgttaattacaactataaccgtttcttgtatctcctctctataaatacaattcacactcaactcaagacttctgcaacttttgctagtctttgagattcatttcacaaagtgtgtctagataaagtttgtgtagagaagttaatttcacaaatgtatatatacatgtttgttgcaaatcatttaaaagattgtcattatttttgttttactctatcattctctccctctgtgtctttttctctcctacaggttgttgggtggccagtgagagagatattacagactttgggtgggagctcatccggtggtaacgacaagaagaagaataaaaacatgtagtaggtctcatttgtaagatgtttgattttttaatttgaattgatatcaggttgttttgattctctgactcatgatgttgttgataatgggatacttgatggaatttttgtgcatttgttgataatgctatgaatttaggctttgactgttcacggggtttgtacttgaattgtttagtcttgtagtaattaagattgatattatgtttgggtttgtatttaaagtggatctaaaactattttatatggtactctgagggagagaaaattagtatgtgtacatagtttttgtcactagatctagatatccaaatgtaaatataaggaaacattcatttatttttcttgttgttagtcatgaatcttctagtttggttcccattgaatcaatgagatatcacaagaagaatttttcgttaactattaaaccagtattatcttcgaaatgtattccttctattcttcagtgatcagttcaagttggctctatagggatatgatatccataaagtaatataggttgatgtatgtttattaacattgacttctattttaatttgcaacattcgtgtcatcaaatctctttaaagttgctaagttttgtatgtactcatgtattttcaggtaatggcattggcacatccacattcaccattcacatttgaaaagcctgtttctcttaaggcagggaggaatgttgtcgctcaactaagcgtcactacaaaaaatcttacttttagttacaacaaaatttatgattaaaagtaaaaaaaagttgtgactaattataaaacatcattctcgtgttgtgactaaaaggtccgtggctaaaggtattagtcacaaaaattaca

SEQ ID NO: 298831 - DNA, 6990 bp, Cannabis indica
aacagcaaatgaacaaaatttcaacataaaaaaaccgtattttatgtaaataaaataaaaaaattgtaaaaatgtttaaaatttcgtgaaaccgtatttttgttatttttgtgcatttgtgaaattaaccctaataaaataagttgagaaatatttttatttttttattatcaattaaccaaaaatagctatatattaaaagcaattcaaatatactaattttataagtttattatcattgactcagagtatcaaagtatcatataataagagaggcaaaacgggtagaattgttaaaaaaaaaaagtaaaaataaaaaatataggaaaaggataaaatttaaagacaccacctaaaaaatatatacaacctaattttcttcatttataattgtaatagttgtatgtttgattgagggttatatctattatagttcgtatgtttagtaataaaatattagattgagaactatcgaaataagaaatgtgctgtttcaaagagtattagataatgatctaattttcatacccaacaatttcttttcagtgaaataataacaccattgatacgttcttgaatatttgctgatctttgactgctgtggagattactcttattgttgggcgtttgaattgtgtgttttgatgtatttgttttcaattttggaataaagtttgtctttcataaaaaaaataaaataacaacattgatgcttttttgctacatcttgtaatttcctttcttatatttttttgaagaactatttaggtgaaatattatcttcatactttttgttctaatttagtaaattcaactattacacacatcattattttatatttgcttaaaatcaaccaaccatttatctttatccatgcgggacacatgtatgaataaacttattaatgctaaaacaactatgagactaaacagagtgacagagtactcaaggttatgcaattgttgatcactctattacaaagttcttttattaattaagctagatcaagaaacacttaatcttgtacaatgtgattagtgatggaaaatttacttgccgggaagtgaacccaccccaaatggggaggaaattacttgccttaatgggtaataggacgggagtggggtacaattttatatacttgaagcgggtttaaggcaaggtcaggatgatactacccaccccatattcgacctagatatataattttcaaacttttcatatagttttctaattattacgcattatgataaaagttgatcattaatttttcttaatttactttgtaataaaagctttttaaagtaaatatctttattattattatttttattttaaattacagtacattattttcttattaattttattattgttaattaatgagtttcatacctaatagggatttttttaccctgaatccattagggattaagcggggcgagggcagagatggggatggagacataaatgggaaacagagacggagttgagaggtgcattacccactaattacctactctattttcatccctaaatgtgattttctaatgagttataccattgtagttttctaatcggattggggcactgtccaactcctcaactctaatgacccttccaatgtccaattagatttgcaaaacatagtagggagatttggaatgtaaattggattggatagatacccctagtccataatgttgcgcaatgcgtcaattctactaatactgttggatctttggtcaacttgaaccgtttctaatggacagttccctgcttcttgagaatgtggatggataatactctttctaactgttattctgtgtttatttttgagttctattttggtaatctattgtataggtcaatggggggttcttggttcagttttccctttattttggtttaatcttatcctttatgctctatttggacacaagttatcaaaaaaacaatttgtgttgtaaaaaaattgtagcgtgtaactgacacatatacaaataattggtagctaaaggctataagcaagagtttggtgtggactacaaagaagtttttctctagtagcaagacatgatgcaatcaaattggtgattgtattagctgctcagaaatcgtggcctatcttccaattggatgtaaaatcaacattctttaaggagaccttgaggaataggtgtttattgatcaacctcctaactatattaagattgaaaatgagtatgaagtatataaatttaaaaatgctctttatggattaaaagaagctccatagacttggcatagttgtattgaagcttatttttaaggtaatttttttttttttataaatgtccatataaacacatactttttattaaatttggagatgaaagaaaaatgttcattctttgcttatgtgagaatgaacagatttataatggaaatgatagagccatgttttgaaaaatttaagcatttcatgatgcttgaatttgaaatgattaattttggactagtgcaatattttctaggcatagaaatggtgttatttgatgatggtatttttgtttttaaaaacaatatatccaagaaatattagacaagttctaaatgaagaattgtagtactggaggcactccgactgaagttggtttgaagcttattaaagatcctcaaggaaataaggttgacaacactctatataaataaatagttggaagcctgatgtacttaacaaacacaaggtcaaatataatgtatagtgtaagtcttattagcaggtaaatagaatgtctaagtgagatacatcttcttgatgcaaagagaattttttgatacttgtgcattacaattgattttgaagttcttctaataagagggagaaaaagtatatttaattggttttactgatagtgattgtgacagaagaagcacatctcgttatgtttttatgataggcttaggagcagtgtcatgatcttcaagaagcaaaaaattgtcactttatcaacactgaagtagaatttatagctgcaacaactagtgcttgacaagctatttggttgaggaagattcataaagagttacatttcatgtaaaatggagccactataatttattgtgataatagctcaacaattaaactctctaaaaattatgttctttatggtagaaacaaatacattaatatgaaataccatggaagaagttattattctcatttgttgtagaagtgtagaataaattgttgatatgtatattcactaagtctttcaaattgcctccattttagaaaaggaagatgattggtgtatgtcttttgaagatcaagtagtttgagagagggaaaattttgcaaacacaaaaggaatgttagaaaacaatatttattatccgtttttttattagctctatatggagtgtgtgtgcaaaaagaaaacaaaacaatagaagtacttgcagtttttgtcttcttcgtacttgaatcattcatttaatttttcaactattacactcatcaccattttatatttggtgaaaattctttacccatgtgggacacaagattgtaatgtaacatttcatttcgttgtacaatgtgattttccaatgaactataccgatgtgattttcaattcggattaggtttgttggaagtgcccaactcctcaagtctaagcacccttccaatgtccggttcaatttgcaagaaatagcaggtaggttccatttcgggacatacattggattggatgtacagccctagctctagcccataatgttgcgcaatgggccaattctactaatacctttggacctttggtcaacttgtaccatttctaatggaaagttccctgtttcttgcttttaaacttttagttttattgttctgcttctgttctgtgtttggtttgttttcggtatcggccaatcggggctgctggtgcagttttccctttcttctgggttaatcttatcttttgtgctccatttggtctaaagttatcaagagaaaaaaacattgcgttgtacaaaagatcgtagcagacacatacacattatatagacagaaacaatgatagcttgaaaaatgcaggggagatgccatgacaatggcttctaccctaagttgaatttatgtgtagatacagaaaatctcaattaaattgtacagcttagcaagctttattaaaccaaaactcattctaagtgcaacacccagtagaagaatatgacttttatgaagcaatcacaagtttatgataaagattttgtaaaaaataaatggcaccaccatttccaatgtcagtttcaggtgcttaaagaaagtaccatctaatttcaacaaagttcagggtagaacatttgaacaaatgattttctattctgctctcgattggccagctcgtgaagagagaatgataccgacaataagaccgtacaaagccaaagcttcagcaaagatgagaatcaggatcataccaacaaagagttttggctgctgtgcattagctctgcacaaccaataaaaaaggaaacaaaatcagtactggtcgattatttatggtgcacaactgcatattagcctttaaacaagtatcggtatagcataaagtgtctgacacacagcttatacagatagcaaggtataaatcatcaaatatggtagagaatatcttcattaatctgtcaaactaacattaaagctctagctcagataaaaaaaaacattaaagctataataacgtagcaaacatacaccaccacaagaattacttcagcaacaatcattaaggcactacatgattacttatcatccgcgaccacagaaattagattttgctatctttggactaaatatgaacactcgtgtgtaagcatttagttaaagttactgaaattaacagctaatattgattaaattggtggtataactgtataacaaaactcaataggtttggcgctactgtaaggtaatacatggcctggcttattttgttctcctaaaagattttgtcatttatgttaaatttttcaaatcattaaggacttataacacatggtggaaatgtacatcaggccaaaccgaactaaagaattgttgtctaatagtatgtacacataataaaagatctagataaacataaaccaatatattggaaagtaaaagaaagggcatcctatatgtcttgaaacatatcttaacctcaagttcaattctctacaaactattgctgccggggaccatgtagtcacaaacacatgcaaattttcttattttaattggatagttatgaaacttttaagtaatttcatggtgaagattgtatgccaagaccgaagatcttataaactcaaaaagttaatacatttaaagcttaatgacttttggagctcaagtcgaaataatcggtacaaattaaaagacataaaacatatcaacaaccaaagaatttttaatcatcacaaatcaatcaccatccaaaagaaaataaaacttatgattattaaaaggtcccatcatttactattctgataaaagcaaagcaacttggacactaagacatacaaatagtttaaaaagacaatgacataaatttcattatgtagaactctggaatgacaaatgagaaaataacaactaccacactacaaatttgaatcagcaaacaaagcacagaagtgataaacatcaaagcaggctatcaccttcaactccatgttgtctaagaatgtgacaaaggataaggatttaacaaataaaagactaacaataccatattaagtcaaattcaatgaagtaatcacaataccaaaaagaagctgtcaaagcacataataccaaaaagaaaaacacaaataaacgtgatagagcagtacagtgaagaaactcacttgaatggagattttgcacacacaacattcatcatatcaaatcaaactcattaaactataagcatttgcaaggtacactatatgatatgcttgacacaatagattcaaacatattattagatcacaacaaatccaaaagaaccaaacattacacagttgaaacatccaaacaaaaagaaacaaatcaaattccaatcaatccttgctaaaaatctaacattaatatcataaaaacaaagattaaaaaagcagagaaatgtaagagaacagacctaacaccggcatcaccgacgataccaatagccataccagcagaaagaccagcaagaccacaagcgagaccagaagatagatgtgcataaccatcaaagagataataggatttggctttagggttaattccagtactgataataacagcaataatcaacccataaatacctaaaactccagccataacaacaggaacaatcgatttcatcacaagttcaggtctcatgacacccatggaagccacacccactccactcttcgctgttccataagccgctcccatacctaattcaatcaatcaatcaatcaaacaataaaaatcaatgagaacatctaattcatcaaataattacaagaatcgaacgtacatgagaagactagggcagctgcggcgccgagaaagccgaagaagggagcagtttcatcgccactgaaagtagaagacattgtcgttgtagggttaggattagtgttgattaagcgatttgatctggaatttgattcggaatttggatgaatcaaaatcaatggaatggagggagggagggagggagggagtgagagagaaagattggatttttgtgtgattgagagatcggaaaatggttcgaataggacagatgtggtgctctggcaatgccaggaaacttcgtgctttggtccctactcttttacatattaattgggcctttattgggcctatatatggatccacctaactcaattcatttctacacttcttttaacaaattttacaattacactctataccctttttatattgtcctcttttatttttaccttcttttttaaaatctatcacttttacctctttt

SEQ ID NO: 298832 - DNA, 3518 bp, Cannabis indica
ttcactttttcaattttaaaaagcaaaaaattgattaaaaaagcacctaaattagctgcaaagagggattatattgcccaatctaatagaaaaatttagaaaaatgaaagaattaatgagagaagaatgaggccttatatctctagtttatatatagatatatataatattctcactttcttcccaatttccctctttgaatctttcgtttagcaagaacccatttgagaatgacgttgtttcacttcttcaactgtgccattcttaccttcggacctcacgccgtctactactccgccacgcctctgtacgtttcttcttcttttacatctttgtttttgtgtacacagtagatctatctaccacaatttcaaaatcttacctttactgtttctcaaacacttaaagaaagtaaacccttaaatcaacattcgaatttcgaatctttaatttttgtgtgtgatggagttttctaatttatgagtactgatctgcagatccgagtatgatacacttggtacctctattaaatctgccattgtttatctcgttacagctttagtcaaggtttgttttcttggttaatcatattctattaatacgcatcctgcgacttattttaatcttcttttactgcatctaatttgtatacctaaattgtgttggcagcttgtttgtcttgcaacttttcttaaggtatcggagactgaccacttcgatccttaccaggtaatttagtagtctacgatgtatactttttatttgcattatagttcactcacacatatatttatagtctttgttgctcgatcttcataacttcaatagaaagggactttaattttatgatttatttccttaaaatgattttagcatttgtgatattggcttgaaactatatgttatacaatatcagaattcggatatcacggttgttgaaaaacgttcggtaagattgattccatttaaggttaaaaatggactgtggatcatgttgaaatgaaagtgcttgacttcccaccaagtaattgattgaagggataacatgtgagaccaggaaaccctaaaaggtggactggaagcccttcaaagttcgattttgttttctttcttcattggttgaatcaattaagatcctggacacaaatttggactcctaaaataactcctcttgttcatgaaatttgggttggagttacatcacctaattctgccattttacttgcaggaagccttaaaagctttaattggttttgtagatgttgctggcctttacttcgcattgactcagttgactcacagaaatatatctcaaaaccataaatttcaagcagttggacttggtaaggcagacctttgtgaatttagtacagaaaccaattaatatattttaatgtaaagggacaaataaaaaaaacagttccaaatcgaaattcaagttgttgtcttagttgtttgtagtttcttttacttgagggtaagcttttagcattttctaatgataattcgctgtttgcaggatgggcttttgctgattctgttttgcatagattggcacctctttgggtaggtgccagaggattggaattcacttgggatttcatcctacaaggtcttgaagcgaatgcaaatctggtaaagttatttgcttttttgttaagacctgtcatgtgaattcagtattcatctctatagatctgcatgcttttccctgggtttcagagttaaatttccattgcattagtatcagtatgttcctaaattgtattcactttttgtattcaggtgttcagcatatctcttgctgcattgggttctctaatgtggctgcgaaaaaacaaacccaagacattgattcccataatatacgtgtgtgcagtgattgtagcaactatgccatctatcacaaggtttggtgtttctgcaatcataacctttttttttaaattttatttttctctgtgtacatgtgtgtcttctctatttcagtttaattgtgatgtttttagtttgtaaaatatgctcgaaaactctaagtttccacctacaatgtccctgccaccatgcatcaccgcacatctgacacgatttattggactgatcatatcttttcatgttttttcagctatcttaagcgaggcttgggctggcacttcccagaagtggttggcttccaactatccatttctctagtgatggctttgatcagttgtcagctcttttctgcttgtcagagaccctcatactgaggaatcaatcctaacgttagtcgtaacttcccttgcgagtggattctttttaattttttaccgggcgatatcaagacttccttttctatttttatttcctagataataactctttttgttcatttaaatatatattttttgatacaaatttgtaaaagggaaaaccaacatttatttgtgtcatgacttggaaaatgtggagtttcaacacagtaagtggagaaatatctgtgtcaaaattaatgggagggctatgccatggtggagattttggctttctgagctgggaaaaggtcatctagtaaataacctttacaagttacaactactcttgctttcttctcttgtttaccttaagctgtgctccaaactacactactcctaagttgctatacttcaggtcacaagttacaaccactccaagtttagatttaactttagagttttggtctttgattggaaggtttgatagggctagggggcttaacatacagtttcatttattgttgtaccatatatgcctaagtagattttcattgaaccactcactggtatcggtagcaagagggcacccaagatcagccaccgagagttacaagaaattggctaaaatatgaaagagttttatgaaggcctgcatcttccaaacgtggattttgtctttagaactgtagatgaagtcattcaaattttatgtaaagaagttaagaagagcataccaaaaattcataatgacaataatttagagaaaacgggtgatgtagagtgaccagcataatttactctatatgaaaaccttgcagtaatctactactcagttggaacacaaattttacctctaatgatagtaaattattgtaaaatttggaataaataataccattgacttattttattggagatggtctaacaactttcgtaaattttatgaattacaaatcaatttttaatttaaacttcatttgtgtcacaatcttaaaattgataaactataatttaagtcattactaattatgagatgacggattcagttaaattaaccttgtcccttttcatatatgctctttcatttggttccgggtgaaatatcaacaaaataattagctttcttcacaaagtttgaataccataatttatcaaaaggatcaccaaaagaatatatattattaattttatagtgatatttctcttttgaagaaaaagaatatgtatgattattaatagaaatttttacattaaaaatacaaaaggctaactttattacatata

SEQ ID NO: 298833 - DNA, 6752 bp, Cannabis indica
agacatcattttttttttcaaaaatatatatctaatgggtacccgatggggatcctttcccccgtcggataaacccaccccacccccgctttaatttaaacgggtattaagacaggtatggggtgaatttaagaagcgggtatgggggtgggagagcgatccccgcacccgcctcgccctgtttacatccctaatatatatatatatatgtgttttatgaacaaaataagtgaaggagaagagaaaaggggcaataagttgtgaagtgatgatataagtgaacatgcctttgtaatgtaacactgaaaaagagggaccaaacatttttgtttaaatacaaagctacgtcagtcatcaacaacaacaacattatcatcatcaaaaacaatatgttgtgtttcaaacatcatctacctaaagagcaaaatcttactagggcaaattataataaaaatcaaacatcctatgtataaacaacacctcaaaccaaagcaaagatgctaggtgttttttcttcttctttttttgtgagaaccaaataattagtaaaaatgtacagaaaattcccttcgtttttttttttctttttttttgttttctaagacatgtagagaagagaatactaaactccacataaagcttccgaaaagagtttaacgagccagggaggcaaacagcgcaagctcgagctgtttgttagagatttttttttgttactgtatcactcgatttgccttaaaaccaaataaaaacagataatcactcacttcccccattgcagtgtcaaacggataaaggtgggaaatcatcatcatctttcaaatggtatgattttacagcaatcctacatgtgccaaaagaatataagcttaatcggggcccagaacgagccacaatgagtgaatgattaatataagtatcagtcaatgttaaagttcccatacctatctttatccatactcagtaccggttttagcttatctgatcctggtgaaccgaggctagtgtctgagttttgaatgggactcaacacagagtttgtttgccagcttcctctcggtaagggtgcctcgggtggtggatgccccatggaaccaaattcaaccaaacgctcagacggatgcattgaaccattggcattattagtgtttaccttcctccgaggggaaccagaaaggtcgtctgcagatgcagacttcccatttcctttgtgagacgaaaaatgtgcttgtgtagtgtcacgactacttctctcgaccaaaccgttctccatacgaccattgttccggggagacctagcaggcatttggtttcttccccttggtgtaattggcctatctctgtaatgattctgcataacatatccagaacagtgtaataagatcagaaggtcaccgcaccacctgaactccaccactagcaccaatactaacagaaatatgacccgcaacaaaagattcaggtttccaagaaaagtgtaaaattcaataatctaaaagatagaatgagtataccatattcgggaaatatgttcctgttcctcgtggcttttgcatttcctcaaccccaaatcctacaccgccaggtaatagtggtggacttatggggtaaaaagctggtctgtggacaactccgttggtattcatttgggaaaaaacattatgcttaagatgcagagatcgccgtattacatcccatgatttcttgctgtgaaactgtgaaagcataggtggcataggagcaatggatacattcagggcacagtcatagcaccacctaccataatgtaaactgttgaggtgactttcaaaatctccattcaaatctgacaaagtgttgaaaggctcgggacttccagcaacggcagtagacagcctgtaaccagaagagctaggatagaagtcctctgaggacaacgcaatcgaactcaagcgtgaaagatgttcctttgatgcaaccggtgagacaattttatgattactggtgaagtggtgttcatcctgatcaccagccggattctcagtagaaccactgtgtttttgttgtctgatttgacaattaccatttatttcatcatttggagttggtgaatgagcaaagtacagatgaggagcatgatgtgtgtgggaagattttggcgaatcatcagaaatagtaagactctgaaaccttgatgtagcaaggtcttgtgcatccccatgaagacgattatctgaaacagcagttccatccgaggaattgtccggttttgacaaatccattgatggcatcatattcgaagaggcttcgtattgttcatccacatacctttcagagatgacttcagtccctgatatctgaacatcagggtctccaccagtcagtgatctctcgtggtttaacctaatatccccagtcatgctacttgattcggcatcacaacctatctgaatttcttgaagctctatatccgagaatgatgcagcactaaactcatcatgtccatacatggaaaaagaatcttgaacatcaggcctttggccctttccatgcctttccaatgtgttggagaaaaattttcgaatttcatctccaatgttctcttcaggctgggaaaggatgcgccccagttttcgagcaccatatgtgaaagcactccttattcggaaaaaatttcctgcatcataaaaagagaattttatcattaactggctatttagtttggtcaaagaacatttagtttaacagaatttcctcaaatcccaataaatcttgcaaataatagtcatgatacctaagcaaatttgatttgcatattaccaagatcagaatatccctctaggaaaagggaagaacaaaatagtacttcctactcaagtctaataagaaaagaggcgatctcagattctctctctaattgaaaggaagcaaataacacctttgctcacactacgcccaaggttgttattttctttcaatggatcgacaatgttaagatgcttttgtggaaatgttctggagcttgtctcatatccccttgaaggagctgagaacttttcaacacatcctttaagaaattcatcagtaagcagtaggtcatggccaggagtttcagctgcagaaggaccaaatgatataagtatcaaaaaaagcaagtaaataaggaaaatgtagaaggatgttactaaccaatgagttctggaagtgaagatatccgaactggtccattcaagctaatgcagtaattatcccagtcaaagttgctaaaatagtccaagaatttatacaaaacctgagttatgaagggagaaaagaaaagagtcaattttaattcacaacaatacaaggcgtgctggaccaatgttatcaagcactcactgctaaaggaccgttcaaggatgagttgaagagatggaagatatataggaccaatgtctccaaagcatatgtagaaatcaaaccatgatgagcaccaagaatacggctttcataatagcaccaagccttaatgagtataatactccgtttgaaaatatgatctttgctaatgaggcaatcaacctgtcacaacaagcgtataaattgcagaagggatgtttaaaagcacccatttcaaaaaagaacacacttgcattaagatttatttaagctgtaaaaaataatcttaaaaacacaaacaatcagtagatgctccagaagtaccggtattttgaaacacaaaataagaagagtaaatgaagaccaaaggcaaaagtgccacgaaagatcataatacaaatgaaatttcaatagtgcaccatatatttctattcctggaaacaacaacgtctaattatacctgttcgagaaagcatagtgtacaaagccctcccaactgattgaacgaaatatcaaccacaatgttctgtacaaggcattttacaagtttaacctgccacacgaaagccacagttcttacagaaaacatgacagcgtaagtgactaataggaaaatcaatgtcaaaaaaaatagacatttatcatacaggaagagaaggttataaaacattactaaaagctaaacagcacgtaaatacaaaagctttcatgtatgagccataacacctccaaaccaccaaactacagtagtagaaaacttgcagtttcaggtgactacttgtcagatatgatggtgtcatatagacaactcaattaagtttagccccaaatcttaattaatttggtcattccttaggatgttccactcaatattaagtataacgaaacgattattgctacagtaagggactgttagtatccaacaaaaggtcacccagaaaccacaacagtaccagtgatgcagaagagagagacctcaaatgcttttgaacaagaatatatttatcttccaaacatcatggaaaaataatgaagtagcacatcaaaggaaccaataataataataataaatgaaaagaatatactcgttgactctgaaatgtctgcagaaatgcaatatgaaagttggtaagttttcaaggcaggaaaaaaaaaaacaaattttgaaagaggtgtacgaagagagcatatgcacagagaaaataatatgctcgtttcataaatccatcaataaaataacataattaagccataaatccatatatgaaataaaataattaaccacatagatatgcaatccctattcgagctaggaaatctaagaaaaagacaatagcacaaaaattacgataatcatcagatatatgtatcttaaattagtaattaagtataaaattactaaattatctatatatttatataaaagacaaaattatacaaatgaatttcactgaaagtcggtctatttgaaagatgcgaggatatgtagattaaagaagaagaggaggaggttgcacagccattaaacttaaatagcaattaagagacgagaaatgctaaatgcactcaagattatactctcttttgcaatctcttaaattagcaaatggcatgtgtatttcactaataatttataatattttttaaaaaatattataattgaatagtttccacatgtctacatagactaggttaacaatgtttgcttgattcatgtttgaagtagaattaaacagaatctatatcatcaaagttcaaatgtaccaaagaacttaagttaggtattaagatagaaacctcagcccggatcaactgcacatccttcaccacaaattctgcagcgttatttttttcttctctttcaaggactgagcacacatcattagccaaagcctcctcaacatttaggccaccaaatgcagtcaagtcaatatctccatcaggcaaatacgtttttaaaggtactgatccaaatgggaacacctgcaaaggaaaacatgtacacaaatatatgtattgagataaaaatccaagagtaacattgcatcaaaaattataaattagaagaataaagaaagaggatgccacacaaaactgactagagcatgaaaggacaatttatatatatatatatatatatcaatcagcaaaaaagttatgtgtagttttgttggcaagctttgttgatagtatggagggaataaactagttcacagcttaggtaatactaccagcagcattattgatttcatataaccagttataacaaaaaggcgatattctatgaatcgccatttattttaaacgaggagccctgccttagtccacaacaatgtttgggaaccagaaaactatagcaactgctatctagataccacaagggacttgaacctcaaaccttgtgggagctacccctcttgggtaccataaaaaggacagctaatgaaaatgaaaacacttgaacaaaaccctcccaaatgcccatgatgccaaagacatgagagatttaaactggtataacaagccaaaacctttctttcaccagccaaatgaaacattcttaggcacttgtatacgtgacccagcaaattaatcattcgaccaaagtttacttgtcttgttccataacacattttgaactgaaatcaagctacctcaataacatagtcggtcaacttgaatttcctttaagttaaactacttttatacaagcaaagtaccacaaaattacttcttcttcttcttgttttttcctatttatgaagcataatctatcaagctaataaacttttcctgttgagaaactaacaagccccaagcactagaacttaagatccaaaactccaatcaaacaaaatctatctaatggaaagctttcatatctcttcaattaattaaaatttattattgcatttcccaattttattttcatttcttgttaaataacacttcaaaatcatcatatttcaattctcaatagcaatgctaataatacaacaatagtttcactagcactaagcgcaaaaatgtcagaacaaaaccccaaagctcgaatgcatacacatatacaaacacatattagatatagatagatactcacctcgcaaccaaggtaacctctaataagcctctgaacataatcaataaccgctcttctcctcctctcagacacaacagttggttgaacctgacctataatcccctgcgtagcttcctccgctctctgccagtattccaaaccaatcaccgtttgattcaacgaaagcggtggcggcggctgaagtagcggcggcggcggtggagacgaagacaaagacgaagaagacgacggcctatcttccaaaacgacgccgtttagttcaggcgaccaatcccgaagatcgcccattaaagaa

SEQ ID NO: 298834 - DNA, 8151 bp, Cannabis indica
aaaacattttaacgaaggaggaaaaccaaaccaattgatagtgaaagaagtttctcatatcaagtaatgagaaagagaaacaactcaccatacttttctatagtttccccttcatttctccaccaaagcttgttctatatcttgttctgtaagcaaaagaaacgtgttaagttgatcagcatctattgtggattggatccgaacctcttcggacttttcttttgcttgattgattaggatcaagcttgttgctttggctagctgattttgcctccgagtttagttttccctcctttttcacaactttaagagaccggcgaatgtgaagaaatggattagtttcttccttttgatctcttggggcaatatctagacttctcagaccacaaacttttcttggttcaaatgaaagtaacccaatgcagataagtagaatcaccactctttgagctgcaagaaccatcgttttaatttgaaacaaaactaataagaacaagggaaagaagtttgtttttaaagaaaaaaaaaaaggaataaaagacttgtgaacaagcaagaataagggaagtaagagtattgtgttcttgtggtttgtttaaaagcaatgagctgatatgagaatgttagttgtactcttatactcttttgtgtttcattcctgtagggatataaataagtaaaggctgctatttatggctaattggattggggagagaagcttttaaagggtaagtaaaggaaaagagggccccaaaaacacttggatgaaatttagattcactcccaaaaatcataagcctaaaatctaagcaaacttaaggctgtttgttacggagaatctgacatggaataaataaacgaatcagaacaatacccttgagaagctaagtatcttttttcacttgtttccccaacaatctctatcatttgcactgcttttgtcgactaagaaaaggccaacccagagtcttgagttcttagccattttgccacatcatcaccggaccatagactgctatagcatgtacatgaacaatacatggtcatggtcctcatgtaccatggtttagttattttgccactatatatccctttcaaaagatatttgttgattaattatttcacgtgacagttaaacttcactaattatgatgtaaatttcaacatgtgacttggtaatccatacaagaaaaacaaacatatcagtactcatttcatcatcacctaatattatatattactaaaacttgttaaaagtgaaccgaacatgttattcaaagaatatgtttatgagggtagtaagtagtaactaggagagtaaccaagaaacctacccctctatgtatatggaagggtaatttggtaacattgttttcctttcctcttaagaaaagagaggttttctttttgtttttgtttttgtttttgtttctttgttttgggttttggaaagtttttttaatttggaattatgactagacagacataagctgatggacctttcggactaggagattggtacagtgccaagaccaatcatataaagaatagaagattgaaggagtgagaagaacagtctctacaaaagaaacaaatacatgctttaagcccattctaatgagatcttctctccactttagaattccaagctcttttccctatgtaacaaaaacaatatacttggtttcttgtgctaatagtgactctttatgcttttctttgcgctgctaagctctaatccccttaattcatttttattcttcctgagagagacccacttcatattatttcttcatttttatcatttcctcataattatatatatgtgactcgtttgttcatgtagaccatctttttctttgttttccctccaatttaataaccattatattatagttaaatgtataatatcacatgcaacttggaacattctaaagcacaaattcctgcaatatatactttatcaaaataaggtgagagtgtgtttttataagatggactggtcatggtccaagctaagagataccccagcttatatgcttatttaatgtgctgattctctgctttttatccaccaattaaagtaaaaagagttaaatgaggtgttgctttctagctagacaaatttttatttacttattttcttttttcccatttggaattttgaaaccttcccaattaaaattcactgccagtagtatagttcatcatacatggtttatgagttatatgacattgcatcataagatttcacttgattattattgtcaccatcataatgatcatccaaatcttattctggccaaacaaaaatagaatgaacatttatttcagaggcaacataaactggtggtcttgcaggtaacctgtcttagtagtcggatgtttcccaatgcattgccaattaaagcaaaaactggctgatcagctgtgctctactttcttttgaatgtctctcaaaggattcttgatcatattctttttatatttctcttcttgtttttgtactgccccatataaaattgagatcaggatctcactatacatccaaattagatcaggatctgctacttaattattaattatgatttttattattatcaatgtccaaacagatggggtcagtgatgttggtcttcttagctacattttgttagctaaatatagaattttttaatactatttcctctttcattagaaaataaagaaaagaacagtaccagcctacggagctgataattcagataatagaatttatgattgaactatattcgtgtacataggtaatgttattcttttattaatcattttgtagtcattaccaattaattttgagatagaacttatgtttcttttttctcaatttcactgaaatcaaatcattttttagtcattaaagattagcttgatttgcttggttacagagtaatgattgtaagtttataactcaaaagataattttcatgttcctaaaccaagattggcttagaatgccggccaataccagtatgacatagatatatatatatatatataaaaaaaattggggtcttgccagatcaacaagaaattggtgagtgagaaggtgggacctcctgcttctgtagatttatggtacgggtacgtaccatttcttacgaggttagtcagtcagttaatgtacttatagatactcttcattcttctctcttttaaagtttgcaagcactactataaccactgtcccatccttttttatgttaatatataatatggtggatcctacttagtctcttatgaatacaatcatcactccagccttgagagcacaaaatataattgataattaattataaagaaactattatatggctttatagattctcgagggttggtcttaaagttgtaactttttaaatatgttgtttaaaatttggggtcccattcagttttggactcctccacctcaaggttttctgaggtaattcataaaactctaatgaccaagctagccaccaaattaaaaaagttaagaaaagaaggttgagtaagcgggttaaagaagataaagcaaaaccaaactgtatttgtattacagaccataccccatctttgaacaattccttcctctttcttcttcttgtttttccctttttcatattgaaacttggtgtttgatcacgctttaacaacgagacatgtgatattaatgatgtatatcgtccaagactaaaaaaaacaaaataaaaataaaaattggccaacactattttcttccaattgaataggtattagtacatatgaatctagtattgtaatttcacgaaattaactacataattaaagaggattctactgcctaataaaaattaatacgtacattagttattgccatgctaattaattcgttaattaagattagcagtccttatttcattgataaagtgattataaaatattatttcatgcatggtagatctttttctctctctttcactcttgtcataagattagatgtattaattaagttagttgataaaaccatacatattctttgagataaagaagaaaacaaaggtagggagactacaaacagaatgtcccttaaacaggtgttaaagggggaaaatgcttcttttatccactttgcgatcattcttcttggatcttaatcataccaagagtgtaagaatatatgcttccttaactttattatcaaccaatacatacaatttttcactatgtacataagttactgacaatttgatcttgttgctatccaaaactagaccaccaaatctagacatctaatgctttattgtatgccactcaatttgatcgaatatgctatgataattaaggaacgactatggtatacaaggcttttgttttttttttttcgtttgttaagttgtacataatattatgttcaactgttaatttatattaatatatttatataatcataaaaattaaaactacatattatcttccataaaaatattatatagctaatgtaatacagtataaatgaaaagttctcattttttttacatgtaattaaaacagacttttagtatatctttgagaaattatgaatagttagaatatcaaaaacagagattcatttttatctcacacttaatattctatttggactgcattagtccatatattttttgttggaactttgatgaatcttttaacaaaatataggagtttctagtgtgtgtgaagtagaaagatatgagcaagagcataataagcaagagcataatgagcaagagcatccgctgtattagacttatgtatattttggtctttttgcctcttgacagttaataccgttaactgtttttctgctaattagttatcttctagcttagttagttttgtccttaggtcggttgttagtcatgtacatatatcagtatcttgtaattctgctattcattcactttgcaatacacttctctattcaataaaatctttctttgttctctgttttctgttatggtatcagagcggaaaagtatgcttttccacgactgatcccgatcgcttccgcttctcctgcttagccatgtgttcttcttctctggcaatggtggcgcttatccaagattgctaatccaacattctttttttcttcttattttcttctttcttgctcctttcttgttcttctcctgttctgcgatgtcgaacaatgatcaagaaattgagacaagagatcctactccgattatcagcacaaatcctcagtagataatcaatcagagtactcaaatgcaaagttcaaggaatccaattgaagatccaaatccatattatctccatcatggagataatccagggaacatcctggtctcacaaccacttacagggcaagataattacatctcctggagtcgagcgatgcagcttgccatatctgtcaagaacaagctgggatttttagatggttctattcctaaacccccttctactgaatacaatctttataatgcttggattaggaataataatattgttatatcctagattcttaactctgtttctaaagaaatctcctctagtttgttgtatgatgaatgcgcagcagccatttgggctgacctcaagatccgtttccatcaaagaaatgggtcacacatttacaacctaagaaaaggtctgatgaaccttagacaggaaaaccaaaccatcagcatgtattacactaaactgaagaccatatgggaggaattgtctaattacagacccaattgtacctgtaatggttgcacttgtggtggtgttaaaagacttcaagaacatcatcacatggaatacataatgtctttcttgatgggtctatctgacaatttcactcaaatccgtagcaacatactactgatggatcccctgccagaggcaaaccgtgtgtttcacttggtgactcaagaggaaaatcagaaaggtaacaacattaatggacagaattcaaatactaatcttgcctttgcttttcagaatgacaaaaatcctcctccaccaagatctaactcacagggaaacaagaatcagcaaacaaaaagaaataggcctttttgtactcattgtaatatacatggtcacactattgagaagtgttataaatccatggctatccaccaggttttaaaagcaacagatcaaaggatgctagtgcaaaccaggtgcaaaccagcaatgaatcgagttcctctgaagaaactcacaccttacttccacaactcaatgcaactcaataccaacagctacttaatctgcttgcaaatcaactaaatggtatgaacaatactgacccgagttcctcttcaggagctacaggtataattttatcaaatcattgctttactccaataatgaatcttggattatagattcaggagctactagacatatttgcaataacattaacatgtctcaatatgtctgtcctataccaaaagtgaaactaattttgccaaataatgaatttctttttgtccaacaaagtggatctgtttgtgttaacaaaaatctcatattaactgatgttctttatgctcctcatttcaagtacaatataatctctataagtagcttaaccattttaaattctatttctgttaagttctctactgataactttcgaatacaggacaaactccaacagagggagattggcagaggtagaaatatcgatggtctttacatcttggatactgctcaatcagaaaatgtcctctctgttacagccgaactatggcattcaagattgggacacctatccgagaaaagattagcccttttgagtaaacaattaaagtgtactgttaataatgttcacaaacattctccttgttatgtttgccctttggcaaaacaaaagaaattaccatttcctaataaaattattttgctcaaaacaaatttgatcttgttcattgtgacacttggggaccatatcatgttccatctcactctaactataaatattttcttactttagtggatgaccacactcgattcacctcggtatatttgatgcaacacaaatctgaggtttccaatattgtgccacaatttattcttatgttcaaaccagttccaatgcactatcaaacgttttcgatctgataatgctcctgaattagttttcaaggatctctttggtaagcttggcatattgcatgacttcacctgcatcgaaacaccagaacaaaacgctatagctgagagaaaacatcagcatctcttgaatgttgcccgtgccttatcctttcaagccaatatgcctataaagttttggtccgaatgcataatgactgccactttcttgataaatcgcactcccactcccttgcttaaaaacaaaactccctatgaacttttatttggaaataaaccagattattctcatttgaaaaattttggttgtcttgtgtttgcttccaccctcacagctcatagaaccaaatttgctccaagggccaagccttgtgttttcttaggctaccctcgaggtgtaaagggatataaactctatgatttaaatagcaaacaaatttttatttccagaaatgtctactttcatgaacagatttatccttttaagactcttaatactgaaccaaatgatgttggtcctttttctaatatggtttttccctctactatagtttctaacacacctgtgagtgatttccctacagatgtcaatttcagtagcaacacaaatgacaccacacaggaacaaatggaagaatcgaatgatgctggacaacacatatttgacagcaataatgcatgtcctgctgctagtgaacccacattaagagaaccagcaataagaagaaccactagacagacgaaaccccctgcctacttgagagattatgactgcaattccatcttgcatgatcaaccttctacacctcatccccttagtaagtttatttcctatgataagctttcgaatacttataaatcttttgttttggctgtcacagcactctttgaaccacgaaattacaagcaagccagtcaactcaaagtgtggaatcaagctatgcaaactgaattatatgcccttttgaagaacaagacatggacctatgtcaaacttccaccaaacaaaagggctataggatgtcgttgggtcta

SEQ ID NO: 298835 - DNA, 4858 bp, Cannabis indica
attaataatataaacaattatgaggagagaattgttttacttaaaaatttcttatgctcacatagaatatttttgggatttttttatttttacacttcaaaatagttttttttatgtatttttacggaattctacatagaaacccctattgcaactagcgatgcaatctaaattgcaacaaaaaaatcgtatagaaattcctattgcaactagcgctgcaaccactttagaaacccaaaccgtaaaattagaaaaaaaaaaaaaaaaaaaaaaaaagaaagctaaaaaaatagtatatgagatagttcgccaataattttttttaaaaaataaagataaaagagtctaaattttttcaaaattttttcaaaaattattattattaataataaataattatgaggcgggaatattatacttaacaatttcttgtgtaactgaacattaataaataataggatgtattaacttatttttattagagatatattctaatcaattttaaaaataatatgcatttgattattccaaagtggattgtgtcttttcttttctcccgttatgatatctatgaacactattttatgattctctttaggataaatactattttagattttatattttgtaaaaattattaattagacactctgttttgttaaataataaaatgaactctgtatttttcaaaatgatacaaataggacactgaactgattttttgtcaaaataaaatttaataataatttgatttaaaggtgttatgacaaaactgtttacattttctatatttgttcatgttatgaattgtcttcaaattgattattaaaaaaaacgttatcaaaaattaagctcagtgtcctattttaaccattttgaaaaatatatggtctattttttcatttaacaaaaccgagagtctaattaataatttttgtaaaacacaagatttaaaatagtatttacccttctctttattgcttttctttttttaagtaaaataatacactaaaaaaaatgaaaagacgtaaatgttactagttaccacattcatatagatgttaggtattattattagaataagtcatttgtggggattaaggaagttttcagttggttgaaatctcagaattattccagagtaaggctgaatcatatagtcttgttattcaagcgaatcttaaacgatagaagctgtcaattttgaaggcaaagttctttacagaaatagtataggaccgataataaggtgtcaactttgaataagtttgcttgcaaattatgttgaagattaatattattaatattattaatgccaaaaatcaaatttacttgattttagacatcatttttgctaacaatcaagttttcttgatactatcgtaaatacatcgttaaaatataattttttttggacgaaaaatcaagtcttttggatgtcatcacaattgcatcgttaaatcatcatacatatcatttatttaaatttttactaaaaatcaagttttcgtaacaccattactgacgcatcattagacattattttaattagcttagctaataattaaatttttatggcaccattgcaaattcatcgttttgcgtcgttttttgcaattttcaaagtaacaaataaaaataaataataaagaaaagaaagaaataaaaaaaaaaaaaaaaaaaacacacacaaaaacaacaaaaaaattacaaaactacggtttgtacggagtttttaatatttttacagtttttttttaattttattaacataaaatacgatcttttggtgtatttttatgttgtatttttattattttattgttaattttttattatttgtatatgattttttatgttgatttgttgttattttgatgttatttttttgttactttcatgtgcttttctggttttcttgtattttttaaaatatcataaaattatatataaaaaaataaacttaaagatgtaaattttttacaaaaatttgtgtttcatataattatcctaaaaaaaatcgtttacaatagtgtttgaaatccataaattagtgtttattattgggctgaagaaaaaaatgaaaactgtgtagcactttttaaatgacatctttcagtttccttggctttcaggggagaatttcattctctggttgtgccagttgggcaatgtggaggtggtcgtgtttgctggttgtctctgggagatcatgtggcagtgaaggaatgagattttgttcaaaggtattcgatgtgatctggctaccatgggacgagaactgaagaactgggttgttgaattttcatgtctgctacaccattaaactgatcctactcattgggctgtcgctgacgaaggagcgggcctcgagcattggagcattggctgcaacctgtggtattcagttaaacactgccctggtttgtgtttcacgccattctgagagtttttttgcagactcattggccgattggtctagagttttgggcactgttgtgtctggttgtgttggtgaggtagcctcccatttggctactgcctacaatgtaaaaagaagggtgacttgatctttggttaaggcttagttagacttaggagagatcttggtacaaacttaacttctaaaaaaacttaactatgacacctttgataattttacatcaaagcttaccaatccaatctaatctacaaaggaatatattatattgatatattgctgtattacggttttttgacatgattggattgtcaacataatgagattaattgaaaaacacttaaaaatttaaaaattgggaatttcattcttgattagtcgtttggatataggtcatatacgtaaaggaatgacatttctcaaatatcaactcttccttgacgaatggaactcaataaaacgcctaaagaaaacagagaaagacattgtttaactcacatttacatataaaaatcacacttttatacatgtaaagagagtaattagtaggaatggatgggagtaagaagagtaaacatgaatcattactaaggcagttcattttaacacataaaaggctcctaatatccaaaataatcaaataaaaaccagtacataacgtgtccacatagttctgtgatatcataaaaagaagctatttagcaaaagccacacaaatcacacagtaaataccattgatatcttagtagttaagtaatagtgtagagaaataaaacaagcaacaaacgatgggttaacacataacaacaatacatcccttgttcttgctcttctccttgtctttattaaagaagcaatggtgaatttggtcatatatatatatatatatatatcatttcacggatgatcacttccatctcttgaacttgccaaacccaccatgcttccagcgcttcccgaacttaccatgcttgaacttgccgtggccgtgatggtaaccaccatggtagcccccatggtaacccatgtgcccatgtgaaaggcgatgtgccccataagcggccgctgcagccgtcagaccaccggctaacatgggccccattcccataccatgtccaccgccgtggtgatgtcctgtagtatttatcagaggaattcgtcaaaattaacaataaagaataaacacagattaagattaccagaattttccaagaaaactataaagaatttcaaagaagaaagaatgaagaaatacctggtgcaggatatggatatggagcaggaggaggaggatgaggataagcggaaggagggtatccaccgggaggagtatagggcggtgggtatgcggcgtgaggcgacggaggagggtatccagcagatgggtagccgggtggaggagggtaggcttgatgatgatgaggcggcggtggatatgcagacggcgggggcggagggtaggatccagagtggtgctgctgggaatagtatgcactaccaagatgagagaagagccctctgtctctctcatcgtaattgttgtagtcgtcctttcccatctaatcaatttacagaaaaaacaaacggatttttcggcagacagagaaactgatgacgatgatgatgaagaaagatagaaatgattatatatatgtatatataggaattggattaggatggattgtgcatggagatgggcaggagatttttatgttgtgattttgtaaacaattgctctttccgaataatttccctaaatattagtattaaaataaaatctatggatgcgccgcgttgcttaaacgccacttctttaatttggtaaagctcacgcgcttttttatctttagaaaagtcagaagaatccatcctcccttccccctttctatcacggtcattttattctaattctatttattttaccttttctcttattaaaataataatggacgaataatttaggattacttggagtataaatgctttatgtttttaattttatatacttaaatatttttttttacggattaagtatcttaaagttactatttaccaatttctatcatgactattccgattacatgttacactattatttatccatgacataatttattttaaaatatcttattcaataattttaaatagaaaaaattaattaaattttattttaatttatataaaattggaaaataaaagatcaatctgttagagattttattaccatgaaaaaaaaattaaaaatgtattataattctattataaaataatatagtgattaaataaaaaattaattaaatatatattactacatacactatatatattgtatatactagtaaaaactacgtgcgaggcacgtatactaaatttatgctagtttttttctatgttatttgaaagtgatacaattaaaaa

SEQ ID NO: 298836 - DNA, 2133 bp, Cannabis indica
atcgctatgttatttattttgttcactatgtcatttatatacactatttgcgtaaaatttatgtatattgcatatatatattattgctaataacgtatatataactcaattaaaaataaaaaaatggatcatacagactaggaggtaaaataatactaactttattatatgggggtaaaataataccatatcaaaagtgagaggataaactaatattagtgacaaaaataaagagataaatcctctaattattctaaaattattgtttttactttttagcttaaaacttaatttttaaaaatactcaaccaatcaaatattcttatacattttaagttttcgaaaagataaaattgttttcgaatttcaaagtaatcaacccaatgaggtaaaacttttgagagtttttacgtttgtcgcaattaacaaaaataaaagagtaatttgcggcataaatacttacgtttaactttcagttgtaaataaatacctaagtttaattttttgtggtaataacctaagttatatttatagaacttctgtaggtacctaagtattaagtaaattgccacatgacaattctttttttttagatcaagaaggaaaacttcattaatcgaacaagccaattacaccttcaatcctttccaaaggaaaagacccaacctcacaacaataattaattacaaatcaatctctcaaggaaatcaagctccaatttggacccttttctattcttgagcacactcaatctatatttgatatcttttttaatactctaaactatacaagtcactgtttttgagtaattcgaaaatatacaattatttctattcctccatatgcgatatattgttgctgccaacattaccaccaacaaccttccaacgaagctagactgagcagtgcacaaccaactataccaactgctaaaattgctagactagcccttgaaccctagccactcgaacaattcagctaacaccaaattcgacaacctgtaaccaaaaaataaatgctgatggcattccatttttgtaccacacatagcgcaacaagctgattccacatcgatatgaaaacttctcagcatgtctcttgtgagaagatttgtatggaccgcctgccacattataaaaccatgtttaggcacattgaggccacaccagatggctttggcagcaaggtctatggtctggttcaaggacgagttatagagtttaaacactctaatttttccccaacaccaacagccttatatcatcttgagagaaatcattccttaaacgacacaacttcttctaataccatcttgtgtccactttaaaattgtaagtctaaaaattattccctttaagatagactgcatttacctatttcacccacaaccacaacagatctcattcattcattaatcccaaataaacctcgcaagcgaaaccttgttccatctagtgccatctttaaacccaagtacgtcaagagctttgggaagacaaaccttctcccaactagttagatggattttgggccgattctctttcatcccccacagaaaaccacagcacaacttctcaatttctttaatcacgctttgaggcagaagagacacatttatccaatagttccttagaacaatcaaagtagattggatcaggtgaactcttccgacaaatgagagatgtttattagcccaagataagagtctttgcttcatctttctcaggataataccacaatcttcaagcctctatttgattggtctaagaggaatccctaagtattttagaggaaaactcccattagataaattgattctttgtgccaaagactcagggtgagtcactccacctgaatagatttgaaatttctcacaattaatagtcaagccagaagttctgctaaaatcctccaatgcctccttgataacttgacccgactcctcatcccctttacaaaaaacaactaaatcatttgcgaaacataaaccgaaaccaaccatcaaaccgatcagacagtaaccaaactttcggttccacgtcatcactgaattcggcggtcggttttagtttttttgacatggcggtcggtttcagtttttttgacatggcggtcggtttcggtttttgaaat

SEQ ID NO: 298837 - DNA, 1015 bp, Cannabis indica
atagtctctaatggcgcaacggccgttcgagaaactgccccggctatggcaccgcttattaacctatgtagagaaggattagaaaccttaatcttcgacttattattcttcttcttcttcgtcagtccatcctcctcttgaccaccgaatcttctaataccctccatgaacttcatgtaaaagtcggtgtacgaaagcttcatgccactgccgccgcccccaccgtcggcacgggggttcggcgaaacaccaagaccttgaccaacactagcgaataagccaccgaggtgatgaaagccatcttggaaattccattgagaagaccctaaatcgcaaaaggagtaaaacccatctttcgtctcgtcaaatagttgaactcctctcctacccactaatccaagaaagaaaaaaaaaggaaaaaacttgcagacacgctcacttttcttttcctcttcttctagggttctaatggaaaagtcaaagcattccttctattgttattgttatttacaagagtttgagtcaacaatcaattttgagcaaatggatatcctaagaaaacgatcttgttttacataatgagactacaagaggagaaccaattcaaaatatcagaagatgataataatggggctagcaagaatataatcgagttttgagatgagcaataggactgctgagggcggctaaagcaattcaaacttttattgatttttttttttctcttttcacctaacattgtacttttatttttccctttgtggatatatacccgctattgtggagtcacccttatttgtttttaaagttatgtgagacaaaaatatgattcaaataagagtatttatataaatacttaaatttaaattttagttacaaataaatataagtttaatttttagcgttaataatatttaagttataattttagattttttttaaatacctaaatgttaagtgaaataaattgtcacgtgacaatctctaattagccaggtgattaaatttttttttt

SEQ ID NO: 298838 - DNA, 7296 bp, Cannabis indica
acttttccacttttaaaacagaaaactgattaaaaacgccacagtttatggaaattcttttggtctaactttggattttcgcaatcaaattctttgcttttttttttttttttttttttaaataagtttctgtttgggatgatcgcattctttgtctatggtagagaatatagatctaagtgagaacactctcattattatgaatcatgttttcgtttccttattgttaagtatttcttttcttcctttctaccattgcttttagttagctagccattgtccaccaaattttgattactttggagaatgtcaagccattataattactaattttttaagtattagggtattttgaggaagtgatgcatgtttttttccttttttttttttttttttcttttgatataataaagggagaaatgtacctgtttaaaagtggcagcattttttgtaacacaatgtaaaatcgtttaaggaattttatttttttaatttcattagggtgtggcagtgtttctgtaaaaagcgtttcctgattgatgttacatgtttcttttaaaaaataaataggaatgtaagctatctattattgcaagcttgtcggcatttgaactatatttttcatttcttaactctttatttatttcctttttcagcgaaagggatcaacaatttctgttgctcaaacttttgtatgttgtctgttaaattctaattattgttgtccttaacgaacatttagcttcaccaatatcagcaacttgcaattcttgtgtgaaaatgggagagttcaaaaatttgcaaatagcttttgctcacctgctttcatgctccaagagtacagtctccgaggtaaggatttgtcaggaaacagtggtattcaaatggacctttccaattttggaagtaaggatctttcgaaaaatctgatggcagaaccttctgtcgaaattgctggttcttatcctcaactttggagtgattatgttgttaaattgagcagagtattctgttctttcctttttgtgccgggagatagtggatctcatcatgtccaaatatcatctggtcgaacatcaactcctgtatcttcattatacggtgaactttcaattaaatgggtaatgagggttcttcttacagtgttcccataccttaaggcttgctcaaaccaaaatgaacttcccatccatttaaggtgaaagtccccttttgtttataatttttattgtccactgtttttctgtaggaatatgtatgttttgttggtgtggatacatgcatttgtttttgaagatagtgttttgttaactttcaactttttctgtctgattcctgggttcgtctctcactcccaggcttattattattattattttttccaaatattttcagggtctttattaaaactctgcagcattgtattctagttgcattcaggaaggtccttgttacatttcctttatcattagatgtatttcgggaagaaggaatatgggaacttatcttttccgagagttttttttatttcggaccaacttctgaggatgcttctgcaaagtcttgcacatataacgagtctctgaccaagaatgaagtttattctacttctcatatcattgacaatcaggcaaagagttacggggttgacattctccagagggagttaatctcatttctggagtttgctgctactttgagtggaagtgcacataacttggtacttttcctttcccattcttattgggtgcttgtttgtatacatttcatctatcattacatctctacatgttttgccatttgcataaagtaattgaggtgcagacagggttactcgtgtatcgagtatcagaattgccaatttctttggctccatttggtatcacattcttttgttttttttaatattatcactttcttttgttttataaaatagggataatatttttgagaaacatctttttttttttgggttactaagggtgcatttggtaacagttttttttattgaaaagaatttttcattaatcaattgacaatttacaacccaccataggcaagagcctcaacaactagacattacaacgggtttactctagcatttggtaacagttatttaaacagttttttatttttttttcattttttaaaataagaatcaaaaaaattttgaaaaccaaaataagtttctttcaaattttttttaaataatttttttaatcatattttgtactttttttcttagacaatattcactcaatttactttttctatcctcaaataaaaacaaaaaataaaaataagtgttttttttttaaataaaaataataattacctaatgaattttatttttaaagaagaaaacaaaaatgattactaaactacatttttatgttttcaaaaataaaaaacaaaattaaaacatgtatttcaatttctatgtttaaaaatttaaaaatcaattttttaaagaacacaccctaaatttttatttttgtcaggggagagtgtagaatgattgagattagagaaagtgtagagagtgtaaagagatagcaaataggcataaccgaaaccaataattacaaaataatttccactcttcaaactagagaatgaaatctttttgaaattcttcacattatgcagtcgaagggttacccatatcctgatcttcgctcaatgactgttaacatcactgttctgaccttcagaaagagtctttctttcttttgagctataaccaccaaggtagagccacccaaagaacctttttatccttgcgattctccataattgagcaggaataccccatcacaggctaaactcatttgactagtttataccatagcttgaaggaaaaatcacaatgtaaaatatatgtttatgtatgattgattgtgttgcattcggacattctatgttttgtttgggaacaaggcatctaagagataaaggtgatgtaggactgtcggtgctatcttcaaaaagatctgttaattttttccagcgacatgctaaactatagcttttcaagttagatttggtagttgcatgacattctgtgtaaatataatatctctttgcatacttgatatatttgtgtaagtgaagatatgctgttcgtctgcattccaagtatgtatgctgccaaattttcagaatgatatcttacctttttatatcttatcccctcattttgtggcagcctgaattgtctgctctgctagatgcctttgagcaatctgcttgtaatcctgaagtttctaatgttcttgcaaagagtctgcttcgtatattacagctttcaactgagaaaactattgcttcttgtaagtcacttaatgctgctgctcgggtgcttaaagttgcttgtcttcaagcccaagaatccaagaggttccaaagtataggttcaagtgttgagggtaatgctattgatgtggtttcgtcttacacccaacagatgcctaatgagcaggcaataggtcaatgttggttcaaatgcctggatatatccatggagctctttacggcaattttctcagcagcagatgatgcaaggagtttgattcttcatagctctgcatgtattgattgtttgtttgatttgttttgggaagaacgtttgagaaataatgtgcttaagtatatactcgagctcttaaaggtatttttgcttctttcttttgaattgttattgtgctattaagaattgaactgatggttgattgttttgtttcaaatttatacatattttcagattgtacctgcatctgaggaagatcaaacagccaaattgctgttatgttctaaatatttagaaatgtttacacaaataaaggaacgtgagaagagttttgaagaactgtctattgatttactggttggaatgcgagatatactcttaactgatcctgtggtaattaactttctagttcagatcttaccaataatttcattcgtacactgccttttcaatttttttttgaaaaaaaaaatttaggaaatctgcttaactagagtttattattctgatgtgctatgaatttttttttttcagtactatcaggctttgtttcgtgatggagagtgctttttgcatgttgtgtctttactaaatggtaaccttgataaagtgggtggagaaaagttggttttgaatgtttttcaaactcttacctgtttgctcgcaagtaatgatgcctctaaggtaatcctctgtttctttctttcttcttttttttctttgaaacaaaacaatgctacctgtattgtgaatatggttttacaatactaggaaatatagagtgcaatatctgtgatacttagaacaaaacattacaaaatacaaatataaatcctttccctaatcaaatcagagaaaattactacagaataccctaatctcgcaaccaaaacaagaaaggaacatctacaaaattattatcattatgcagctataaagcaacttttaactctactatcccatattctgttaatctcactttttcactccgtgaaagttctttttatcctttcaagccataggaaccataaaacagttgttccattttttttttcaacaaagagaaagaggtcgtttgtcttagaccaacctccccccgttatagaaattaataccctcacttgtggcagtaaacgaagtacatgtttggcagttctatgggtggtctggttagaaagaaataatagaatttttgaaggttcggaatgctcagtagaggtcctatgggataaaattaaattctggacagctacttgggggtacaagactaagcattttgaaagtgtttcatttttagacttaattagagtatggaaaacattactgtaagatttttacagctgcctcgtgttttcttccactgtgagggttctggttgtttatgtgcgtcctagggggttgattgtttcaatcaattttatgaggcagtggtttgtttttaaggcaccttgagttgttacaagttttggagtttagttttgctatgtaaccacggttttcctccgccacaagcaatggtttttgtaggaaatcaagctatgttttgaactttctcaatgaattctgagatggacaaaccgcctttgtgaacatgagaaaattggcctttgagttgaagtcttcgtgccttggtctgaaaagcaaacttctgttcaagagcacgccaaacagaggaagacgtggtgtagttcgcccccgatgcaagaatgctttcagacatggaagagcgcagccaagaaaggagcatccgatctttgcgacgccattgaagatactcaggatttgaagcatcattgacaagtgtggttggaggaggaacaccagatagcaggatctcatcgagatcatgcccaataatcgtgggaagaacttgagatttccacgagagaaaattcgcacgatccaacttgaccgtgagtgaggaagacagagagttggagaatggattccaagatttagtagcagcgggagtgatgacaggagcctgaggagcttcagttgtaggattaatggcaggggcctgaggatcgtaggttgacgacgacatggtcttgggtcaagactactgataccatgtagagaaacagagcataagcaagaaagaacaaaggaaaggaaaatgaaagaagctcatttgtattgaatgacaaccattgtttatatacaagagaattaaagaacgaaacaaagaaaaaacaaataacagaaaactaactaccttaactgattacacaggttaactaacctaagctaacagaaaaataactaggtatagttaactggtgttaatagctgtaaccacagttttactctgcgacaagtgaggactctcaataaatttgggagaatgttaccgttggatatgtgacctataaaactcaggcagaagtttgattatagggtcatatgctggcctctacatggatttcgtcttcctaggagtgtggtgattccatattctgctattttggcttggactggaagctgtactgagatgctgtctatgtgattgtgtgatgacatttcttctccatgtttgtgacttttattttttctttggtattcaattatatgttatttactaaagatattttgatgtatctttgattgctatttgaatgacgtgtctttgcttgtctatgtgtcaaacctttgtctcttgtgaacttcttgatttgttggtgtatttttacaggctgcatttagagctttagccggcacaggataccaggcattgcaaagtttgttgctcgacttttgccagtggcatccaagtgaaggtcttttgaatgcactgcttgatatggttgttgatgggaagtttgatctaaaagcaggtgctataataaaggtttctacaggatgcaaacattatctcaaaagtttcttagtccacatttgcgattctttatattcaactatacttgctcaagttttgctgatttttaaatttaacccaatgtacaatcataatacctgagggacctctaactgtttttttttcatactcagaatgaagatgtaatcatactttatctaagtgtcctgcggaaggttggtgattttttttttttgtgtatcctttctaatttaatgttatcttgaaacttaaatggtctctctttctctctttggctgaatctttttattctgaactttcattctattaactttgttttcccatatattatttgctgtttaattgggcagagtagtgagtcattacagcagcacggactggatgtgtttcaacagttactgagagactcgatttctaaccgagcttcttgtgtcagagcaggaatgcttaattttctgcttgattggtttccacaagaaagcagtgatagcgttatatttaagattgcacacttaattcaggttattggtgggcacagtatttccggaaaggacatccgtaagatatttgctctcctccgaagtgagaagcttgtgagtcagcaaaagtattgctcattgcttttgtccactgtttcgtcaatgctacatgagaaaggaccgactgccttctttgatttcaatgggaatgattcagtaagtttttatgcattcttttctttgacaaaagtttttatgcattcttgtttgttccaaatgttagaatattctacgtgtacctttctgtgcactttcacacttatggacatagccttttgttaggatcttacattgaccatgtatgattaatagtatataactatttgggtgccctcctttcttaggctagcttttgagagtgagttcta

SEQ ID NO: 298839 - DNA, 2468 bp, Cannabis indica
aaaaaaaaaaaaaactctatattattagatcattagatatttagatgatgaagagagcaattggtaaattacacttattttattactaggtaaagaaaacaaatagacaaaaggagaaggaaaaaaataaaactttaatatatttggctcataataacaataaacaaaactacctaaaattaattattgttttcattcatcaaacttttcaaagccatactaaacgaccgattagtggtgctgtaacctccatcaacaacaagattaagaccattaacgtacttagactcatgactggctaagtacaaggcagcctcagccacgtcatcgggctccggagcaggccctttgagcacggccgaagcacaaatcacgtgatccaccacgctcttgtttaaccctaccgcgttcctaagcaacggcgttgctatggcgcaaggagatacagcattgactcttatcccgaactgacccagctcaacacaaaggttcttcatcagccccaccaccgcgtgcttggaggccgcgtacgcatgaggcgactccccactacactcggctgccacgctggaagtgaacagtatcactcctttcctcgcagggatcatcaccctggaggcatgtttggctcccaagaaagagccaaacagattaacctcaagtacacgcttgaagttatcattgtcggtgacgaggatggtagggtccacgtcaccggttatacccgcattgttgaacatgatatcaagtttgccgtgtttggacactgtgaaatcaacgagatttttcatgtctgtatcgttggtgacatcgcagtggaagtaggtaataatgttggccatggccgatactaaaccttcgttattaccaatggagatgagtatttcttggcagagagagttgccaagctcatcttggatgtcggcaataacaacttttgctccgtggtggacgaatagtctggctgtgctttcccctatgccgctagccccacctgtcactatcgccactttaccttctaatctgcttatatattacacaaagacacatataatattataaatttaacagctagagtagtccagagatgatgtttaattgtacagaaaaaattataccttttgaaaaagggaggtgttgaggttgaagaagtaatgccgctcatgtttcacaactgtgtaatggttgaatgaactatgtttgaaaccctataagcattattgctttatatatatgtaaataagtaattaatgacctccatgatcatggctatggcttgaaatataattattttatataaagcttgttacaaaggcttttttaataagtggaatattataaatgaaataaaacaagtagaggtagctaggaagatcgatgcagttattagaataattaacaaagataggagagatcaataaggaaaaggccaagaagaaagctccaacagctactactgaattggggaacataaatcttcagtaaaattcaagcatcttgattatctcatgtgtgttacaattatttaatacaactatgttttttcatgtctctaaagttttcaaatgtctaaattttttattatagttaaggaccccaggccagccctgctttatattagctttggcattatattaacacgaatcggaatattattaaaaagagagaaaattataatttgaaagttacgtgagtatgcgagacatggtttttgaaactgaaactagtactgtagtaaaacaatattgggattaacgtaatgatcatatacttaaacctattaattatacggttggagaaatggaagtggtaataagcaacagggagtagtgtactcccatatcctcaaccccattaaatattttaatcttcctatccgcaccatttccggggcgagtaatctttcatggggattcatttacctgaaagataataaaaattatatgcagtttagctgagtgatttacggtctataacaatttttcttttttgcaaagttacagtgttaaaagaagaaaacttacaaaaaatactagaatttgggttaacttttacaaaaatactataatacggaattttttttcaaaactactgtgtttttataaaacaccagtagaacacaaaacagaacaactcaaaacaacagtagaacaactaaaaaacaccagtagaacactagttaaaacttaacagcagtatactgcagtatgaaacatataaaaaacacaataaaaaagtaaaatatactgcctagctggcagtatttttgtaaaaagataacaaaagttagtattctatctaaatttcccataaagaaaggggtttgctattgggctggttcaagtttaattaacacattatcgttttgagataagttgaaaaataccaattttattaatcaattgatcaaatttatctctaattttatattttaattgaaacttacatctttttatatgtattgtacc

SEQ ID NO: 298840 - DNA, 1895 bp, Cannabis indica
aaaaaaaataggtaagattgttaaaatataatttcgataaatgctaaaaaaatccttagcgtagaaggcaaacgtgatatccctaactgttaataaaaaagtagttttgtttcttctttttattaattaatatattaaacttaattttgtttttaattaattttatgaatatcacgatgaatttttctacagtctcatatttatctaacatgtagacttaattcccaataagaaaaaaatgacatctcaagagtataaactctaatagaatttttctttgcatgataaaaatatgcaagaatgtgcgaccgagacagggtctagttgcacaatgtgtcccatagtaaaatggataaaagtgtggcatagagagtagttagcacagccgcaatatatatcgattatatacgatgaaccggtgtctctcccccgcaccttatgtaaagatcgcatctttacaacgattagtccatatattttacgcgacaatgatggacccacaagtcttatgttatcaattatacatgaatgctcaatacacgattggtataatctcaagcataaaaaccccgagaggttgatgcattaacacatattgtccaagacccaatatacagggcaacttgagtgaactcgtgatcagttcacatgttgccaagaatacaaacggtcgatgtgcgatcaaggtatagtcgcgcctgttcgaatattaaataagaaaatggtcaaaattgttcttttatttattttacaagcatgtttcattccaattaaatgtaattaatattgtaacggtcttatctgacctgttatgtaattgaatgatcatttactttctatacaagtgagtgattaatagatacgaataagatattaatcacaatctagctttcaaaagtgaactaagtaaattaagttggctggaactactataatttttttgtgtcatttacatactcgatatttacattcttgttaattgctatttttattttgagtaatcgctaatttaggtaaatattcgcagttttgcttgtaagttcttacgtagctctaatatttacactttcaactttatttattttctttcgataacatatattaaaatattaattttactattttttaaaaacaaataagacagataaatatataatttatcgctaaaataattaaacagataaacataacataaaaaacattacaaagtgacaaatttaatagctaaagagactattttttttaacattaagaaacttaataaatatatatatataacaaaatattacatttatatttctggtctttctctttttgttttttttttgggtgagaaaaatgaacattgaccatgaacatgaaggtatcacaagtaattaagatgatgataagcagaagaaagacttgcatgttaaaacaactgtagtaagacttgttcagtcacttagagaaagatgtttttcttatcgttattatctctaaaaaaatgttacttttctccgcgcattttattattcaactagtaaaaattatttttaccaacacatctcgtaaactacacttgtaaaaagcttaattttttagcagcgtacatttgcactagcaaaacctatttttaccaacctcacatttgcgctgtcatagcaattcgtgcaaatgcctattccttgatattttttcctaacgcacttttacgtgggtaaaaataactcttatcaacgcaatagtgtaatgtactggcaattcttcaatcttatacaaattcaatttgtctttatcactaatttttgtttcaattagattaattttatatattagttatattaagatatttgaatatgctaatgtgggtctttaaaatattttttaaaaatcatattctataaaattatttt

SEQ ID NO: 298841 - DNA, 1389 bp, Cannabis indica
gattaaacaaatgttcaatatatttactcgtattgtatattaatgataggaacagagtcctgatctgaggaccaaatgtgtagatacatatatatttatattatgaaaccacaacaaacaaaaacaaaattcaatcattttctctttcctttaacatccttttttagaaaccatataaattcttccaattataatttataatatctaccacacacaaagcaagcatatacactgaaaacagaatttattagcacaaataatgcttaatgaagaaataaacatacacattacagagccacaaaagtagaaacatattgacatttgcttaattaaatttctttccccaccaaatataagcacctccctatttgaacaataattaaaacttattaggctgcaatacatgacacatggtcatatgtaattcccttatatacccttaataaagaacatgcaataaggagggtagtagtgtacaaaagggggccagttccatgtaacgtatacgtacggacttttcaaatttcttcttttcaaacaataacaacaacatttttttttttttttgaagtatatattatgagtgttataatgtagaaattggaagagagttgatctagtagccggcgacacactctggtggaggtaccgggttccgggatttatcggtacagtaatcgtaaatcatgtggttcatacggacccatttgtaccttctatactcaagggcagtaagtgcctggtaagcagtgccttcccaccaattggctcggttagcagcgcaattagctgggccaggaacaccacatccttcaatatcaaagtctctgtagtaagccaagaatggggctttgctccaatcaatcttctcaagtccacctctagtggcccaatcatcagcttcccaaagtgttgagtacacccccattggttgcctcgttgggtatggaattccctttgcttcattgtttttgtacactcttattggcacatcatccacatagaatctgtatcaacatataaataaatgattaaattgtacatatttgatattcccttttgctatatatatgtatttatgtacttacacaatatgatgatggttccagagaattgagtaagtgtgaaaagctgcagcagggtcgaaccaaaggttaaccctttgttctctgtcacccttgccgtgggcgtagatattggtctgaaccgtgtaaggctgccctgttctgttccccaagaactcgaagtcaagctcgtcacgaaccgtatttgtgtccgagttcatctgtacataatattaattaattaaattaaacaaaatcaaagtcaaattaactatatattaatatatatataacgtacatagaaagcagtaacggttcctgcaga

SEQ ID NO: 298842 - DNA, 5738 bp, Cannabis indica
tatatttaaataatgagcatcttgtgttacaaaaaaaaaaaataataagcatcttatataggacaccttagttaaaatgctgaattttagttaatttataattactactgtataatataatatatattttacaatttatacttatttaaaaaattaaatcttatttgatcacaattaattataaaatgaaaattgaaatgaaaaatcaaactaagagttacatacttgcaattacacttgtaaactcacctagtatatataaatataaatatattcttcaatgttagatagagttagagttgaaaaataactctaagccttagtttttctaagcaacccagaagagaaaagtactcactcaaccaaacaagtaagagatcactgctttatttatattggtcgaaatattacactcagaaccacatatagaaaaagccgaaccaataacaacaaaacacccaatactacagatatcgacatggaaccaacatattcgaaaccattcattgttcttcaaatcacattcttctttgtaacactttattatttattaccttatgctaaccccatttcagatcataacttcgtattcaaaacttgttcaaaccaaaaaaatattaccacttcaacataccaatctcactcacaagccctctcattccttttccaagagctagtctctcgatcctccaagtccaagtttttcaaaaccacccaattaagtgtcttggatgaccaaacagccattactggcctcttccaatgcagagaagacatcactaatgaggagtgcctaaactgcgtcaaaactctacccgaaacagccaccaccaacaggtgctatgctgcccgggtacagcttcagcagtgttatattcgttatgagccagaggagcttgttttggacgtgtactcttcctcacaagacgaactagtattactgcacaaaacttgtggcccggaatcaaaccatgtcgacgggtttgaggcgatgagggacgccgcgttattggctttggaagattctgttgtagaaaaaggcgggttttgtaagactaacttggaactggtgcaggcaatggtgcagtgtgagggggaaatggaagcttgtgagtgtggtttgtgtgtgaacaaggctgttgagatagctcaagaagaatgtggtagagctctttcagctgaaatttacttggacaagtgctttttaagttattcttattatccccaaggcatacctggtatggttttaaaacatctctttttagtcatcaattaataattttgaattattttcttttttttttttctttaatggaattgctctgtttctaaacagatgatggagaaaacaagggaggcaataatagtagcaacaatgggaaattaatggccattgttattggaggagcagctgctttgggttttgggtttagttttttttattgttcatcaaatctcgaacagagaaagatgacgatgatttggtgtagattgtatatgtatttcactattttgtttctttcaaaataagttactgtccatataggtgtaaaagtaggtagactttggtaaatttaatctaaggttggctatcagttagagaatttagggaaatttacaaggggataaagagccgtaaaatttacatttatttatttatttatttatcctctggctctagctactataaattacgtcacctaggatctattgcctttcccattacttgagtgtcacttacaatattaccccatatactaatataaaatttggacaaatctctacactaaggtaagtttaatcttcagtatttgacaaaaagatattgttggctatcaatttcaagaatcttagagtgagatttaagggctgtaaaattatattatgggaaaacaaagaaaattgatggttatatttttagttatttattcttaatgaaaaccttgcagtgatgtcatttaacatacttggtcccctagctgctatttatgttgcccactacttgagtgtcactttcatatccccaacccatataatcctttttggacaaatctctacagtttagtactccaattattagaatggaagagaagcaaaaaagcaagcaaaagaataacaagatacagtggcttcttttcaatggcttttactataaatacatgagtagtaatgacatattcatacttttactttcactaatacagctataaaaacttaactctttttttggtatctataccaatggtcaacactggtcaacatccctgtcctgcattactagtggatttccatccaagagacaaaatgctggtggtatagaaagtgtctccataattccataagcattccagcaaattgggtttgacataaactctcctttggctggaagaagctctatttccgaaagagtaagatttgtgcaaggtactgagtcactgcaagaaaagtgtatagcagggcttcttatgtcataagttccttttatgtttgagtaaacaatgtctgaaacatgtactgcagaggtttggttttgacaactcttggtggagcaatagtactggtctacaataatcggatttcgaactgtgtccatgtgaatgttgtgaaattttactccagaaactgctcctgatcccccttgccatgttttgattcgaactccgttgtctgagtgtttgatgatcgaatcgctcactgtaatgtttgaaacacaggctcgcgaattgcgcatgccaaggcttccaatgctgcaaaaaaagaaagagaaaaacattgtttcagtggattggcttttgatttttgaaaaagcgaatattatatgctgctactaactctgttttgaagcaggggaattttacctaattccatgacttgggccacaagtaaggttttttatgtctacattgtaacaaccagctccaattgaaacacagtcatctcctgtagaaaataaaaagataatgagtaatttgagagttaaatattgagaagaatagaaaaaaaaatgacttagtaagagcttgaaataattaccattggctatgagtgaattatgtattctcacattgttagtgttctctatatggattccatcagtgttgggactcatagaaggtgattttatcgaaagtgattcgacatgaacgttttggcaaccatcgaatctaaaatggaactgaggactgttcatgactcttattcctcttactgtcacattggagctcatgaagaaccttatagcctgtaaggaaagataataagcactattagtaaatagatagtaaataattttaggttaatgttagcctttttcttttttgttaacttacaactgggctatcacaaggaccaggtgctgtagttccattgactccctgtaacattgataatgtgataataatgtcagttcataagtttaatggagaaagatgatgttagagagtacaaagaagaaaagccttactttgtgaggcttgcaaggaagatcccaccatttctgtcctctcccatcaataagaccaccacctaacaatgccacaccattgactctatagaaaaccagccactgtctcttagtgatatttcttggccaggaatcaggtccatctggtggcatcagtgtcccatcaatcttttttttaaaaaacaaaaccaaaaaatgttgaaatgttattctttttgttttcacatataaagtagtagtaataaaatgaatgtgacatgaactatactattctttacctgaaaagaaatatttgatgatttgcaaggccctgtgaatattgtagattgtatcatgaaactatagcttcgaggaacaagaataacaatggcttcttcttgttgttgctgttctgtctggcaagctgtgtcccaagccatcttaaaggcttgagtttcatcactaacaccatccccaacagcaccaaaagacagtacattgaaaacagtactgactttattattaatagaatcatgtgcattgtaacttgggctaacagcagcagcctcaggtgcaggagaaggtggcaatgaaattctagatattgctagcaaatggtggtgaggtttagtattataactaagtagcctacattgtattggaatgtaaaaaagaaagaacacccaaatgagaaccaaagaaaaagataccatttttctaattcttgaatggttttcttttcactagatgaaatgcaaaatgttaggctatacttatagagacaaaactagattagactataggacttagttcaccacgctttggatatttgagagaatttgaattaaaacttgtggtacaaaattgtcatctttaattagctataggaagtatcatagggtatttatagacactatagagcaaggcacccacgtccttgggaagcataagactttcgttaagcttttttatgtgaccactttaagcactaaaacaagttgcaaagataatagagaatgagttaatgaagtctcttgttttatttttattgattaaaagaaaaatgtaagactaagatttactagtggaaacaactttttaaaggtcggtccacgcctgacactattatcataatggagtgaaaaccgaccattaccatttcaagtttggctttctttttctttcattctttatatatttgttcttttaaatatgggagtcagcaatgtatatggacagtataagaagaagtgtataagatatggggtagtatttgattcagtttctccatgttcaaccccattagtttcactttgaaagtttggagcattttaacttatcccaattttctagtattggccaatccattatcagtatcacagccccattttagagagtttcatagaaaatcccacttgagctttctttagtggaaagccaacacttaagtgtgcatgacaaaatagctcaaaaggaatatgtcactgaatgattttttttattccctatgatgtgtatcctattaggctattagtaaccaagtaccattattacatctatagatccaatccaagttggtattaaaatattgtatgaatatactacacttcggataatattccttaatcattgatatgctacttgtaatcaatttaaaatcaacacttttactttgatgagactaacttgttaaggagctagctcaacctacttagttaccaatcacacttagtgagtggtaggtactattgatttgagttttgtctcttgtcttgttttattgacacgtgtcgtatgcccactttagttttgacaaaataattcaataataataaattaaaagtagtcattttgaatggttttatgaatcatcaaatttaaatgttgaagtgggatattgggaaagttttattgtgaagaaaatagtggtggataatgttgttggattaaaaaaatgcaagaatgtcacatgctttggtaaattaaataattaggctaccaacttttgaagtgtactaattcagcaaaaaaataaatgaataaacttttcaagtgtacatatgtggctaagacaaggatttgtggtagataagataacacctcatgattaactttacaacttatatatttatatcatttcaaaatgtacataaactagaactgtgtaaaagattcgatgcaaatctcaaaattacatgagattgttttgttaacttggttacataaaacttaaaattaactacaactaagtatattagtttttttctaaaaaaaaaaaaaaaacgtaaaaaaaaga

SEQ ID NO: 298843 - DNA, 2289 bp, Cannabis indica
taataaattaatatatatgtataatgatcggtttcgatttttttagtcagtttattatctataaaaaaaaaccaaccgttcaatggcggttttaaccattagcggttttttcagttttcggttctgtcggtttcagttccaacattgttcggtaggtcgattttttcggttttttggagtttatgctcaaccctactgtcaaatggggagatccttaccagcttgtgcactccaacttgtgctttagcatacccaaaagcataatcactgtctactttgatagttgccctctgcgaaatcaaattaagagtcagaaccaaaagatgtaagattagccagatctgtatgaccataacattaatacaaagctccttaattttagttttttcagtggaaaagaagtgatcataacttcatatcttctactaaatatgatagtaaaaaactagtaaattaggaagcagtaatgtatatttcaaataacctccatgtaacatgagcaaggatcttgttccactgctaacaaagttttaagctctttctcctttgaaatccttctcatcttaagcaaaggtttaatgattggagagttcaaattgagaagaaaagcaatctgtttggcaatttcaaatgaaaacagtctaaaactaagagaaataaatatattttatttacagaaaacaagaatccacatagaaaataaaaaagaggatctaatatttggtgtatcagacaaataaataaccctttagtttcagaattgaccactgaaaatagtttcagaattttctccaaactagcatctgctactttctctgaattttctttttgcaaagactttttatcttctaccttaaatttccaaaatgaccggaaacagatcagactctgcttggagttccaggaaagaattccatcgatctgatctttccttctcttcttgaaaataaaaaacacagtatttagcaaaaagctggaagcgagtatttatcatccttttcttctcattttcctcttataagcaacctaatctcattggaaaaaaagaagtgcaacgatagagacagctattgagtagagaaaaaccttgtaaatgtaggcattctcctggtatctctgaacatgctgaggtctcatagcaacgccataagcgtccctggtcaataccaatgcccattagttttccatttcaataaaatataccaaaccccaggcgtatacttaaacaactcagatagactctttttttctctgaaaataaaaaatcccaattaaatctctgaccgaaaaacccaatgttcaacatggctcaaatcagcagcaatactttgagagatcgccaactctccgtcgattataacatacactatacgtaacctcacttctacatcccaaaacacctaacattgcatcaacacaatttcaattgaccaaaaccagaccaatattcgacccaataatttttataaaaacaaagtcaaaaaacaaagaactaaaaaaatacttgaaaattcacaacaatcaaaattctcattagcacaaacagagaaatcactccctcagactcaacacacatatataaataaacaacttattcaaaagaaatagatattgagagaaggagtacctcttgtgctcaaaggtgaggagaggattgagtaaggctttggtggtggacattatttgggttgggtttagcgaaaaaaagatccccgacgattcagtcggtgaagatctctgatttcttctacaacgaatcgagtttagagagaggcaggaggattaggtggggcaatttggtgcagagcgtttctgttgggtttgagagtttaagaacgagagggtaagagagatttgaaggtcgaagagaaaagattagggttttgattttaaatcccctatggtctagtttttgaactgacacttaaaaagtttatataacctcttaaaaggtttatataatctcttaagagaattatataacctcttaagtctcagttcttaactgagacttaaaagggtgttttgtttttaaaattttttctttaacttttttaagtgtcggttttggctttagtgtcggatcgacactattgggcttttcaaatgtcaattttaaaccgacacctaaaactaaaggtactcttctatagtgtcagttttttctaaattaaacgaaactcgaaccgacaccaaaagtatcttttatagtagtgctatggtattttttttgagcataaataagaaagataaatatttataaataaataaataatctatttaaaaaaa

SEQ ID NO: 298844 - DNA, 3838 bp, Cannabis indica
ctgtattttgatatataaagttgttatctgtgttttacaagcgagtgacacatgtaatttcaagtgtcctaatcagcttacgagcccattcactaagcccaagcgaatgatggcatgacccacgaacagagtcagacagagggttcagatttgacctcaactcttccataataagccagatgtatagatccaaaaggttgacactcgttcatagtcaacaagtattcaaataaaggaagacggatgccttcaagagtcatctagaaagggtagtcgaaaaaggtgtcagggagcatcgaccgtctaggactaatcctacgtggcacgtttgcgaaaagaatctcaaagaatcaagggttcgtcccttgtgtcagaccttgaaaaaggtgacacaaaaaaaaaaaaaaaaaaaaaaaacaagataaccttttttgtccaacacccactactctgatattctccaacaaactgatggctcacgccccacctatcactatcaaccaaacccgtgtatggatgacggttgtccccaaacgtgggcctccctaaatcgacccaatgttaatatatcaatgttttttaccccacaagtgggattatttccatttacaaaccctaatgggtctagagtagctcgatccattagactaggagcctataaatatgatattttcccttcatgcaaagggttagaaattttggcaaggcttgtcagaaaaatactctagctttaggaataacaatattgactctcagactaaggttaattaacaactcaatctcgtaaaaattcttatctttctatttttgatcttattttcttcaacttattcatttactaaattagtttttgaaaaactcggtaaatatttcggtactttcattgagagttaaagaatgtttctaccatttttgtcatctacaaactgggtaaataccagaacagtgactgagaaaccaagcgacctagctgctcgcaataaagatatagctaattcagttaggaacagttattttttgaatttaaatttaaataaatgaatatttatctttattttattaggttaaataaaaggttatatataccattataggtttgacctatgatagtagtaatatatgtgttaactcagaattttgttaacatatatgaggctctagacaattaatgaatctataataaaataaagtaaggaaattaattgtgtatatataaagaaaatgaatttttacatgattttgcagttaaaatctacatactccataagtcactcttatttttgagttttctgtttacaagatacaacttaccgtatatttttttttgtaaggaaggaattgaccatccctttacaatgatttctttcactatttatagggatcaaccatggtagttattctttctgatcttatcttaatgacaattcatgaaagtggacattccccacgtttcatgttattttaacacgtgggattaacaatgagtaactgtctaaaattgaataatacatttaataactgctacttttgatcttatctttaaacgattattgtctgagccatctttctgttcagtacttaagcttctcgcaaataacatggatgaattggtccttcttgctggttgctgaagaagtgaggttcaactgatagagtcctctcctcgtaagtaagcatttttaattgtatttcttgtacttcttgagatgaaatcattccacctcagaatcagcttggtcttcctcttctcattggatctcatttaccatgagttattggaactcatgtctcacattcagtttttcacgagcaggttattgtgtaggtcttaggccttgcttacttaccattcttatgatcaatatttttgtcttacccttaaggcctaagacaagacttaaattctggatcatatgggtattttttaagatgcattaaatgacacattatttccttttatatgcgagcctacttatcttcaggttcctgtacacgtgttgtgactatatctactgttcgaaacataggaataataatatgatatttgatacaatcaagttttttgttgaaaaccaccatagctaaatccatctctctctctacacctacacatgtagcgctctctctctctcgctctctctaccatcatagtgtctcatgagttgagtgcaggccatgatagaaaatagtcatcttgcgattgtattctacaagctcccagttatcctgagtgttgagactgatctggaagacatgtggtgtgagttcttgccatatcataatgctctggattggatgatcgtttatgtacacgaaaagaatcaaggaaattctgataggaatcaataggtatattttgctctatctcgtagcgtagatttaatgtatgtagtaaatttgttgagatcttagggcttatggttcatattatgataatctaaaattattttataacaaacctcttccgctttctactctaatttggatcataaaaatcaacaaaaaatggtgttgcagaacattgaaatttcacattggtgaaatggtgaggtcgatgattagttattcaactctaccaacgtccttctggggatatgctatagaaactgtgaatgacattctaaatgttgttccatctaagacacctcttgaatgttggaatggtaaacaaccaagtttacgacatttaatgtaataccataaggtttatgaaactggattagcaatcctaactagtttaattatgtattaatgagaaattatattattttataatttaatatgtgaaactatactgataaattgtattttaagatcccattggtgtatcaggggtattttttttgtaattttgacctgagaagggtaaacataaatttatgatatatcatgctcatgaactatattattatatagtatgtttattctatctatctgcaggtattttcttataagtcggcgtaatatagtcacaaccgagtattttgggccaaactgggttcgaggcacaaaatacatttttgggatttaattttggcattaatatgataattgaggaaatttaaaatattgttttatatatctgtgattggaatgaaaattttacccttgataaatgtatatgtcattgtttatgccttgagggcaatttggtcatttgaccacataaagcattattcaacaaaaaaacaaattttgagaaaattgaaaattattttttggatttttctagctctagccaacccccctctctctccttcatccttttcatttgtaaattcttgttgaattggcggagagcttggttttggagtagcttgtgcatgtttttgtttggagaagcttgaggtagctatatttatctctttatgtctaaatttaaatgctgaatgttgtgatgatcatatgtgtttttgatgctctttgttgttggattgcatgatgttgagatttaggtgtgattttggtgattttagtgtaatagggttattaagttcatgtatgatgcatcttgaatgttttgtgtgattttacggttgtttcacatgttgaatttttggattcctttcgaaggtttgaaggctttgagattcaagcttgaatcatgtgtaatgtgtagattatgttcatgctttgggtatgttgtgaaagtgatttagagctttgttttggcttagaattgttgtgtaaagtttgtgagatataaaatttaagtttatgaatggttttatttgagttttggatatgttttggttgaggttcgaagatatgaaaaagttagcatttttagactatcaaaataggttttttgggtttttcgaacccagtggccgcagcc

SEQ ID NO: 298845 - DNA, 4372 bp, Cannabis indica
ctcagtttcagcaaacacattgcagaatggacaagtggcttcagttaatacctttttaatgcagagatttatctttttggagaggcacttagaggccgcacgccaaatgagatccttagacttaggaggcaccttctcagcccacattttcttccaaaactcccctgttgccgttggtgttggcccaagcttctaatcttggattaacttgtaggcacttctaacagaataaaagccatccttctcatttagccaataccaggtgtcttcataagtagtatggctaattgggatgccaagaattacagttgcatcagtaggagaaaacaagtctctaaccacatcaacatcccaatttaaggaaccaacttggaagaggctactcacattgaagttctcgagtccaggagtaactgggactggtgtaggccggtttacaataggaagccaagggtcttcagtgattctcacagtcgtacccgaaccaatacatttccgcaagcccattttgacaacatcttaggccgcatatatactgctccaaataaaacttggattaaatcctaattcagcagtaagataggttccttgtgggtaataccttgctttaaaaattttactagcaagagtatcatggttaacgagaagcctccaaccttgcttaccaagcatagcaagattaaagtctcttaagtttctgaagcacattccaccttcacacttatgctttatcatccgatcccaactcatccatataataccactcccttcaccattagaagatgagattttccaccagaaattagccatcaagcgttcaatttccttacacgttcctaccggtaataggaagacgttcatatcatacgatggaagcgatttcacaacagtcttaagcagtacttccttcccagcccgagaaagttactttccctcccaagagtttattctctttattattctctcctttaggaagcctaacaccgcctttttattgcgaccaacaatgctatacaatcccaaatacataccatcagccccagcctcattaatgttcatgaaatcacatattcgggtcctggtaatcccgcgggtgttcgaactgaagaagacggatgacttctggatattgactctttggcccgacgcaccttcaaaactctgaagcaagagcattaactgagcagcttcatcttcggtagcttggcaaaacacataactgtcatccgcgaattgtagatgggaaacaattggcgcatttcgagccactttacaacaaatgattcgtctactaatctcgaattgacgaattagagaggataggcttccgcacatactataaagaggtaggagataaaagacatcctttcgtatccctcttgaaggagttattggacccactttttgaccgctattaagacatgatagtgaaccaaaattaacacaactcatagttaaagttgtccatcgttcactgaattgcatcacacgaagaacagttcctgagaatccccattccactcggtcgtaagccttgctcatgtcgagctttattgccatgtaccccttacgccccgtagtttttcgctttaggtagtgcatcacttcaaaagccaccataacattatcagatattaaacgacctgacacaaacgcactttgtgtttcagagatggcctcattaagaacacccttcattctattggctaggactttcgaagcaattttgtataagacattacacaaggaaatcgacctcaagtcacttatttgggaaggattcttctttttcgaaattaaaacaatatgagtgtcattgatggaattcggaaacttgccagattcaaagaaatcttgaacaaaacgaattacatcacttcccataatatcccagtgtttttgatagaacgccagattcatgccatcgggtctcggagatttgtctggatgcatttgaaaaagggctctcctaacttcatcttccacaatagggagcagcaggctttcattttgctcatcagtttccgtgggccgaatcccattcaaagtcgcacctaactcaataccagaagagtggaaaaggtcttggaaataccccttgataacatcttgcaaacccgactcccaagtcacccacctgcctccttgatcttgtaattgagatattctattattcctcttacgagaactagcaaccgagtgaaagtatttgctatttttatctcccgaattcaaccaaaattgcttcgaacgttgtttccaaaaagtttcacgctgagttaagacttcataaagcttagtcttaccttcctcatgttgctgaatagacacggggtctcttccccacttcgagtttccaatttgcgctttgcatttagctattcgtttcttgaaactaccagtaatgtctttaccccattttcctaacacttcctcgcaatgccgaatcttctcctgaattgtacaattgcccgatcctacccaacaactttccaccaacaccttgcacatcgattcccggagccaagcgttcttgaaacgaaaagaagaaaaggttgtaagagagacggtaccttgaaaaaccagcagcaatgggcaatggttagatgttgaaacttcgaggttgaaaagagaagcttgggaaaataaattcagccatccattgttcaccaaggctttgtcaagcctttcctctatccaattatcactatccctccctttctcccaagtgaaagggtaaccttggagaggcatatcgatcagctcacactcactaagcacctctcaaaacccatcaatcaaccaatcaggatacttacggcccccctcttttctgagtgatcccccaaattgttcatatctcctataaggcaccacgacaaagcattagtgtttttaagagatcgaaacatatcccatgtttgagtacgaatctctctcttaggctccccataaacccctgtaagccgccaaataggatacccgtgaagatgaataagagcatcaatattgtgaaacgagaacccctgtatttcgacttctttttcaaatttccagagtaaagctagacccccactatgtccacgtgagtcaaccacaaagcaaccttcaaaacccaattgggtcttaagtctttccataccatccttattacacatagtctcacaaagaaataaaaaattaggcttcttatgggacacaaggtccactaagaattgtttggcccgtaggttcccaagcccacgacaattccaactcaaaagactcattgctttgggcgggtctggaaactagaacccgccaaaggcccattttttgagagcccagtgttgtcaatttcaattacttccattatgtcatcaagagttctcccctgtaggcccataccttccacaaaagtattacctggccttttcctctttgagtcgactatagtagttatatcagaatcaaagaaatttctattattactgacattcagagctgcatcttccccatttatcccaatatcccatcactagaatttcggctatcaattattccatgaaaatggatattgttagtaccatgattctggccaatctgtcccacaatctcctccgtaactatcgggtttagattgctccccagagaaacactgctggcatgagatggttgtcttccttcctctcgcaccaccgcacccgaatggagccattgcgccccaaatgatgactgtcttctttgattagaagctcttaattctaacccatatggtttatcatgaagatgcagaggtttttcaaagagtctcggacaaaatctttctgcatggccaataattccgcaaataaagcagaatgttgggagcttttcatacttaaagtttacccagtaccaggaagattgatcagtgcttattttccttatgcatttgattggtttcctcacatcaatccagactcggacgcgaagatactcccttcaaacccccacaaagttatttgggtccgattccaagaactgcccaatataattgcctaacgcagtcaccacactaagagtttgattgccagattgcaagttgtggctggatccacatatcaatatgattgatatcaacaagccgtgggttatccctgtaacgccctaattctaaggcacactacagtgctttttcaattattgtgcaatctttactggccaaagaaatttcttgaaaaacgtgttaaattaaaacttttgctttaattattaaactttgtaatataatataatatttacaaattccgggatcccgatttcaaactttgtaaaatttactgtttaaactttacatttcaaaatacataattttcaggtcgcacagcaactttcaaaatatagctcccag

SEQ ID NO: 298846 - DNA, 2861 bp, Cannabis indica
ttacctaaaaaatactaaaaacaacctaacacataacaaaacatgacactctcttctggcatctcaccatccatgaaaattacacaactaaattaggtaagcacttggcccaaacaattgcaaactcctcttaaccaacgtcctctaacacaagcaccctcactaactggtggaaatctctctagggatttcatgtcccttcaaagataaaacactttacatacaaactttattttgatactctccccattgttgttaacctccaccaccataaaattactccttcccatatctgctctcgttgcggtactagtcttgaaaccatacagcatgctatgtttgaatgtaagggtgttaagaaggtctggtcaggtatgctctttaaaccacttttaaataatgcggatagtagaaatatctttgacacaataattcaggtcattggaaccatgttccaaggaatttagaaaacataatttgttaaaaggaaagctaaagtctaagcataaagttgaaatcctaaggtttaagccatagaaactagaacctcaaggaacttggaaacaagactaacttaacaaattaattcattcaaacgataaaaaaaaatacttgataagtttaaatattaaatatgtaaagcaaaaacagtcacaatatttacatataaaaggccctgcggcaagggcataattattatctccgctaagataaaaagggggacccttgtcccccaaagtaaaagttcaatagaaaaataaactatgaagcagtaaaagagatagatttaaggttgagctgtcaagtggttgagttaggctagatgttagctgaagcctcacttgctggagcattctctaaagctggaagggaagattcttctaggtttgcatcatccagaagaacaatctcagaatcttcttcaatagcctcatcgtcaactttctctgcagcatcaaattctaggagttgttgaagaagattttctctttcatccccttcccacatgttcagaacacctttgttgatcttccaaagataaaacaaagtaaccactagagacttcattaaattttcccgatgctccacctcagattaagccaatttctcttccaaaagagcattctcctattcaagcttctcaacaacatccttagccttaccaacatcttccttggctttgtcaacatcttccttagcctttttctaagaatcgttaagagatttctctgctttgtcaagcttggctaagaaattagtttcagaagccttcagtatttccaaagaatcttgtttagaaacctctgcttgttgttgaagctcttgatggtgtttcactttcttctccaagttaacaacaacaacaatcttgtcatttaacatctcagtctggtgattgtactcttgggaagcagtgtatagctttaactcgagctccttaaccgtcttctcagcttcaacgactttctcttctagaataggaatgcaagagttttcttgggtatgtaactccttatacaactctacacgatccttctccctcttggcatctgcattgtagccagagtagcgttaggagaagctttcactctttgcttgaccaaaacatccacatgagctttggcatcgttaaaggctttgattgcctccactcttctttggtctgagttggcactctcagccttcaagatctctatcttgtaagttaggttagtcacgagataagagcacctctcagccatcagacccacctaagaaaagattgcattaagtcaaatacaagtaaaaatttactgggagtcataattgaaataaaggttagtgaacctaccgcaacaatttggcttttgaggctatcttccatgaagactagatctccgctcaccattgtagcgcatttattagaacctaatatgcttcaagttgcaacattttggtccaataagtctagcacaaaaaggagcgagatccaaacctactctggatcggagccttttagcaaccacttgatgatcaaagattggaggaagtggttcattccatctggcaacattaggaaaatcagcactctgcctggtggaaagcacattagatgctttcttcatgacatcgtactccatgttgaatctttccatgaagaatttttcagttacctccatatgagcatgttcttcttccgatagggaggaaggatgaataggcagaatgacattggaaggaggaagaggtggaagactggtcttgtcccttggcaactgggcagagggagaagtgattttttttttttatgatggaggctgagaactgacaacctccttgctgaagcgagtggtccacctatttggcctctcatttttctaaatgtctactcctctttgtctggaagactccaaaccttacttcctagtagtaaccgattgctgaagcttgtctgtagccttagctcttatttatttactgtctccacctagtttagagctaagccttttcctttgaggtaacacgggtccctcaccatcatcctcctcttcatcgtccacgataattggtctctattggagaggatctatcgcccatgtaatttcctttactcattcccgcgaagaatccactgcagccaaagaaatttggggacaaatagctaggggtgttcattggatcacatccaatggatttggacccaacctaactgatccaatctaattatttattagatattgaattttgtcatccgatccaatccaatcgaattgagtcattcaatctgattcaatccaatggatgtattggattagatcggttccaaccatggatacattgactggtttttttattggattggattggatccatccaatcta

SEQ ID NO: 298847 - DNA, 2710 bp, Cannabis indica
taggttgttaatccaacatacttgttagtaaatctagatcctggtaaaataattcccaacacttaactcttcgagtcacgaagaacacgaagaatgttgtttgaattttagaaaaaataggattttgattctgttgagcttttggtcgacacataggatatgttcgtgaccctggccgattagtggtctttacacgtaaccgtggccgattcatgttttaaacttgggaccctagccagttcgtgacttttgactaaaaaaccttgtcggttcatgatacgtagttttgtgtcatgagtttgatttgttctggacaatagttggtctttataaagactctgtttggcattttgagcccatttcacccttatccactacttgattcccataggaactctgtacgacatgtcttaggtagaatctatcctaaccaattagtgaccgaaaacttaatatctgtttaatttattgaatttgaattctatacttttccaattaacggctttgtacatcagggttgtcgggttaatacccttaggttttggacagttgacctacgctttgtctaagtctttttatttcgtctggttgttcacctccctctgcctttttacactgatgaactcgcgtgacttttggggaggtgaaaattggatttacgaacacttgctcagtcttctctatgaagaccatcgtccgattcagatagctagttcttcttccaagggttcttttgatagttcctcgagcattttcgaagtcagcagtgattctctggaacttgagatttagcaccaccactatccgagcgaataggcagtgagttttacagttgggtcatctaggaactgaaccaggggtggaggcagttcctccccaggtcgtggacttttattttccaagaaggtgtgcctgagacgttgcccactggacatgcaactcatacacttagagatcttcctgcagctggggttgttgttaccatcgctagatactttgagccatatcctgccatgactaggacggagaaaatgtgtcgtagggcacctcctaaggatcctcatatttccgagctaatggcaagaggaagggtccgacatgttgaggaggctgaatagcctcaagctaaacagtctgaggccagccaagttgaagagcctttggctaggaaacttgtggccagctagggtgaggaacccttggccgatcaagatgatgggtctggtgtcaagcaggctgaacccgctgcataaccaagtatttctaggagacagtataagacttgtgtcatgatccagggcgatcccctgggcatttatgacaaggctggacgacctttaaatgttaggggtcaaccgtcagaggttagggttgaccatgttgaggatgaagctcttgagccttgggtccttgagttcgcagaggagagacattagacatctcctccctctaccctgtttgttggaaagtttgatcaaattaagacaaagggactcgttggaacagtccggtgtgataggcccaatagggctcagttggcccatcgtcccccgtccaactagatggcacggtcaggcccccatggtaagcaaggggcaatcttatccttgcatccatactttaaggacataaccaacttctttagcctgtgtccgactcagattagccaaaaggcattaagtacctttcagcactcttcattctctatgaagaattaggctagccacagccgtcaccttacaaggtacgttactactttgagctaaaatccactccaaagcagggtaggtctagataattctactttagccagctaggctattagtggcttagaggtactaatgacaaggccatgtctaaaattgggaagtacgccaagagctacttcctcgcttgggatgttaggtacatccgtcatcgctttcaaagggtcccgacataccttcgtccaatccttactatcatgctgagggacagagccaaccatattttgtctctccctacaaaaaggcgcaacatctataggttggcatatgaggagaattttagaaagtatcgcctgtaccctcatggataggataccgagggtgttggaaacccttatgaagatctagataataattctgtggtgaaggaggttagccaaaataaaagacccgcgcccgagtaggaaaagggtgagtctaatgaggatgtccctctagccaagattgccagaacagtatccatgagggaatgggtcctttggcaatgtttggcatggggaggcacaactgtcgatgcccccgtgttgatcaggctcaaaagacaggaatctgctaggcctgtcaagccaccacatgcgtctagagacaaaggaaaggctactgattctaaggaaaactctgatgattcatcttcagaggatgagaggctcccaaacaaccctccagacagtagtaactttttttactttcacttgcatttagtacttataacttgtattcgaactttgttatttttctttttgcagatatggcttccaggatgaaaaacctggtgaggggatcttcaagcggcttatcttctggtcggcctcaggccaaggtggctaggactgttttgtattctgatgtgatccattccgtcttgcctcttcctcctgcaagtccctgttggaatattattttaccaggatcttagatctactcacaagtatgttgtttaaaca

SEQ ID NO: 298848 - DNA, 6947 bp, Cannabis indica
agagatggggaagactgaatacaagaggttgaaaggaggccagaatctcaggcagcgtcttcttctggcaacggtgtcctccacacccattcttattgaggacattcgaactgacgagacatggcctggtctcctccctcacgaggtctccttcctccgcttgatagagaaactatgcgacgactgccatgttgaaatcaacgagacaggtttctttttctttttgctttccgttttggttgtgggattttatgtgggggttttttctttgtgcccgtatggtgtttgattaaatgtctttgtgaatgtttttctattgtaggtaccaaactgaagtacaaacctggtatagttatgggtggcaagagcattgtacatgattgtggagttagtcgttccattggttattttatggagcctatacttttgcttggcttgttttcaaagaagcctcttactattagacttaaaggtactcttttaagctcagttggaatgattttattagtgattttcttgtatagtaattctgtattatagatagttattcttgctggaaattcaaagttctatgcttttttttggttttggcttctacctgtttaaaatgtcccgttggttagcttctataagctctagtattagaaagtaaaaataagtcaaaacttctacttatctgatacttctaagtaaatgtagaagtttagccaaacaaggcctttagcgagatattttggtcataacgtggatgatagggattatattggtataatactattacgcttacaatcataacttgttattcttgaattgaattttacttgtcatttcatggatcgaatattgagttttgatattttgtttagcaatacgcttgaaaatttaagttaggataaacactattttgtttaccaattcttctaacagctgcagtttaaggagaggattggggttgggaagattggatttatactctgtaaaaggagaagaaaaaaagaccatttttaagtttattaacacaaaattttattcatcggtcacttcttttttttctttccatgaattgtaactaggggaatttatttattttatgaaaaggtaggatcattgtagaatatcgcaagtcatagcttgaagctatcaagatatcaacattgtgctagatcatagtgtagcaaccctcatggaagtttgactgttttttccctctctgccttttcatcatagtttaacataagctgcaacaacagcataggtagtcaaataatggtgtagaactctagattttctgttttaatgtgttggcacatgtaattgtaatatcttctgcagtatttttctccaatataaatcaattgcgtggcacttttttcaggaattacaaatgattcaaaggacccatctgttgatacattccaatctacagccttgcctattttgaaacgctttggagttccttcagaaggtttgaagctgaaaatagagagtcgtggtgctcctccacaaggtggtggtgaagttgttttgtcaattccaacggtcctgactctaaatgtaagtttcataaatctgtaagctgtcttgtatgtctaatctacttcatgttatatgcatcttatatgttttgatgtgcaggcagttacatggactgatgaaggcatggttaaaagaattagggggattactttttcatctagagtgtcttctcaatttgaacattctatgatatattcagctcgtggaatctttaatcgtttgcttccagatgtttatatagctactgatcataaatctggttcacaagctggaaagtaagttttaaggcattacttaccatattcatataatgatataatccttatgtattttgttatggagatctattttctaaacacacacacacatatatatatatatatttatgtatataaatttatcctattacctttgttatgtgtttgtgtaaacccacacatgcatggacaacatatttgtccccaaagaagcaataaagatatcgtaaattttaattcaagttcttatttactactttgctgagttttcttctgtggacattgtttatatacattagcaatagttatataaagataaaggtaagtatatctatgttatgtatgcagtcttaggtgtatgagtattgaaaaaagaaatggtgatatatctcatatagaattattgtttaagttggtatccactatttgcactatgttcttatatagacattttatctataacagctcaccaggttatggaatttcactggttgcggaaactacatctggttgctgcatatctgcggatacaactatttcatatggacgggtggacgagacagatgaatttgaagagaagaaagagctgacgcccgcagaagatgtaggtgcggagattgcttctgttctgctaggggagattgagcaaggtggagtggtagattcaacacatcaggtctgtcttgtattctacagtgttattattatgctcactgagtgttttagtttttctttgaatagatctgcagccttcgcagtagatgtatatgcttggttgtttttgttttaccctacttatttagttcacactttccaaacatttggttgttaacatgtaatcataaaacaagtgcaccagtttatggtgacaagtgtaactgtggttgttattcgtgactattgtccttgtgtaataagtcaccttatatacaatacaatgcaagaataggttaatactataacatcaattttgtgaattactcgtaattcatctctctctctctgttctttcaagaggatgggaagttttgatgtgacaggtggttatgtgtttatgttttcttatcttgcaggtgattattgtttcataaaattattcttggaatattaggggttttgagtttcgattattcttagtgcaagatttagaaagttaaaaacagagatgagtaggatttctgtattggctgtatgctcattcaacttgctgtgaatctcatagaatgtattgttttttgctgttgttttgtagggtctgttatttctcctttgtgcactatgtccacaagatatttcgaaagttcgggttgggaagctctctccatatgggatggaaacactcagaaatatcagagattttctgggagtcaaatttgtcataaagccagatccttctacagggactgttattctgaagtgtttgggttgcgggttgagaaatctatccagaaaggtctcctaatgagagagtaaatatccagacaacttgatatgctaaattgatgttatagttggattatgtagatgagtttttggcatgttttcttcaatctgtgaagatgtgatgatgcttcaagttttgtggacttaacttttgttccaaacaagttgtttgggatacaattttgtacaatgctaagcaattttgagattgttttttattacccaaatgtatgttagtgtcacatatagatccaccactaaaaggaaaattcgatatccaatcttaatggcataaccaatcttaatattgtatatgaatgtctaaacatttatcgtatagttcataaatgtctaaaactaagtaaagggaaatggtagtatgaacgaccaagcataatacacatgttgaccataaaattgaaattgttgagaacttgtaattagcaacatacatcttgttatctctgtattcctttctgaactatgagaaacatctccatcctctaaatcatcaataactaacttatcagataaattatcagtgtgtaattcatctttcttgtaagaaaataggggtagggattctaggcttgtttgggagctatagtggctctggcaatgttgcaatttcattaacctgaataaaaatagggtacaatgagaacataacaggtaaatgtgggtataaatgaaagaataagaaaaagaaggtaaaaattaaaatggctaagctaaagtgggtatactgtaggatataatttactcattctgtcttaaatatgcaaaagttaggcccagtatgaaatatatgtcataagtcccacattggttagattacaattgttacatgtatttatatatggttacttcagccacttagcttgtcccttcggggacatccgataaaattggaacgatacagagaagattagcatggcccctgcgcaaggatgacacgcacaaatcgagaaatggtccaaatttttttttcaaactctcttctgatttttcacccaaactctcctgcaaaatggttctgagattatgttggtcgaagttttggttgcctgtaaagtgtagaaaaatgaggagtttgtttagtgagtttcaaatttttgtgattgttatcaaaattggaatttcggtatttcaattggctcatttcattggaacagtcaaagagattaatgggttattttgggttttaagtagctaataatgtaaaggttttatctttaatttatttggtgtttcattgttcattgaaacaaagctcactgctccagagatggagcattggatattctgggatgaaaaggctcaagccattttctttcaccagtttaatgtttactggaccatttttaagtttattaacacaaaaaatttaattcatctctcacttcttttgtttttttcccccacgaaatgtagaaaatcacaagccataggttgaagctctcaatatatcaacttagcttgaaaccctcatggaaatttgactgttattttgtgttttttccctctctctgccttttcatcatagtttaacaggtcttgcaacaacagcacaggtagtctaaataatggtgtgtagaactctacattctctgtttcatatgcatcttgtatgttttgatgttcaggcaattacatgggctgatgaaggcatggttaaaagaattaaggggatagattgtcttctcaatttcaacattctatgatgttattcagctcgcagaatctttaattgtttacttgcagatgtttatatagctaagctactgatcttaaatctggttcacaagctggaaagtaagctttcaggcattacttaccatataatgatatagttcttattttgttatggaggtctattgtttaaacatacatagataaatttgtcctattacctttgttttgtgtttgtataaacccacacatgcatggacaacatatttgtccctaaagaagcaataaagatattgtaaattttaattcaacttcttattttactgctttgctgagttttcttctgtggacattagcaatagttatataaagataaaggtaagtatatctatgttatgaatgtatgcagtcttaggtgtatgagtattgaaagaagaaatggagatatatctcatatagaagtattgtttaagttggtattcactgtttgcactatgttcttatacagacattttatctataacagctcaccaggttatggaatttcactggttgtggaaactacatctggttgctgcatatctgcagatacagctattttttatggacgggtggacgagacagatgaatttgaaaagaagaaagagctgacatccgctgaagatgtaggtgcggagatcgcttcaggggagattgagcaaggtggagtggtagattcaacacatcaggtctgtcttgtattctacaatgttgttattaggctcactgagtgttttgattttcctttgaatagatctgcagcctttcagtagatggatatgtttggttgtttttgttttcgcctacttatttagttaacatgtaatcataaaacaagtgcagcagtttatcgctattgtcattgtggattaagtcactttcttatatacaatacaatgcaagaattactcatcattcatctctctcgctttgttctttcaatagaatgagaagttttaatgtgacttgtgttaagtgtttatgaagtgaagtggtgtgacatgcttcatagttcatatgctaaattgttgttataattggattatgtagatgagtttttggcatgttttcttcaatatgtgaaaatgtgatgatgcttcaagttttgtggacataactactattccaaacaagttatttgggatacaattttgtagcatactaagcaatagtgagattaattgttttttattacccaaatttatgttagtgtgtagttcttaaaagctttttatctcttctgttgaattttccttaggtaagaaagcaaacatcggaatgtagttgatcttggttaaatcaagctgttctcaaggttaatacaatgatttctttctttttttataaaaaaaaatgttaataatgattttttatttccttgtatattcagtcatttaatagaaatgacaaacggttattatttttttaatcaagaaggaactaacttcattaatcacaaacaaatgcaatctttacaatacaaaatctggaaaaacaacctgctttttacaccaaaatgctctctatgtatctcttctcatgggctttcaagcttctatttttagctatttgtaatctatagtatactattttctttatttcctgtgtaacttttgttgttgtactcgagtaattgttgaagaggcagttgtttttattgctcaaaatgctgtaaatcatgacagccattatcgaaatatgcaccctttgcatcttgtctttgctggtttgcagcagccattgctgccaggaattgaaaccagtcggccaactcctaactcccagccacaaacagacctgctccaccacctgttgtgaaaaatagcagtcaaaaaacaaatgagcattgctctcagctgctgtgtcacaaaccgggcacttaatattgtcaagagtgatttgaaattgcacaaacttgtcatgagctaaaagctgagtattgatagtttgccaaaaaatgaatctgtgcttcggcatgtt

SEQ ID NO: 298849 - DNA, 2849 bp, Cannabis indica
gtttaaaaatttgtaaatgaatcaagtgtttttgttttaaaataatgagatctcatgctttaattgttttcaataaattaatttattatttttattataaatggttttaaacggactagcgagtgtgacgtctcgggaaatcggggcgttacaatattttacagtgtgtgtttgcaattaccaatgcttatttcttatatatacatgcagaacattattatttgaaaatcctaaaagattacaatatatagtatactagaaaaaaatggtatatgcaaatgcaggttaattgatttgtataaagttttgaaacaaaagagaccactacatcacaaagtgtggtactgtggggcctaataatgtgggatccactttcatttcataatgccaaagctccataaattatgacgcagaatataatggaccaccatctttattacctaaaaagcttataatagaatgaaacacagcccattggttgcacactaagcacccttacttaatactgatactaataatatatatacattatatttatataaatattggagtctcacttaagaatcttccccagatttaaacaagtcaccaagatcaagcagtcgaactctataatattcaactagctaattttccctcatgccattcctatattcctgctcatgaaaagagaaaagaacccaataatcacaatactatacaatattttattgtatgtgaatctttataaaatcgatatttataacaaattgttatatatttattaatatatgtaggattgggttaatgtatattttactttgttctaatctcttcgctctctgtgcacttaattttgtgtatagtgtgtgtgtaagtatgtgggagtgttaggtgacagcaaatgaacaaaataatattaaggacaactaacaaaaagctgcaaaagaaaaaaaaagaagcttttttcaaaacaataaggtttggagagagggagactttttttgcatgaaaacaagttaaagaaatattctgcgaagattgattattagattggggaattagattcctacaccaccaaccttcatattaatttcctttcttttcatttggtggtttcattaatttatttttagtcataccacaaacaaaccagtcatcacatgatcacaaggtagatatgtaaatttatatatttatttatattaattgggaaggacatacaaggaacatgctgctgaatttatgatgtaaatttgttttatttttaacatatatatatataactaaaaattgattttatgtagaaataatatgataggttattaatatgtacatatatataattatatatttaatttgtattagaatgaagatatgtgtaataaagatttcttcataaattatgtagatttttttatttagctttggtttctgttatttaataaagagtactattatattaaaaaagagagaggtttaaaagattttttggctagtttgctttccagttttcttaaggcattcctagttcatgttcgtttttcatgaattagttgtacatgcacttagggtggatggtgaattagtttagattgaggattattcttcttttcttattgataagagtttaatttcaaaaaaaagtaaataattatattaattcaaacttcaaaaataatcaattattgatttttgacaattaatttattttactttccaaatataattttagttttactatatttaattaagattttttttagttaattatctcattattaagaagagattaattcaagtttaatttggaagagcatctttataaatcaagacttgataaaagtcggagctcgtcgatcggttggcccttgttcaaacattaatgttttaagcgatccatagcttcctgatgcctcttttctctttattacctcttctttggtcttgataactgctcaattttagatcttatgatggtagattcaagatattgggattccaaaatcattgcggacttgtttaatgagagagatcaagaactcatctacaacatttatcttagcctactgttgttgaagacagttggtactggtctatgaatagtcatgggcagtatcaagttaagaaagcttataaatttcttcataaagatgatgctcttctttcaaataatgatgaggtgtttttgtggaaaatttctcataaagctcatcaatttttatggcgtacgtgcttcttgcaactaaggttcagttagtgtctaaacatgttctaattgatatgacttgccctatgtgtaattaggcggctgaatcaattttccacttcttggttagctatcactttgcaagatcttgttggtcccattcaagcgtgaattgtggtaacataaatggacatgattttcgtgattggtttggaaagttgttgcagcagtagtactcttctgcatttggtttgagagaagaggcagcaatggtggcttgtgcggtgtggaatgcccgaaactcagtggtttggcgggagaagtcttcttctacggcagatgttattctttcagctcgtgtggtccttaatcaatggttatatgctcattcaaataaaggggtcgggttctctatttgttccttcgggatcaggtagagagttaaagcattggatgaaatcagaatcaaatacattaaggtgaattaatgtcaatggagcaatttttacttcaaaaggaagtatgggattgggttggtggcttgtgatagttcgggtttattgattgaagctggctcgttgtgcctagatggatgggcggagtcagcctttgtggaggctttggggattaaaaaagcactgagttggattgattcgaaagg

SEQ ID NO: 298850 - DNA, 5345 bp, Cannabis indica
gtgtttgatgagcctgagataatgcatcttcaagggatttcacggtcttgtaggcctctgttagtttgttggtctggacagcaacctcctcttttacttgctcaagttctgtctctgcaacaaatctaccaagtacagcactttctttctcactgacgaaggcatgtatgttattttccgcaagtgttaatgcttcttctagtgacttcttccgctcaaaaacatcagtgaacttgctagtgagcaaagaagcttcctcgtgtgctttttgtaactcttgttcaacattgtccttagccaattctatctctttttttcttcagcaagttgagtaatatcactctttgcaactgacaaggtatcttccaacgatttaatagtagcttctgcttctacaagcttgccattcaaggtaccgatttcctcctttactttcaccaattctttttctacaaatgttttgccatcctgacactccttaatatatcctgaaagccaattcaccttatctacaggctcatcaaacactaaatcaacaggaagaacaatgccatcaatagattcaattattctctgcaaaatgttattgttctccaatgttttaatagttgcctctgcttctatgagtttgttagctaggattttgacttcctcctctactctcaccaattctttttctgcaattgtcttgtcatccaggcatttactaatgtacccttcaagcaaattcaccttttgtgcgggttcatcgaaaactgaatcagcaggaagtgtaatgccatcaatagattcaattactttttgcaacatgttattgctgtccaatagaaacttttcaagctgatccttttgttcctttacagcaacaatatccatctctaactttgggatgccctctatatcagcagacattctattgatctgatctctttgttcagcaagttctgattgttgctgctggacttgaagcctcagcttttcaatttctgagttcttttcatcaatttgatgtttcaaattttcccgatcttgaaccagcccctttccttcttcactgccatggttaacttctccctcagtaaggatgacttttcatctgcccgatcaagatctttcttcatggactctttttgctctttcaatgctactagttcttcggacacccttgtcaactcaatagagagacttctaacctgcgatctcatcaacaaatcttcatctagtaaaagctgggacaacaccaattcttgattggtcatatataaataactctcaactttttcaaatagctcagcatcaacataagaacccaaagaggcattactcagttcttttatcctcccaatgcatctctctacaagcgtaacgatatcaagagaagaatgagagactccatcctccattgtaagtcctgaggtttcatgtagcattttcaccaagtgatccttctctaaggacattttacgttctttttcaacaatttctttgtatttgcatgtcaaatcatccagctccacctgaagataatcatttgtctgcaattcagctgaaagtgaagcagttaagcgatcaatttcattttgtgcagcatcctttgtcacggaaaactcatcttgcattgtatttaattcagaattgacctggtataataactctctaacccaattcacttgagaggacaattcagaagatgaaacagattctggtagatgaattaaagacaaagcatctttaactttgtggaattctaaggaaacacccttcaatttattattctcgtcaacaagccctttgcatctctcgacaatttccattgatagaagctcttcaggaatactattatgagacaataattcttccaatttctcaaggattgcatttttctcgaacagcgtttcttgcaatgaggtgaccacaatttcacttctaagtaactcctctatatgcaattcagcagcctccaatgcactggacttttcttgtaaattagttgagcatttctcaagctctcttgtcttttcagccaatgattgtttcagcgagtccctttgttgtaccaatgctttaccttttgtcacagccatagtaagtttttctttggtattactggatctagtcttttcctgctcaagttcggatttcgttttaccaagttctgcattcaccctctcagccatcattctctgatcgtcaagttgttgaagcaatttcctattttcatcttcaaaatggcttaatttttcagcaaagtccgactccttctttttagttcaagtaattcatcacgggctgcagtaaaaattgtcccgaagtcctgaaaactagcacttgatctggtctcagacaaacattgccttaattgatcaatttcagaaagcagcatattatatgtcacagccaatgtataagtgcctttctcaatagaaactaatttaccaccaatggaaccatctgatgcttcttgtggatcaactagcccagttaggtaggatagcaatctatctgtaaccatctcaatatgtgatacagggaattcgttaaccttcacgttaagctcttcaatctcttgattctttgccaataaaatagcctgaagctcacttactgtagccttagtctgcaatcgttcttcacaagcacttttaacaatttgtgtacactcagtcatcaactcagtcaccgagacactagtatccgtctcctggaccttattctcagactcttgactaacactttcatcaatcaaaggctctccactggtaaaggcttggagttggcgcctaagtccagcaagctctctaataaaagcctctctttcttcctacataacatcaatattcaacatcaatcaaattaaaattaaggcaattttaccttaaattaatacaaacacaatcccatctaaccttatattcaagtgaagcgttttctttctcacaaacagtctgatcaagcacaaccttgagccgttccaattcatccatgacataatcatctcgcacaccattttcctcgtgcaaataaggctcctccttcatattatccaccaattccacagctacaattgcttctttaccatcaccacttgtaaccaactcgtcaggacaatccacaaacatatcttcctttccaacatcttctcccactttcaggttatcctctccttgcatatttccttctacaccttccgaaatgccattatgattttccaccacaaatgtggacccaaactcctgtgattcatggaaatcattataaattagcatttaataaaatctgaaaccaactgtctagcattttctgcaattttattcaatccattaaggtacctgattatctggttcgccgacatcattttggattgcagattttgaagattcaacctccatagacccatttgaagcttcaagagagtggatagaatctgatgaacttaccggctgactttcttcaagcaactcggggttatgagtctcagacatttttgtggctcataacccaattgcttcttcttctataaaattgggacctgaaactgagcaaaaaaaacacaatttgagattggaaaaaaaaaaagtacactcaatcaaagggctcataaatctaatgccaaaccaaaactggtaaaaactgtaaagagtaaaatagagcaaattttgtttgttttaacgctatttaatcataattgtatttctatttggtaccttcaactaaaaattatttggtatttatttcataaataaaattatgcgtcacgggaatcatcagaaacaaatccattcagtctgtataaaagtgcagaaaacaatatgtgggtgtggtgtggatacttcttattgtatcagcaaagctacattccttacgacacaacaaaaaatgcaaaagggtccaaacccattatgttaatatttataaaacagtatgctagcagcactcattgaaattcaaatatttttgtaatatagaagttagaacacaaaatattcagtcaaagcaaagactgttacccccatattggaaaacgtgaataatcaaatataccaagaaccaaaaatcatattctaattcataaccaagaataagaattgggtgattaattaataaaatttgagccataaataaatgaattatagatggaaaattcttaccatattcattatcaaatgaaagacacaaacaattaaaaacaaatttaagtgccttgtctggtaacttagtcctaacatatatggactaaaacactcaaaccttccatccttacattcataaacaactactaaaagaggattcacaactaaaatgattattctgttcttttcccaaaccttgaaattttctttagtaactattaaaaagagacaaaatcacattgaaaaatgagccaaaggacgcagaattcataccaaaatcaactaaatgtatgtatttatatataaaaggcaacaaacaatcaatatacagctagtttcaataatgcaggaacagctagtttctcttaatactaatctaacctataaacaagagtgacccaactagccgtcgtcttccgtggtcgcagtagtaagaaaaagagagaaagaaatagggctctaaacccaaaaagaccacacaaaccccccacattgacattttatcgagtacaatgtgagcaaacattcccctaattctaattcatttctaagaaatcgtaaacaaaccagccatgaaattttatacaaggaaataaacatatgcttacataaaaccatgaaatcaccataacaaaagaaaaacgtcttatactcaaaatcatagaattactcaccaaatacaaccgcagctccacagcccaagcaaaaacaaaaacaagaagaagaagagtttaaaagagacaaactttaagcccagattccatttggaaatctgggattctccattttagaaagatttatttagcaataattgggagagaaagagatggtttcggatctggtgtatgaaaaaagaggtgggattgtgtgcgtgggttagccgtaggatctgacggtggggattgtagagcagaaaaggcaggaccacatgggtgcgtgggtgggttgcagaatgcagatcaaggctggtgtggtatgaattgggtcgatgttttttttgtaaaggctgttccttttttgtcgagctagagagagctattgtgtttgtgtgtcaacgttaaagactcctcgattaaggcatacgtatttgcacgcacaccacttagggacacgtactttggccacacacaccatgccatatcaaaatttggtattgttttctccattcaaacaaatgtaggttttttttttctctctttttctttttttttaaat

SEQ ID NO: 298851 - DNA, 2906 bp, Cannabis indica
aattttggatgcttgtgtttgattaaaaatttcgtattctaaattataaggtgggtttccaaatacactctaaatcattctgaaacttgtaaagtaggatggacagtttgtcaatctagctagtatagatactacatggaaggtagttggagtcggaaacttttttaaagtcccttcttttgggattgtaaaagaatgtttctgcataatataccgaaggggaaagatcgggatctgtataatcatacatcatctgaggaaggtcaagtgtgatgattctaagactgtgtaggtatgagattacacagttaaagatgacttaaatagattgattgatactacttatattaataaggtgcgtcttgtttttcggtagttcatcacgaaagaactctaaatgtacttgacttgggataattttaagatgggtgatttttgggaagttttttcaggaagtgtgtgagtgaggacaaaacacgctcaaaatgttagtttgtaaggttgtactcgtgtataaaatcattccatttatttctctagaattcgttttttcaaggttttaaatatatctctctcctatttgtctacaaagtaaaaagaaaagttaatagttttggtaatgtatactcatttaattgaagaattttcaattttatagttttttttgtttttttggcaaagtttatgaaagtatggctttttttaaaataaattattttgtggaaaaaattaaaaagaaaagtaacaaaaatgggaaaatcaataactaagttacctttagggtaattagaggagtagccattacctctatagagtaaccagttaccctatattatttttcttgtatttttttaatttttttctgctcaatttatatttttaagaatagtataaaaattcatactattactacgtgtactgtaaacaaaaatgacattttcgacttgaatttagtcactaaatatttcataataattcatattttttagaagtcagtgctagtttgacacatgaaaaaaaaaataaaactgacagtaataggcataatttaataattttatatatcgcttcacaaacacgagattctaaactcgaaaccccttctcccaatatcaaaaaataaaaaatatcacaacacttattaattagatagttatttatatcacaaacacaaacaaaatccatagctaatttaggattttttgtatttaatatcttcattcagtttcccaaacacccttttgcacccaagtagaattatcccaactaagataaaatccattaggtttaatcaaccaaaacactgattggtgaccaatatctctgtttggctcaaacacattaactgaagccattacatttccccacaaagcttccaaataatatgtactagtgctttcactaaccacaaaattgtagttacctccccatttcaatgttgtttcaagcttagaaaggctttgtttggagttacttatttggatcttaaactcatctgggtttgtgttatttttgggtaaattatttgtggtgatgatgtaaactgtattgggtttttgggcaccaaatgttaatgttgactttagagaaattgaaagtaaaaagaagaagagaatttttgttgaaaaagacatttttcttttttgaatggtgatgatgtgaaaatagagagggttagtgggtttatttataatttataaaatgaaagatgattatattaaggtgtaaatgttggagattttttttttttttggaagttttaggagaagtaaatgaaggatttaattccttaaaaaagggtttacttaacaaaaatgtaaggattcacattagatagattatcctagagattaaaaaaaaaaggattttttttacataatagaagaaaaaaatataactggatttttaaatatttttatggattatatataaatatagtaagatgtaaatgttaggagacttttttaagataaaaatatcaatggtaatgctaaaatctgattaatatccactgaaaataaattctaaatcttgtcacatataaattgaagatgctagatttgctactcctcgcaagatccaaatatttctcatgacaagaaatatattggaccccagaacaacagccaagtcgtcctcgacgcccgaagctctttcgtactaccctaaaatttctctaagacgagtagaactctcacggaatgccatcagacctataaatatgaccaactatcacttagatggtagattttggtttctagttaagcaaaaacgctatcaaattctttctacaaattaaaatttctaattttaatacaaccgatttgttgactagggtttcattaacaacttaaaccacataaacttgttctattttcaacttttatgatcttttttatattttcttttatttttttaaaattgacggaaaatccattcaacaaaatcattgttattaattaataatgataatgtaattgtgatgattaatttaattttatatgattttttatttatgattttttttgtctttcattatatagaaaatttgtagattgttctatatacacaaattaaatattgaaagtagaagaaaaaacccaacctacacataataaaagagaatgttaaaaagtattattggtgcctaacactcttcatagtgatcaaaccactattgatgtaattaagtatcagattctatatatataatttaagaaaataacttttaaaaaatatccctaaccaatcctgaggcatacatataaaagtgttggacaccagcaggcccgattctgggcataagcgggctaggcctgtgcctagggcccacccccaggggcccaaaatttattttttcctcttttaaaattatacattttttttaccgattttgaaaaatacca

SEQ ID NO: 298852 - DNA, 997 bp, Cannabis indica
ttgaactaactactaagtcttgatccactagaggcgaagccaccctaggattgagtcatacttgttttatttctgtttgtatttgctgatgtggatattttgtttgtaaaaggactggttataagtggattttattcaacatatacctatgatgaaattgtaaataaactcaaattcaacccaagctttgtcaatcacagtgtatattactcatttaaatgcttaccttaatggttccaaacattcccagccaaattaataaggataaaataaaatttgcatataattataatatccgcaattcaaaactagtctgttgaaagcttaaagaggatacaatatagtttttctctgcaaaataaaaaaataataataatagttttcattaactaaacaaatgccagcttcttgttatgtaaagaaataatggaacaaattccatggaccagaatctaatcttatacaattgatacacttatatataatttatgtcttgtgattaataaatgcaacaaccatgaaagaaagaggagtggtacaatgtcaaattaaattatatgagttgaattaaaattcccatttggtggtaaattaaattcccactcatctgaaaagaaaaggttcactaaaaaactatcttcctctctcttctattattataaactattgcaaggttcttttgctttacctcaatcgtaaaaagtaaaaagaaagataaagaaggagattgacttgtgcaaaaatgggtccctacctttaattggtgacaaacaagtggttggttggaaataaactgtctcctctatttcatacttttcttatcttaccttaatcatgaaactttgtttggggaagaacccataatacccccaaagtaaatatgtaaaccattcaatttcttactattttttattctcttaaaatgaaaataaaacttttttttgtatgcactaagagcatctccaaagagacaacaaatttggtgttacactatcac

SEQ ID NO: 298853 - DNA, 5530 bp, Cannabis indica
tttttttttttggtaaaggttataaataaaaataaagtttggcttgatgagaaggtagaaaaatggtgttgttcatcatgatttttggctgctttgtattaattgcagtttgcttattttgtgctgattttggtacaaaacaaagtatagccttgacaatttaaacttacattatttatggtaggaataacaatttaaaaggtttattattagaaaaataatatggcagaaacaatattacattattcctattttgtttattctactcctttcctagttatagatatagttattttatgtataatagagatatttgcggtataataattatctaatagtttagatttataggaggtatcctattaattttttttaagggcaaagctatccaatattacttaattatcttatatatgaaacaaaatatactttactaactagtatttacaaaaataacttaggttaaatacttttgtaactaaaatttatagaaactctagattgcataaaacaacatatataatatgtaatgaaaacttacaaaaaataccaaaattcaaacaaaatataaactcaaccacaacggttagaagcagatgaggcgaacaaattcagagctggatttttcttttgctagcaaataatcgttcatagaagaagataatgggagggaggggacttcataatactttaacatgcgacttgatgatatatcgccacgtgtatctgagatggcattcaacgatcttagctgacagttaacgacaaaaagggcatcattgcaatataatagtaaaggaagggattttgctcttatttttttattgggatcatatgtgtaacaactaaaaatattgaaaggaatttcaccgtaaatatcccttcctttaactaaatgaatttggggtgatcattttaaacatattgccacaaatattaaacgtattgcaactcaaaattagtgtcattaatttgcttgaatttgggaccaaaagaaaagtgtcatactcaattttgtcattttagttgtggtatactaacaattttgattaagtagcccatcttttgcttattgggttacagaattagaaatgttggatcagctcatgaatctgtctgttgggccttgtgtccaattcgtatctctaagcccacagtatactctccatcttgtttctgctttttcttgtttgttgtgttatataatttccttcctgtggtatgttatatgaaaatcatctaaatatatatacatattcaaatattcaaatcatctatatatttgaagatgatcaaatattcaatcccaatagaaagtcctttgaaaaaaatcccaataaaaagtgaaaactggtgatgataattaatctatatttcaatctactaacgattaaaacatgttggaatttacctttattattaaaactcggtctaaaaatttattatatataagatctataattttattaacccaatatatataaatgtcatacaaaaaataaacatacgagtaattaagtacataataatccacacattctcatcattttattctagatatataatagcaaaaattttactcaaatgcattgagacataaagtctaataaaaaggaaaaactgaaatagtaacaaacaattgataataaggcaaaatatatataatagtgaatttagaaaagtatatctcataaaatatatttatgcaatatatatttttttgtgtatttcaaaatataataaaatttgtcgagaacgtacgtcctacgttcatggcccatgcaacgtgcacatgtatatttatgtatatattagtgcactatggattggctttgggcaggcccattgatttccgttggtggcatccccaaatccaacaatgtccatcattatttccacctcctccccaaccccacccaccaccttgtcctcctccaccaccgccgccgccaccaccgccacttccgccacctccgccacctccaccaccaccacttcctcctccaccaccgccaccacctccccctccgctcccttttccacctccaaacccctttccatttcctccaccgccaccaccacctccaccgccgccaccgccgccgccgccacctcctcttcctttctcatgtcttcttccatgacctttatttccccccttaccacttcctccaccccttccccaccattaccattaccacttccaccgcctcctcctccaccaccaccgctgccaccaccaccgccaccgccactgccaccgccatttccaccacctttacctccgttgttgtggggtatattgtcattatttttgaccaatttaaagccatcttccttagaagatgtcacatttctatttcatgtggattttcaacaatttcatgatgatcttcggcaacaaaaattctaatcccatcaacaaaatttgaagggctcagaacaaccgaaagaagaagcaaaacatcccaaacaaaaacaaacaacttcattttttttattcttaatttgaaccaaaaattgattaatataataagacaatgcatataaactcaactatgaaaaccctttttatacacttggcaatatgctcacctaaacaaacttcattccataaggctgcaaaaagagaaggaaagacagtgaatgaggtgcaatgtgtacccatacctttgtagggccacctaatataaccataagcactataaccaattacatgtgcacaaataaaaataaggcatgtggacgcaaaaattttaacttttagttataacaaaataagtgattaaaaataaaaaaattgtgactaattataaattatcattcatatattgtgattaaaaagtctatgactacaagtaaatgtgtgtttagttacaatacttgttgtgactaaaattaaattagtgacaacttgtatttaaattctatattttaatcataaataattttttgttgtaactaaagtcatgtttgataaaaaagaaattattttattattaaaaaattgtcactaaaaaattatctgaaggtgatgttttttttatagtgtgtacaattaaatttttaaataaaattatttttagtatgtaaattgtttaatattattgtacatattataactataatatgagatttgtgatatataaaaaaattgagttataattaaaaacagaaaaaggcatgttgggcaaatatatgatatggtttaatggtccaatattaaacaagttgaaaagaattggcttgtttttaaattgttcttcttccacctatggcaacttggttttgattatatgattaagtaacgcacgctttcatgtgggctttgtctctcttactagctaattccctttttgagctttattattttatttatttatttatatataagaatcatatataataatgataacaaacaaaatgtggtagtagtagtgttagaatacataatgggctaagcattatcccttttgtttcttggacttttaaggaaatttagatctagtctttgctttagggccactctcccaagtctcaactatacaaaatgggccattttcctaatctttacaaaattattcttatatcataaatttttcatgttagtatatatgatatgttgattacaaaatgatctattacaatctttgtactagctaggaatttattataagaaattactaatatatttgatcaaacatgggctaattgagttggttgttatatgggtcccttgtaagtgtgtcacaacttgcgtatagattagatataaaaaatgaatatatatatatatataaagagagatatatataccaaattaaaaggaaaactgttactatagccctagattatgccatatgagtgatgagtggggaaggatatgtctttctctttaagaaagaaactaattaaagaagtgaaattttcaagggcaacccatgtgacagacacaaatggaggaaaaaagagcatagtttatattatatttatatatgtgtacacaaacatacataaatgatacatatatatactttacttttattaagatgggacgtgtgattgtggcctatgtggttgtcatgaatatgcatatgattccctaattgtgattggtgacttagtactaattttaggtgttttaggtttgtttgtattgttaattatacaatataaattgtgtttgtacgtgtaatccaggtataacgatgttttgtacatcaatgttagtagctaggttagtcatttctatatgatatatttttacttgctattatatttgtttataatttagagtattttgttaaaaaaaaattacaatttatacttacattaatttttttacatattgtcatgcctagtcctcttttatttttttttttttaaaaaagatcctgattcattaaagtagaaaaatacaaaagtcaggatatggccagtaaggcaaagaaccattccaaataacttcattgtctaatcctagtcccgttccaacacatacatgagcaattttgttttgctccctaagaataaacatgacagaaagactaggactgaacgacaacaaatcacaaatcgatatcacccaaaaccgaacaattacaacaattactaaagatcttatttacaacacttttacaatccgtctgaaggatgatgctaacaggaagctttattgcttggcccattgtaaggctaagaggatagctttagataaatgttaatcttcttaattatgataatgagataatttttcaagagttatactatatagtacagtcaaacatcaatccgaagtgaaatgccaccaaattttataatgtgttttgtctgtggggttaggaatttgcataggtactttattaagtgaccattgtgtgtgaatatatattatatattatatataattcactaatttaggtagatatttttataatgttaattatgttccatgcaacgaattttaacatacagagttaggtgtatagaataataataacaataaaaatactaggtggttaaatagatagagcagatcaagataaagtaaagtatatatatgttaataaagtactaaatcatgttgacaacttgaaaaatatattatttcattttgatcatctcatctcatgacaagaagatcttaaactattttcataataatattctgggagtaaactacttttaattaatcattttaatttttaattaatatcattattctgcttatacctataatatattgttctgcatgttaaacattcacatagattatgaactatctaaatatacattaaacatcattgttcataatcattaaaaccaaaatcaatactttatttagagcatcacaaatgtaaaacacatacctcccatattgctattctccattttgttgctaagacaccaaaaccttcaagagaatgaacaccaaattggtagatcgagaacctatgagagcaaacccttttcttttcaccacacaccctctcttaactcatactaaacacatattaccctttttttttta

SEQ ID NO: 298854 - DNA, 2125 bp, Cannabis indica
tattttacaattttattgttaaaatttatagaaaattaaaaactccttcaataatgattttttttaattttttatccttgttatttaataattcttctcttttaattatcaaaattatatgtttctttttagttttgaaaacttcttacattgttttctttaatttaattaaccttaagccttattttttctaatatatatcaacaatattaaaatttaattttatgaatttattattattatattttattaacattttaagtttaatttttatttctcaaaattttacacaatatatatatttttatttttttttctaatatattacataattataaattctttttcttcaaattattattattctttctacaattatcattctatattgaacattatttattttaaaattacctatgacatttgaaaaaaaactataactataacctaaaataaaactaactatacgtgactagagacgtaacttctgcctaatttataattaaatgtagctaaacaatttctaacaagaaaaaagaaaagaattgagagtcgtgaaagtcaaaactcagaacttctgtcactcaaaacagtgagatcaaagggagtcggaattcgctcaaaaaatgcggaaccgcaatccaatcttaatcgtattccttagtctgtgtgtcatactcatctttgttggcgcctcctctgatgaacccgagctggggtcggctcgtgttgtttttcaggtttttattcttgattcaattcaatgtatgcatgtaactcattggctattttctcaaaaattatattaatggggtttgtagacagaatacggtgatatagaatttggattctacccgagtgttgctcccataacggtggagcacattttcaagcttgttcgtctcggaggttataacacaaaccacttctttagggtaagtaaataagaaaggggttgtttctttcctttacttgaaattttggtttgtgatataattgaatttggtaacaggtggataagggtttcgttgcccaagtggccgatgtggctaatgggcgatccgctcctatgaatgaagagcaaagaatagttgcagagaagaccatcattggtgaatttagccaagttaagcatgtcagaggtattctttcaatgggcaggtacttataattaatttttaatctttccattattttcaatttgtaatttattttaagccaaaagaaaaagttttctacttatagtttaccccaatatttcgtagatttctagagccaaagactagctctagaactcaggattgtattaattcagcaaataaaaattacaagcagtgaaattgtgaaaagtcttccaggaaaccgatagccttagctggtgcaactgatgccctttcttgtgaatatcaagtggtattcctaactaactgccatttagagctactggtgcccgatagtggtcgatggtgattttgtggtatcatagacttgacgattcattgatatacttttgtagaagaattatgctgtcatatgtatgtgttaaaggagtagccgtagcttatgggggatgaagagtgtggtgcaaaggtcggatatcactacaatcttgaatgatatcgagaataaaaccatagactaaaaataaattacaagaagatattccactttctaagtaagacacagaaaaggatactttaaaatccttttacatgatgaagccatgggctacccacactctaatcttgtcccaaagacacctccttagattgttctccaaaaatccttctattcctttccagccaaataccccatagtaaggccgatatgacatgacgccatagagtttgtctttcccaacaactggtaatactgcacagcaatatttcctccatctgaactagaatcctccattacatgttaaattctttcagcagtttgtagcacaattgtaatgcaaactcaaaatgtgggaagaggtgtctactagtcttgtttttctttttgcagaggacgtttaactttagtttgtagttaaagtcatttccatatatatatatatatttatatactaggcagaaagcacgtgcaatgcacgtgatctttgttagttatttaggttttt

SEQ ID NO: 298855 - DNA, 4684 bp, Cannabis indica
acttaatttcccaagacactgtttaagaacatagtaagctgactaatgaattttgtatttgcagttctcagagcaaaattccagtttggccttttactgtactttcatttttcggtggtgcatatgctcttcttccctattttgtactttggaaaccaccacctcctcctgttgaagaaacagaactcagcagatggcccctatttctagaatcaaaaataacagctgcggtgaggatttatttgataaacaatgcatacattgaaaagatcagcagaaacacagaaaagattataatatacatttttgatcagttttcttcaattagtggaagtcaaaaactaccaattgattttaagaggttttccattgactcattgaatatttctagactcatttctttcgtttgaaaagtgaaataactatagccattatacaaaaagacgtttattctgatgcagacatgtgcctagtgataattgatgttattgcaattctattgatttatcatgacctaggaaactcaagttttatctctattggatatcaggtaacactggctacaggactaggtttacttgttagtgcaggattagctaatggtgatgactggagtgaatttttccagtatttcagggaaagcagatttgtaagtgcttcaacacttcaaaccaatataaatgcaattcatgtttcggtagtttctcatatgaattagacctctgcttagatcttttactttaattccttaaaaatcattatgctcaattttgatcatagtttttaacaaggtttaattgagagataaacccactttattgcagatccatgttacttgcattgatttcaccctactatcaacttttgctccattttgggtctacaatgatatgactgctcggaaatggtgaggattctggtgtccagagtttatgccttttaattatgggttaacattttgatttcccttctagtagactataatgtcccttatttttattttcaggtttgacaaagggtcttggcttttgtttttgtcgctggttccattcgtcggtcctgctttatacaacgtcctacgaccaccactatcagctttgccagcaacggttagcagtacaacttccaagtcagaggagacttgaaattatttcctacttggttcttcagaaaatacactccattaactgttggtggaggaaagagattaacactacaatatagggagagttctaaatgttcagtcagtaatacacattattatatgatgaagtcttaaaactagttttggatactgctgaatgtacttatagaagaacaacaaacaagtatataacattgtaagatgaagtagttttcaatgtagttacacccagtattctttttccattttattttttttgtgacattccatttagagcagtgtagttgttgttgcgaagttctggacatttcttgactgattttactagaaatctccactcttttcctaaaaatacttggacatcttctaaaatcaaatttgtgtaatttaaggacttcaacctctcagggttgtgtttcctggacgattgaatttaaagtttccctgtgctcgttatatcttagaagcattctaaatatataagactgaattgcatacaaagagatagtaaaaacgagtatcatcaaatagcttgatagctaaggctccttgggaatagtctactagtaaaactataaggttgattttgaaataaaggtagttgacaataggcaatagcctatatcaagtgtgttcattcaattcaatccgcatcattttattcatagtgcatctgatccgcattagataaagattttatattttgaattcaattcaatctggataataatatagatccaatctaatataatccgcaataatacgaattggaataattattatttaatatttatttaaaaattatatatttattttacataactaacaatgaaataaactaaattattgttggtttatatttccaaaaataaataaaaagatataaaacaaaaaataataaattctaacaaagaaaaagaatgtttgtaaaaaaaaatgtttaactttattttaaattgtattattttgttatatgtatgggatatgcatttagtaaaatcacggtaaatataatatttttctaaaacactcccacaatgtgggacaagcacacacaaaaacacttcggttgttttttatttttaataaaattacaccaaacataacatttattcaattaccaaaaatactgtgtatcatgggactaaaacttagcagcattacagagaccattggtattcctttaaaaatttgaaaatttagccatatagatcatcagaaccaaggacttttattaaaagtacaaacaagaaaatagatgatcatcagaccaataatttaacatgagctcataaaaaataagcagacaaaaataaagctcaattctattgcaacaaatttgtttgaaaatatccagttgcatgttgtcagaaattgagcgattagaacttgtatgtcattaataatacaaagaaaatataccacaaaatccatccaatttaacattggaggaacagatccactggtttatgcatataaattctttagctcatctttgaacttggctttcagctgttccctctttatctttagagcagcagtaaccaatccagactccggtgtccatggatctggcaacaatttaatctttgcaggaagttcaaacttgtctagttttgcagcttttgcaacctgcatgtaagaaacaacttaaaaagacactacaataaaaaaaatattctcaataaaactaaaattatggttagctccactttgtttaaagatagcgggcattatttaaagcgagtaatagcaacactctcgtatggtctttggtctcactatttttcatctggactccaacaaacacaattaaattattttacacataatattgttagtcattgtagttcgcatgtcaagaagtgaaacatgggaattgggagcctaagagagtgaacaagagagtactgctagcaccttccacagtctctacatatgaagcaaataaagtgaacatatttactgaggaaaataatagctgcaactataatgcatgatctagaggctgctacattccaacaaaagcatgtctcagtgcacaaaaatgataaatacaattcaacgcgtatgtctttttcatctaatcttgggtgtaagagatggaaaacaaaccttggcaagggattgctgaacctcgctaacagcttcagctttttcacacagctcagagaaatcctcatacttgatgcctgcattttgggcccagtcctcgagggattttcgtgcaggtacaacaagagctacacagttgctatggaaaggatccgcatgtaacatgatactttccacataattacttgacaatagcgcagactcgacctgcaatcaagttggcacaacaaaatgagcatcctaggatacttaaaattgttgctcagctcatttacataaaattatccagaaataacagggtaagtggtaaacaaacacacctttccgagagagatgtactctccatgctgaagcttaacaatgtccttctttctatcaattatttctaagcatccatcaggatggaaccttccaatatcaccactataaaaccagcggatgcccctctcatcaatctgtatcatacaacaaagtcctaagaaccagtaccttatcatctgtgaggaagcgtagcaagtagcaacatatgtccatttttaagtttaaaacactaggggaagagaataatcacctcgtacacctcatttgtcttttcctcattcttaaagtaaccagcagttacactatgtcccccaataataatctcacctctgggcattggtttgtcagatgtcttatagccaccttcttcccaagaaacaagctgcatttcagaatagaagacgttaaaagtctcaattagatttcttcagtaacatttaactgttattggtcctgactaattcacagatatgtttctgaaagagaacctaagcaaagtttctatttagcatttacagggacttgaatcctattttttttttccttttgagattagggaagagagaatttgaacatggatccatctctttgtaagaagacgtgtaataccactaagctatgcctacgatcacacaaggacttaattctggaccattcaaagacacacctgccaaaatacttgaacttgtgtgttaataaacacaacatacacaagtagaaattttccagcataaaatccacaggccattctaatctgaaacttatggttacaatcagaattcaacctaattattttggaaaattgaaaagctgtaccttaatgtagcaacaaggaaggggtggcccaacacggccaactgttgtgtcatctgcctcagaaaaagcagctccagcaaaagtttctgtcaagccatatccttgaccaataggagccctgtgtaagcatagcccaccaaaaaaagtgtgcaataagcaatagatacattaaatgaaaaataacacgacctattgcaagaacttcatagtgcatagctagtctaggatggatgtaaacggagcggggcccccgtccggtgtcggtccctaatgggaacactttttttt

SEQ ID NO: 298856 - DNA, 1790 bp, Cannabis indica
taaatataatcctacttttcagaaaaattgaatgaataaagatcccatagtgtggacaaaaactaaaagagaaataaatattttgtgggtttttgtaaggtgctcaatactataagttattgtctaattactgtttccaatttaaatattggattttacattttaatattactgtttccaattaactactcatacaatgttggacgatttaaggtgccttatagcaaaacaaatagaagttagaaaattagttcaaaactttccttcctcctttggtactttctttcccttattctttcatcttttggtgggattttcgatggcacccctcaaattatttatggcaaatactttattagctcacaaagcattattgttgaatctttgatgcttcaaactatctccatgacctttaggatttgggctataaagtctccaaaatttgggcaatgattttttttttcttccttatttctaattagtggtgtttttttggttaatcattttgatgggttgtacgtttttatttgtttattattctttgttaggataataatatggttttattcaaaaagaacaagcactaataagtcctgttggtttgaattccctcataagcaaacccaacacagttacaataagtctcaaatcataatgaaaagagctcaaatctttatttttaaatagtaatggaaataagtgcttacgaaaaaaaaaacaagggtggccaagcctgtagtatcacatcattatttttttttttaacaaaagagtccctagaactagaggaggaatcataagaactgatttgagcttgtccaaaaacgtgcatctcatcttcaaagaagtacaacttctcacattcattcacactcccaatcgtcttccccgagagatcctgaaattcacaacaaacaggagattgcaagacagattgggtacatggagaactgatttaagagtaagggactgagataattttatacaacctgtcccaactatagaggacaaggttccatctactatccttcctttatagttacctgaacatggagtgtatgaatcaaaaatattagaggtaccagtcatatggtttgaggcgcctgagtcgactatccaagaattaggattgaattttttgacactcaaaatagtaagggaaatacctgattgaaccacaacgcaagttgatggaataggttgttaagcagctatttcagatttttttagatgagttcaacagtcgttgaagttgctcaaactgttatggagtaaaagtcatgttggtttgctcagttccaacagcaaagccacatttttcatgggacgagatggcttctaattgtttggtttaccaagcaatttccaacaagtttcacgggtatgaccttttttcttgcaatggtcacaccatggtcatccccatgccgagcacctttaggattagcttgttttttttcacgttgtgcagtaagagcggatacctcagcttctggttctttgacagccctagcatcactcgttgtcaactctcttctctacgaacttcagcaaatgattctcgtaatgaaggtaaaggatccttacaaagaatttgatctcgaacctcatccaaacctttgtgtaagagtatctccaatgatacactaaatttagtgttacactatcactaaattaataataattaaattaaataattgttagatttatatatacatattcataatttaattctattttcatatatttaaaattttcattctataatttatactaatatttttcaatca

SEQ ID NO: 298857 - DNA, 2875 bp, Cannabis indica
aaaaatgcaaaaaaaaattattttgaaatacaaaattgaaaaagctccataaatttattacctaagtattttcatgtaactttattataaacttagaagtacacttttaaatttaaaaaatgctctttatataatatagatgtattatttattgttacaaccatagccgtcattcaacctttataggtgatctactaacgagaagataataatttaccatttaaccctaaacgtccttaaaatcttagttccttataaatgacacttccataaatggaagctatatattttcatatttataataaatactttcacttaattatactatcaagtcagaataaatttatatttttttattaataataaatggttataataaattgggattttaattagggcacaaaattctaacactttgtctatttccagttatactatgtcttagtcttgtattgaagggtctcaaaaatcccaaactatgttcaagttgtattatttatttcaacactcttcatggtaagccaagatgggtttgtttcctaattaaatgattgatttgttaatcgtactctcgtgtttttataaggttgatttattaagtgtttttcgcttacctagttacttcatgtggtcggtaaactgaagaagaacaagatagacaagtgagcattggagtatctatttgtcagggtatatatgcgacctggctgtaggattgtcagttgtttttagtttgatgttttcaagatactttcaaacttatgtctcactctaaatattaattattattacctctttcgtaatcttttaagtatgcttatactttaaaaaagctttaatttatatggaatttttaatacattttgttgatgctgaaaaatggtcaacaccagctcgctagattgacgagatgaataatgagtcaagtaaatatttatgagagatatataaaatttatagtaaatcacttcctatgtcgcgatgataatgaagctacgtccactttaaatttttatttctcacaaaaattacaagagaattgataaacaaaaaagctcaaatttttagagaagaaaagtaaagagatgtgctctcaccttatgggcacttaatagatagcaaaaaataagctaatggagttctctttttataagaaatgaggtccattaaaataacaataaaatattataaaaaatataaagaaatcactatggctaaaattaactattcatgaaaatagttaattttggatcttgaatcacggtcgttaaatcgtttttgggtaatttcagaaaaaaatcacacttgtcttggagacaaaatttgaacttgaaattttgagaattgcgatatgagtgagatacatgacttgaaagagctttgaaagtactttaaaataaaagtagaatcgcggcaatcagattaatattgaggaaattatagtcgttttactgaagatcgttcaacacacattgtctagattgacatactgacgtttacctagacgttgtgtgagtgaaaaaaacatctcagacttgtattttttgatgcttaagtaatatattgacatcacttagtcaatttcttaggagagacattgtcgttgatgcaatctgcttcaatatcgtattgtggaggagcagagtttggagacgataccctttcacaaccgtgagaatttggtgtttccatgaaagaaagttatttttcgtcaagcttggaagacaacgagtgcttgaacgaaactggttccttcgatgcccattggccaaaagtacttctcaagttgccatccatggagtttgaaacaaatagagaacgaagaacaaagaagagacaagtggaggaagacgaaaccctctgtatcaaagaacttgctctgataccatgttaagattcttaagagaagaaaatgaaagaaaatgatctctgttattgaattcttaatgagcaatccagttatatacaagagctcaattaagctaacataaccaactaacaaaatctaaacaacctaactaactcaaccgtgagagcaaagtaactaattctaactaacacaaagcctattctttaacatcacctttgcagatgcttttactcctctaaaaatggtgcctaattacagtctaatgataaaatcttacttcccaccaatcggggtcccacaagccacgtggttgtgctttaataggccttgtacattagtaaaaattagtggcaacaagtagtagtagtagagcattgttgataggcatcaataattattcttgcaccacctagaggtagcgatttgtaaatagttagcgatattctataatagttattaaattaaagaaaaataataaaagacacaattaattggtgcctagtacactcttatgtgtcaatatcactattagtccaactaagtatcgagtcccatatagtttaatataataacttttaagaagtatcgctagtcaatcacaatgtgacatgtctagaggtgcctaataacaatgctctaaattaaattatgtgagacatttacatttaactacacttttaggtagtgtttccttttatcatttatttctctttttctccgttcatgatattataagcaattttccaactcacatcatatatatatatgtaatgtggcatgcttgaaagaaagtctatatatggttgcagcataattttggcatgccttgatatgctccccgttattgtttaaactcatagaatttcgactaaaccaattgaaagttactttcacgtttacataatgagcctaagcctaagattacggatactatcattgctggatttaaaagccattttactttattttttttttttaaggctaattaagatttttgtccctgaa

SEQ ID NO: 298858 - DNA, 1932 bp, Cannabis indica
gtaaaatatatttatttaataaaatatttggtatgaaatattagaatttttgtactaaaagtaaacattttttcactaaattagtgtaacttttatactaaattaatgtaaccattggagataactattagagatggtatgactcacgattcagtcaaaccaaaaccaccaaccgtcttggaaaactggtcaaatttatgttgacaatgaattatgggaagagaaagcaggtacttttaaatattgttgggatattggtttaattacttaaatagggtcggtagagatttatgagagtatccaatgaaatttcgtacatgtaatatttatttatatatagattttaatatagatatgtagcttaaattggcaaagtttaatagatcattataaccatcataatgacaaagtattaaccctatacctagcttttaacctcttaggtaaagaatattcacattctctcaaaaatcaaaagccataattttgcacctttcgaaaaagaaaaaagaaataaaaaaaaaagtcataattttgcaatattattattaatattattcgattgacctttaggagaaaaaatgtatcccagatctacaactttttgaacgtaacagagagatcttctatggcttggtcctaatcatttctaccgtataagacacggatatatatatatacaatatacatatacaatgtaacaaaactagcctgtgtaacatcattttatagctgtcaatatatataaacttatttatacataaagaagaaaatcaacataaatatactagtgatctagaagtcaatactagatttagatatatacttgcgtagatagtcttgttaagcagtagttctcattccggtcatttcgtcaatatgcaccccataaattgacactacttgatgataagttaatcgagctagaatttgtgaaccacaatgtaactctatatagtaggattataataagttataatagataattaagagggtttaatcagtactattaattaaaataatattaatcgctttttatcgaggtactccgatcaaattgaaaagagatcattgtacagtaactaacaaactatatgatgatattattaggtctcaatcaaagcagcaagcatatgatcattattgttcttctagtaaatataaatcatttattaataaaccatgctattaactattagttgtgtctagcactattcatattaattaattagtcatattttataaaaataattatatcaaattatattggataagatatttaattacatatgacgcattggaaagtactattaactgatttattttagcatttctcttaattgaaaatagtaatgatagtttcaggatagatattactgtcttctcttaatgagctcacaaacctgttcattgttgacctctctttttctcccttgtttctcggggtctaacactggaaaagaaattatatacacacatgtatacataagcgaaaaagctaggaaaaacaaaaatacatgaatcaataatgggaattcatatacatatgagagaaaattcataaggaatatgtttaaatattatagtttaatatcatttggaaatttctatttctaccacaagaaattagttatatttaacaattaaaaaaaaaaaaaagacaaagtattatatatagccaatcatgcataattcttcccttttttttaaaaaaaaaaaaaaaattaatcttatatactattttttttaattattttttaaatttaaggtttgagtttataaagtgatttttccggtgatttctatgtagtttgttatataacttttggttacaatttaggttgttaaaaacagaaatttatatagaattgcgtaaaaatacaaaaaaaaaagaaaaaaaaactatttagaagttttaaaaattaaaaaaaa

SEQ ID NO: 298859 - DNA, 3406 bp, Cannabis indica
ttcacctactaatatatatatatgcacatatacgactttaagattgaaccgaaagagatggacaataatagtgggaaacaataatatactaatgctttttgtagctttgtgcattaaatttcaatgctaaattttgtgattactctcttaaacagtattcttttctacgtccatagtttgaattgaattctaatttgtctaacttgtatttcgaattggtattgatttttatttatgttaaatatatgaactaaaaatgcctaaaaaatttatcatggaaaagtattaagtcacatacaaaaatataatttttgtaattaaatatgtttattttagaggcatactattgctagctttcaaacaaatacattatttttgttgattatagttacaagtttcgtcagaaaactagttgttactctagaaaaatttggtgttcatccgaaaaactttatttgtaaagttgtggccagtccaaatggttcttttggatagcttgtcttcagtaagtagaatcttctagatagcttgttataaatccagagatgtccttctaaatagcttgtgtcaaccttgaacacctatccagaacatgtaattgtcttttagattgtccgaacaaaaagcttatttctgaagctgacgtagaatatgtgggcgctaacttgaagaatttaagacagcacaattagccacaatagaattggagctaattttagcaatgtgaaatctatatatagctatcatctttgtaatccataaataatcagaccattgaaagcttgagcaaaaattgtgattgtgtatagttaaagagagaaaatctaaactagggagaaaaagttcatcttgtaatctctgtaatagtttgaaagaattcttgtaaccttgaaaacactaaaatcgataaagatatgaatgttgttgtttctactgagacgtagcgtgttgcacaaaatcaaaaagctgtaagttttaattattaataatagtatttattataataacaaataataatatctataaactaatataaattattactttttttcacagtttggagaaaagcacgcatacaattcaaaaattgaattattaccattacagtaacagtggatagaacgatttatagcggtgattcacaaaggcttggtatgaaataatgaaattaagcatattgattaatcataaaactaatttaaataatatttaatttagctttttaagaaataaatatttaatttaaatttaaattaaataatataatatataaattaataaatataatttaaataaattaaatttcctgatttataatagttttttaattgaaataaaaaataatttagcgtcagttattaggcctataatgtcggttataaggccatatagcgtcggttattagtatataatcgacgctatagggtacatatggcgtcgattctgttgtaataactaacgttattgggtaacttttagcgtcggttgttttcaaccctacaacgttgcctggatccgcgccgatagcgaattttgtcaaaaccgacgctgaaaggctttaaaaactacctctaaagcctagatttgtagtagtgaaaatatcaatgcaggggtttatttgtacaattttagaaaattaagatctattttgtcatttaacaaaacagaagatctaattggtaacttttgtaaaatatatagtccaaaataatatttacccttatatataagttatcaatgaagagttcgatgccaacatgacaagataatatttttttaacttgcagtcataatttttccacttaatccttcaaaatattttataaaaatcttatagttttctatcatttttcatttagataataatattttatatacatgaaattttatatattttgttatatatataatatatttacaagtttgtgatgtgtgaatgaaaagtgaaaaaacaataaaataatattttatatggagaggaaagaaaaataaatttaaaaatgtttaggatatcttaactacatttagctaagaattttgcttttgaaataatgcatgtctatttaagctcattcatgtatgagtcaaattgcaagttttggttaaatatttagctaataagatattttacctttatagctccatcctcattgttttgtaatagctgggagcactcttattatcagcttctcttctatgttttaaaatatattaatgaaattttaattttttttacttcacatatttacattagtacactatatatcaaatcttttttatttttttctttatatcattttaaattataactttttttaattttatttagaaagagaaaaatataaaaaatctcattcctcagcaaatcttattttttccacaaagaatcgtgatatttttctatggatgcggttttttttttctaaattcttatttgtggtgtataatttcgtgaaatatgaatagttatgatcaatttaatctaaaagaaggaatagtgttattttttcttgggtgagcctcgaggaaaaatatttttctagaaaataaatttgtaaggtaaaaaaaatgataaagtaatttaaaagatagtaagaagtacgtagctagggagtatgctcgtcttaattattttctatttgtaaatatgttataatttagttttttttcaaacctctaagttcatgtatgcatgcactttatatatatatatatatttaattaaatagttttggaatttattgacattttcatattgtatattttgtattcgattgagtttatgctctctattaatgatagtcttttttcccactaaattttaatgaggttttttgttaacttgtaataaattattgaaaaaataaagtaaaatatataatgaatatatataggtaaataattattaattaagtaaattaaggtcatataaatatacatatacacttaattagttacgtacatgcaactaaaagcactgggtgcatatatagtatatacaccctttttcgtgagtgattttaatttattttgttttatttcttaattatgtattaatattacacatgtagagatctctagagagacaatatgattattattattattattattattaagtagtcaatgatgatttacgaaagattctagcttctcctttcggtaaattaacttattaacaaatatatatatgttactgtaacttcaaaaattaaaaaaaaaatacttatatgtgcgcatgtcctataaatatatatatatatatatatatatttatacacatcattattttcatctttctacaacgttaactctttcttcaagtattgaatagtaataaaatgtttcgatcattagaaacttttatataacatatatatttcgagtcatcttaatcatatatata

SEQ ID NO: 298860 - DNA, 2223 bp, Cannabis indica
ttgtcaacttttccacttctgtctataccacctctgatcttgctaggtctaatggtctccgcttttgttgaattggttctacattgggattaacattcaatggtggaaacaatctgttctttaaccgctgggggcaagttctttcccacttggatgaccttggtcggatcttgattatcaatacagacttcctctatctcctacattagctctatgacacgttccacaccgatttgtgggtccagctcatcgtctaggactacccccagtgtgtcctgagaagatgttccagcatcagggttatttctttccctaagcataattatgatcctggttgaaatgttatagcaactctccgcgcttcttcggtctcccatgatagtccctattcttccggtattgttggggaattttaagcatagatgccagattgatgttactactctgaaatttatcagtaatggtcttcccatgatggcgttataagctataggacaatcaacaaccacaatggtgctatatttgaaagaggagactgcattacttctagagtcttctccgattatagtcaatggcagttgtatctttcccatggggatcaacgtgtctccattgaaaccctgcaactgaatcagatagggtaacaagttggcctataccaaaccaatggcatgggaggctcctttaaagatgatgttcacagagctatcattatccactaagatttgggagcctcttttgttgggtatctgagcttcaataacaaatgagtcattatgtgcgaaatgcacatgtcgtgcatcatcttcagtgaaggtcataggcaagttcataaatcttgtgcgatgagcaagtgattgcactaaatgacaagcctcgccttgatttaatttgttcaggttgaacttttgtgcattttgggtgctctcagcaatatgttgtccacctgaaatagttgttacttgaccgtttagggttggtaatgcagctccagaaggatatagaattttgggactggggaccactgcgactgttgttcttggagcagattacgttcccagaaggacttgcatattgggagcttgtattccaagatgttacgggtggcccactccctaaggagggtttatggctccttactatttgggaacgaatagctacccgtgtgcgaccgcttgtcccacgtaaatgacaagaattcttacccaattggtaaagtgctcattccttaccattctatttcatcttttaagtagtcgtactcattgcttgtgtgaccgatatcaccatggtattcacaccatttgtttgggtctcacctatgttttctgcccttaaacattggtggaggcttcctctaatgcaccatgttataggttgtctttacacattctctcaagtatcaatgagactcttatgtattctatgtatcttgattcttaagttttacctttcttcacgaactcactctgatttggtcgctttgaactcctcttacttctcgggtaggttacattggactcaagagcttttggcgttatgttttttgtctgggagcaacactatatttggtatgtgcagctccgtacccaaagaaactagcctacccagctagctgtaaagaagtaattggtccatacactgtaggattagtaagggtaggtggtggaggatatatggagggagttaccacttgtgaaggttgggcatttgttgcttcgacggacggtgcaggaagtactccatacgattcggcatcctctaagtttatgaatccctgagctcgtactaagaattcacttaaagagtttgcttttttacactggagatctccccataatagagatccggttgtgaccaccattttcatgtcatcagtgacttttgttttggcagccacatccatcatatgctggatgtatttcttcaagctctctccttgatattgattgacactcgtcaaggagctagcctccaaatcataagccttggctgctataaactatttttagaacattaattgtaaatttttcaagttgtggatcgatatttgagacacccttttctgctagtcttccatagacttgctcaatgttaatgaaaaacacaaacaattaacatcatcactcgccttggggacattctgttgggttttatgccctaaataaaattcatttcaaaataatcagatttaactaataatataaatcaaaaataacattt

SEQ ID NO: 298861 - DNA, 1969 bp, Cannabis indica
ccatcacgaaagaactccacagttaagcgtgcttgacctggagcaattttaggatgggtgacctcctgggaagttttcctaggaagtgtgcgagtgaggacaaagcacgctgaaaacactcgtgttggtctgtaggatcagtcttcagtccatgaagcagctagagtgacgaattgtataagagccattagtccgtgagtgtaagggtccaatggaaggttgaagcggggacgttacaaatatgagcccaagactctatagaccaattaaagagttattatcacaagaaaattccccaatttataacaataccactttgaaagattatgtttctcatgtgcatttaaaagggcttgattgaaaacctagcattgaccatttaaggatttctaatattaattaacttaacttctactcatatgatgtcaaaattatgccaagaagaaaaaatacaaaaaaaaaagtcactttgtgtgtataaataagtactctactttgattatatactatatattaattaggtgtgttttactactctcacaattttgtgacaatatattgtgtaatgtgattgtgatgtacttcataaagtcaaatacaaaaaatatacacattatattattgatgatttccatgttggtttaatgtctattacacaagggatttgtttaggagtaacactataaaattaattttggtaatttttaaatgtacacatcattttactacctatgacactcgaagctagcgaaacggtttgtgactttttgaatgtccactactagaaatatggtgtatatttttcagttttttattatacaaaaaataaaaaccgaagataaaagtaagaaggaaaagaaaaaaaaattgcatacctatgtcttcggttattttgcaataactgaagacataggtctccactatcctagccacatatcagatacacgtggaggtccacgtctgatgacaagggtctacaaaatcctaatttcatatctcattttttcttttttgtctatctttctctcaacaaaaaaatatagccacaattttccttaaagcttcattttttctatacaccattaatttgttttatttttctttcaaattttctagttttttcatccaaaaaatatatatagacactaaaaaaattaatttattttaaaatatgagggtagatgtgaaagtttaggcccttgctagtaggtgaagctacaatgtaacaactcaaatctttttcattattaattcccttaacatcaagtaattaaggctctataacaatcatagggtgcattagatttgaatttcaaatggtggttcaatttctaaacactataattatgtgtcttatatatgttcatgtgtataaactactcttttctaggtagaaagcaaacaactagaaaattccaaaagcttgaaaataaattcctagttattttgcactgagtaatcttttagttaaagaataggaggaaataaactttcagacaaatatcttatatctttaagtttgatgattctcactgctatatacttatagtcagttctgagattaggtgagtaagcgtgcgtctcaagcttcgaaattgtgaaaacgaaaaattatcaatatatagataaaatatttaataataaacattgtatgatgtagtggtaaaaagtcttgcttcaagctaagagatcaacgaataaatgctcaacttctatttctttattttttttaaaaaaaaatatttaatgtgtagttacaaaggattgaacatgaactcttaagaattttgaaaaactttactattataaggaagcaataaaactattatttttaatcatttacttatttaaattttatagcactgtgttgtaatcttacgatctttttttacatattttggtggcgtttggtaacacttttttaatcagttttctgtttttaaaagtagaaaaatgaaaatatttttca

SEQ ID NO: 298862 - DNA, 3095 bp, Cannabis indica
tcgacctcacctgtgtgagattttactacttgattgcgtatacttgcgtagcgattaaaaatatagcaacacgagctaatttaaacaaattaattaatcaagctagctagctagctaggcttacttgtccaatcaaatttgatgaaccagccggattcacacgacgatagccaatgttctttctgccagtaacaatctcaagaatcaaaaccccaaggctatacacatctgacttgaatgagaatctcccttccattgcatattctggtgacatataaccactgcaatagcacttttcacgtgagtaagtttggtttctgtgattttctttttaaaactaagacctgtgatgtagagtgaataaaagtgtaatgtcttagattgatattcagttcatggaggcttactatgttccaaccactcgatttgtatttacttcaagttcttctcctccaaatattctggccatgccaaaatctgaaatcttgggttttaagtcggcatctagaagaatgttgctagcttttaaatctctatggatgattctcaatcttgaatcttcatgaagatacaacatccctctgataattccacaaataatatcgaaacgttttccccagtctaacaatttccttttctcctcatctgagaacatagtttaggatgtttgttaatgattatatttgtataatttccgggtaattaattaaatatgttaatttgagtagacaaatggtgagaaatatgcatatataccaaatataaaaaagtccaggctcttgtttggcaagtactcatagattaacattttctcttctcgttgaacacaatagccaagaaccctgacaaggttcctgtgttgaagttttgtaatcaacaaagcttcattcttgaactcctcacttccttggctcgactgcttcgatagtcttttcactgctatctcctttcttccatacaaaacaccctgaatatatatcatttcacacccaatgaccaatgtttcagtactcatcatcacttaatttattatttatagtggacaaaaagctccggaattgtaataaaaatgctgatgcatgctttccatagatataatagtatactaatattgtttttaacttatctgcatccacatttttctctgtgaaagtgtgatatatgaaaggtagagaattagtttgtcaatgcatcacacacacacatgttatatatctaagaaaaaaaaaatgaggagctttgtataattaccttataaactgagccaaatccaccttctccaagtttgttgtcgattgagaaattatttgtagctgcagctatgattttcaaatcaaatgctggcaactctgaaccactttcgtctagctctttttgaccggaaaagtcgtcaagataggtacttaagctttcggaaacattgtgaagatattttctctgttcttcattcactgttatatattaacacaaacacaataacatatcagtggcatttaaatatctcgtacactaaatttacatttatttcttacagaagaaacaaaaagtgggaattcttaataagtgatcattaaaaagtgagaattcttattcttaaattaggctaactccactttttcaaaaaaaaaaaaaaactaaacaatgtcacaagaaataaatataactatctatgtgtcagcaagaaaatgcatactcatgccccatattgtaacaatgtcacaaagagtgtgtatagaaatatatattatattacatatttatccatttttttattaaatttgtgatatatcacttttaattacttatactgaacttgtatttaggaagaatttatatatttttaagtaaatggtgaagtgatgatgagacatgatatattttatatctcctatattatatgtatgtataaatatatatcttgggattaattatacacaaaacatgaatcgaagagtaaaaagacaggacatatatatacacacgcaccttttcttatactatgtgtccggcaatacaagatagtaaacatgatcattaatagtagtacagcaaaagaacccagcgcaatttccagtttccctctcttgttgatagaactattagagtcctttttatatttggctgcatatatttataatcaaaagtaaattatacatagatttgatgcaaaccacattattaataacattgataaagactgaacaatagtacgtacctaatgttattgaatcaactcgaacgtaaaaatcttggcccgacattggatatgtccttgagtccaccagatcaccgtgccatgtcaagcacccaatcccaccaccaccagtcacttccgcattcgcataagccgtacatgagcaattggctaggcactctttctcacaaccttccaaacttaaactcatattcacacgtgccttcgacgtgtccggtatcttcacacgagccagcttcacaaacccttctcccttcccgcacgtgggagctagccctggcttcctaacacaaccacccgatccgtccctcaagaaccaatctccaggcgacctgggttcgaaaccaggtaagcaagtgcactcgaacctctccggattcgaccggtcacagatcccgttcgagccacaatggctgtaactatcgcacacttccctcggcaacgataaaaactcctgccattgtctggtctgatcgtgccacgtgtatctgcgaaccattcctgactcatcgatcatcattctcgacaaaattgagtcgttagttagccagtacacagtcccgacttcatcttcattgttcacgaaactgccattgaaaatgaagaaaggcgtcatttcgggtataccgcagaactcacggccggtccaagaaccggttcgccaacatggagcccgacccttgtataagatcaattggggattcccattcgggtcgaaccggtacgtgacgctcccggttcccgggtcttccgcggacttccaagaagtaaggaaccgatctaacccggtgacccggttcagtccgattttcatgtaaggaagcatagtatctgttggataatcgaagctctgccataaaggagtcccatcagtgtattt

SEQ ID NO: 298863 - DNA, 3161 bp, Cannabis indica
gttagaacaataagttaataaaacgatggtaaatttcagaacaaagagaaacaatgacgaaataatgggctcaatttatactctgccaattaacctccaataagttttcctaaaatctttcactatgaaagtcaccatcacaagcaccaacgaatgctttgattgcaccagaaacactacagaacactccactctttaacaagtttcacgcaaacctctccagaaccctttcttggagtcagcattatattgactcttgtctcacaaagatctcaaaccgttcttgtgtttctctctcttcagaagtctttctctctcacacagttaagcaatttctatttataacaccattacgagagccaagaggagtaactacttaactttctaactactggaagaccaaacttataggtggatttatataaaacaacctgcaaatttggatttaagaaaataaaaaaacatataaaagatttttaagttaaccaatatatccacttactattatttccaaagattacatccattactgtggcatttaaaagaactgttatattttttgaattgcctgccattagaagatcagctgaggtgtgtctccttccacattgatcaaaaatgctcccaccaacctttgtaccttcaatatgttcaagactatatccattatatggtaaaatcccagtttcgaggaagctaaattcagccactgtctgccatggagtcaactcgggtttaaaaactacttttgattcgatccattcataagcatctttcaccatctcctcattccaaccagcctgtttgacaaaatccccacttgctctactgtaaaacccaccatttaaagcagaagaacctcctaaaactctacctcggagatttggaacaccatcctccgagataaagctttgagccactgacgagtattcgtcgttttggattaaggataatccatagaacctcttgtccattatcaaaggatttccgtacggggaaccacctcgttccaccaaaagcacagaaaatctctcagacaaggttgcagccaagggacaaccagtggtacctcctccaactattatataatcaaaggatttgccagagatttcattgacatttgaagtcatatggggtagccttttctctacaaaacaaaatatgaaaatatcattattctggaagacttcatgatttctaagccgttatagttttgttatgacagagaagacactacaaagtggcataccttgagtgggtgtagtagaacatgcaggcatggtttgacgaggaatgggaaaacaaagagaccaacgaattaggaagaaaaatacagcaattttattgccacgaatgactaaagaattccacatgttttgtgtcattttgagaagtgtggtttgacattaaacgagggacaaatatattgcacttgcaagctagttggtgcatgggtataatcatttggagtctcttagtgctaggtgtttcaggttgattgcaatttctttacataaatatactatagaatatagatttcctcgtggtttagctaattatagatacttggttattacgatgtctacctaacaatttttttagggtttttgaaattatgtgtacctaataattgtggtatatactaattgagaatgatgaaagtttagcactcctactgcaacacaacatactttcttcatagcttattgacgacagaagcagaatggtcctaggacatgattaaatctacttaagcaatctgaacaacttttctattttatcctttaaaatatattactagttttttttttaattttacaacacacttttatattatagcataccaaaattctatttttttttgaaattttattatattttattcatttcaaatgtatatttactcagaataattaataaaatatatttagagcaataaatagtattttataattattaaatatagaatacgaatagtatatttaaagaaattttaaaataaaaaactttagagcatctactgtagtgtgatttagtactttttttaaaaattttaaaatttctctattttagaaaagttgttgggagtgctctctactccttcttataaaatacattatcaaaatttttaattttttaatttacaacacacttttacattacactatataccagcttctttatattttttttttctatatcattaaattaatattatttttattttctacactattaaactactaatttttgaacatatatacaatatacataaaaaaaaatattatttacatattattaaaataaatttacacaatgcactattcattctttacatgtagagaaaattgcattaatatgagtgcatctctattatacatatatgatttcaaggagctcatgaaagctttttttttttttatatcacaattaactaaaaaattgagagaatctctattataaagagattgttgtgagtgctcaacttctctaaaatagaaaagctttaaaagatttaaagaaccgtactaaaaatacgctacaacatatggtttaaacttctttattttaaggtttctttaaaaatactattcatgctctacatttataaaatactattcattgcttatatttattaattattttgggtttttgttatccaagttttctttggcagacacgtgggacgatcaaagtggggacacgacttctatgtagggcgtcagagaagattaggagaaataactctcagatccgaaaggcagtaagaggtaatagcttccgagagctgcctccttcatcgagaaactcgaatagtgatacaagttctggagaccttggacacattagttcgttgccgaatggtgctccaaaaacggttatgcctttttctgacacaggatcattaccatggctctgaggccagttgttgggaatattttaccaggatctaaatttactaacaagtatgttgattaacatcttaaatatgaattccctaaaataatgaaataaacacataagggtttaagaaaaccttatattgattaaagtggaatacaatgactccttccgttcaagatctctaacctttgattcctttctgtagcagagaattatcaagatctgaatctggatctctttctctccttcgggtttgg

SEQ ID NO: 298864 - DNA, 8014 bp, Cannabis indica
ctccattgtgtccatagtactactccctatacaccctaacttgatctctctgtagtctatacaccaaaacacacgtacagtactcacattttataaaatatatatttagcacactaattatattactattactctcttatcatcaaacatggaaaccctaccatttctccttaccttcacagcggtcatctccgcctatctcttgtggttccacctccttgcccggaagctcaccggtccaaaagtatggcccatcgttggaagcctaccgtttctttacatgaaccggaaccgaatccacgactggatatcgtacaacctgcgctctaccggaggatcaggcacgtaccaaacttgtaccatcgcactccctttcttagctcgtaaacaaggtttctacaccgtaacatgtcaccctaaaaacatcgaacacatcctacgaaccaggttcgacaactacccaaaaggccctaactggctaaagcagccttttcacgatcttttaggccaaggaattttcaacagtgacggagaaacttggctcatttcaacgcaaaaccgcagccttagaattcacaactcggactcttagacaagccatggctcgttgggttaaccgaaccatcaagactcggttatggctcatcttagaaaaagcatcgaaggagaatgtttccgttgacttacaagacttgttgcttcggttgacttttgataacatttgtggtcttacattcggtagagacccacaaactctttctccagaattaccagacaaccaattcgctgttgctttcgactcggctacggaaaccactcttcaaagacttctctatcctggcttcctatggcggcttcagaagattttgggaattgggaccgagaaacggttaaaagagagccttgatatcgttgagaattacatgaacgacgccgtttcggcaaggaaggaatccccgtctgacgatttactttccaggttcatgaaaaagcgtgacgttaacggtaacctcttcccaacttccgttcttcaacggatcgctttgaacttcgtcctagctggacgtgacacgtcatccgtggctctcagctggtttttctatctcgtcatgaaccatccagaagtcgaggaaaagatcgttaaggaaatctcaacagtcctgaaagagacacgtggcgaggacatccataaatggctggaagagccgctagagttcgacgaagccgataagctggtatatctaaaatcggctttagccgagacacttcgtctgtacccttcagttccacaagattttaagtacgtggtttacgacgacgttttaccggatgggactttcgtaccatctggttcgacagttacttactcgatttattcagttgggagaatgaaaacggtttggggtgaagactgcatggagtttaaaccggagagatggctctcggagaaaggagaccggttcgaaccgccaaaggacggttacaagtttgttgctttcaacgctggaccgagaacctgcttaggcaaggatttggcttatctacaaatgaagtcagtggcctcggctgtacttttgcgttaccggctatcactagctcccggtcaccgggtggagcagaagatgtcactcacgctcttcatgaagaatggtcttagagtttatttgtatccacgtcagctccaaggagggaatgatcaggaggtagtcgcgtaaggagggcggaaggggtgttttcgtaattcgaaggaattatttagtacaacaagtcaacaagatagtgcgaagggggtaatatggtcattatgatgcttgtttcaaagggtataaaagtcatttaatttgtatttactttactttcatacatacgttttttctatttttcattttttgtttttcgttcgtcgttcgttgagtgggttgaattttgagtacagtttgctcatctaaatttgaaccattctattatgtaatttgtaatgttataaaagtccatatcagttatatggattgtgctgatttaataaagaattttaaattatgctatagttatatatattccctatgttcaataaactaacatatataacaaagtgtttcatatatttattaactaaaaataataataattagtgtttggtaattaggtcttagttgagcaccctagtagtcaacctactttgactaacctataattggcacaacaattaaacttttttttttccttatcatgtacactcaaactaaattctgaatattttgataactagtttttattattattattattaaattctcttaactatcattttatgtatttaatttttaaattttgataataaaatcttttaaactatataattattaataaatataaagtattatctatttttcacagttaactagcaacttaaattgtttatgtacatactcttgtacacgtgatacgtttatattgaaacacttaatattatatttaaaaattactgccaaaatttaagattggagggttaaaatataagtgaaactataattggagaattgagccgccaaaaactcttttaagaacatatacagaactacttcactcatctccaattaaaacgaaaattttccatacacctcactctatcctacattcaaccaaacttactcatagccaattctttatatattagattattaatataattagttcagcaaaacgcaccactaaaaatgctatgctgttcataaatcctattgattatataagaatttatatccttgagaatcaaatattatcataattgatttagaataatgaattatttaatttgataatcatgtaggtggagatgtcgggattgctgaagctgaaacttcaaaaaaaaattatcttaatttatcccaacagcagagttgttcagcggccatattttctcccaattatgtctaggaacgcgtctacataggtagcaacttttgagtacttactaatcattcattaaatgctataataaaggcacaaaataaaagtacaaaaacattttggttaaaaaataaacattacatacataaattataaatatatatttatgttattgtaacataataatcacaaaattgatatgttagtaatggagtgtgacatttacaaagttgttgctggggctatttaccaaatatgtcttgtaaaattcattcttcccttggttgaaaaggtgagaaagtccaacaaatccatcgaacttcatgacttggaaagtggagaaaaaattgatctttggggtttgattagaatgagcttaacaatgcttgtgaatagcaaattaaatgaatgtacctatattatattccttgcattttgctatattcaaacccttctttttctccaatcttacctagcattcttagtttgattagtgtgaaaagccgcatattcaacaatgattactctaatctatgatcttttcaccagttgagaaaaggttccatacaacagttccagccaggtagagtccaactgacacattgaaaacatcgtcccaagaacctgataatgtcaaggtggagaaaacagaaatattagattagaacttggttttcttgtcacaaagatttaaaccaattaagctttacaagaaaggaataaccgaaaactttagtgtgtcgacactgtgtttaattagatggctttcttaggtgtacccaattagccttataggtcatactttctactaatgaagtatgaatttgggcttaacaaacatagaaaatcaaccccaaattaccctcactagaagaatgaagaatttaatcagaaacctattattgactatcatatgctttgaagccactgaggcagaacagactccacattttgtgggcactcaatatataatgtcttaccttccaaaaatatttaccaaaacactccaggccaacccaattttgagactacactacacaacaccgcttaattttctaaacaaatatcaagaaacttgtagcggattacttagttgtctaatgaggtcaagttgtgcttacttgaataaataaacagaagacctattctatgtcaggtaagaaaagattatagcaccagataattattaaagcatcattgaaatcaaacaagcaattcaagggtatttgtttttgtttatacttctgtactagtaagaaatgagtactaaccatgttggagaatgtatccagttgcagctgtaccaaagacaccagcaagaactccagcagtgttggatagaccaagcaagactccctatggaaagggtaatgcaaatagaaatttagcaccataaatagaaggagatttataggtttgtgtaagagcagagatatgaagcatatgttgccaaataaactttaatagatgaaactatagtgcagccaaacccgaaaacgaactgagttttaatacttacagaatatcgaggagcaatatcttgatggtttgaatatagaccagattgtgaaaatgcatcagttccctataaatcaaaaggcaataaaattgtttatctaaaactgtatatggtagatcaaatgctctgctcttagctagaaagatagcaaaaattcaagaagcctgagtaattatgaaagttcacagatttgataattaataaataacaatttttttttatttcatttgtttctattagtaataatcaaacctggctgcatgccatgcatagaaccgccattgcaggagaattaatatgactcaattgagtcaggaaaaaagcaggaccaagaaacccaattgtttgcatgccctacaaaaggaaaaattcaaatgcccaatcagccatgaatcaaacttaaatgcccttttagttttcgtttatatcgctttgtgtgtgtgagcatacaaaagcaggaagctgaatacttgtcaaaagttcaatttcataaatttttagcataagatcattacttcacttgtaaatgcactacactaattcagtggccaacatatttagtaagtttccttgtgaatttgagtcatatgtctagtcaaactgtaaaagaacctctccttgccaaaacactcatcatgcatagaggagaaagcatataattttctatcatggtaaggcactttcccaagtacaccacagcagaagaattcgtgaaaatcgggaaaggaaataaactaataccttacgaacagttgtcactgaataacctttactgataagtgtgtctgcaatccaccctccaagatttgcagagaatgccattgtaagccagggcaagacacaaaagagtccagattctgtgagattgaacttcagcacctatggcaagagcacagcaataataattacacctcggttattacagtgaactcatccttgatcccaaattacataaacaagtaacacacatcatggtgaacatggcattgaaaagaaagtgaagttccattacatatcaataagctgtattcataagcaatagcttacttggtgatagtatgttggcatccatgtaagaagaatgaaggttccccaattgtgacagaaatgagacactatcagagcccatacaggcgcctttgataatatttggccccaaggaattgttttaacgggttctttggagacactgttagtaagaattagctttttctcttcaggtcgcagttgcggatcctcaagtggagaactgtatgcctaatgagacaattcaagaacatagatggtttattaagaaaacaagaattggatcattgtaaaagactctacaaagataacaaattgaaatgttaaaacattaattaagcttaaataacaaatagcttcacagttctcaataataagaaaatgattagaaccaaacagacggtaaagctcaccttatttaaccaaattgtaaaccatacagttcccagagaaccaaaggagtaaaatactgatgaccatccgaactgatgtattaaaaaaggtgaaaaggcgaaaccagtgaccgaaccaatatacatgccgctgtacacaagagccaatgatcgactcctctccgatacaggaacccatttcgacaggatattattcattgcaggcatagcaacaccctgttaaagagttaaaacaatgtaatttatgtgaatatagcagttgagttgatttatacctttgtttcctaacgaatagatatcacaatctctaaattccacaatagcctcaaaagtgaaaaaaaaaggctttgctatcattacttctacagcaaagaaagttttttaacaatttcatcctcaagtttaaagaaaattgctttacctcgccaactcccatgaatgcacgaacaacaagcaagaacggcaaccccattctagcagcaaatggggtgagaatcgtagcaacagaccaccaaacaactccaaatcccaagaccttcttaccacctactttgtctgcccatatgccaccagcaatctgttttcactacaattataagaagaagaaaggcagaggtgcctttcaaatgtttgtttctttttatcattttctttgtgtcttaaaataggcggagtgagtttgagtcaaactctaattaagggtctgagcaaaatatatgtccctcaatgtataaatggaaaaaatcaaggacagtgagtttaattaatgcatgaaactccatgttaccatacctgagtgagaagatagccccagaaaaatgaagactgtatcaaaccaacagtagcggggttccaattgaactctgctgacatgggaagtattgctatgctcatatttacctgtcaaaaagtatgtactcaatattgctagttcgaacatttaaaatcattaatgccaggtgcccacctttatcattactgtttattacaataaaataactcattacagccaatggagtggtgatcagtgtaatgtaactaaaaaaattatatctttttaaatataaacggtcttgtagtggcagttaattctgaaagaaaaaaaaagtgagagagaaatagatggcaaaagaccaacttactctgtccatattacaaaggagaaaagccgagaagcacaaaattacgataacccatcttttgggaaactcttcccaccagggactcacgccctctgaatcctcctttaccgaaacgacgtcgttaaaagcatccttaagcttcacggtttctggaaccgattctgaaacttcaaaactttctgacttaacatccgcccacactttcccagttctcttcctacccgaactcctccccgaaacactgaaaacgcagtaccgaccctgcccggatggtgggccataccgtactcggatccgaacgtgggcctggtttctgaaatcggacacgaagctttttctgtggcccgaaatatcaggtagcgataagttgggcttgggagaaaatgagtagagaagagctctggcgctcatggcgttagagcatgaaagttgaaccagtgaaccaattcgtcagcaactgatcggtacagatattaattttagtatattattttatttatttaaattttatttggttagcaatggtggaagaagtggggtgttcttgacaaatgatatttatgtggattggttatggttgagacacgtggcagttgtatgaaaatatcggattgtgaaggtaaggaaatgcgaattttcggttgtttgcgcgcctttgttcagcatcgttcggataaaattattcttacgtgttcgagtttgtgaataacggaaaacgatttctgttgagttgggccaatatagtttgatctataaggtgggctaaggcccatataattatggggtaagttgaaaaataccacatttattaatcaattgatcaaatttctctctaattttatatttaattaaaacatacctctttttacatgtattgtacccaaaataccctgacataagagactcacatggagaatatattgaagtgacagggataaaattggtacaatatttaaaaaaagaggtaaaaataatagactttaaaaaggaaggtaaaaataaaa

SEQ ID NO: 298865 - DNA, 2207 bp, Cannabis indica
tttttttactacatttcccctacatttttctttcctcgtcaaaatctaactttcaaacatagcctaaggaattatgtgacaaacattactacaacaaaagagaattccttacactagtaaataacagcaaactcaattatgttgcctaggaaagctatgtcagagtctcattcatgggcataaactaggaaaaatgcataaattgaacagattttctaaaccaggacaacattacacaagttatccatagttgattttacaaaccatgaccatcttaaataaacaaactacgcaaaaaaaagcacgtttggatagaaatctttcatttcttgcctaatactttaatgaaataacaagactaacatacagtagtgaatacttatgaatatgaagtaattatcatcatctcctgtaaacctgccaaaattacaatttcataccaaaaacataaacaaatagaaaaatggaagcaaaagtcacctggcgaactgaagtccactttatatgggcagcattcaaagactgagtttgaacataagaatgcttaacctttcctccttctccaatcacaacatccaaaacagcattagcccagtaacacttattcccatctccacccaaaaactcctcaattatctcaacctcaccaccattctccaccaaaacaagcaccctaggattagaaataggcattttctccgaacccttttcacttccttcaatggaaaggtaagtcaaatgaattggactctcaactctgcaaccagaagggacatacaccacagtcaaatccggtgctccaataccgttaatggaccaaaacaggtcaccttctggaccattcccagcaaactcaccaacccttttcgctatactctcttctgatagctccagcaagctacccacaaaaaccccatttggcaactcagaagaattcgataccgaattcacggcaaacccatcagctataattaaatttgggaattgggtatctgtagaaaaagttagagactttggtggatttgggactggttcgatttgagactgtttgataaatgatgtgtctatgtaccgaaagggctcgtctttccgagaaggccatggggttgagagaagggtctctgaagaagtgtccctgagcttttggagaggtaaaggtgccgccaaagaagaagaaggaagcgagtcttcgagggtttctgcaagttggagaacgaatgggtctgagaagttgggttgaagagtcaatgatgattggattgaaattctgggtttgggtttggtagtggagaagtgtgggattttgggtctgtaaatgtgagagtgtgtgaaggctaaggtagccatggtggatggtttgatatacttttatgaaaacgtttggttacgaaactttatgttcaatctaaaccaaattttgtgttgttttattttatttttatttgtttctttcttaggtcctaacattttttaggcatgtagttttgtaataaagtattttcttttataatatattgtaataatttatttatttatttatttttttggcttggaaacatgtttagtttggtgtaatgaagattggaaagaaatggagattataattataatgtttggttgagtttttaagtttttggcggctaaaccttctttagtatcgttttacttgtactgaatcctccaagttcaaattttggcgataaaactttataaattactgaactgatagcaaatttaagatgtcatcctgctaactaccattatggactgtgtctgcttatgtgtacatttttgtacatgttgatacgtttatattggtacacttaatattttaattttaaaattcattttaaaaataaaaaatattataatttttgaaataatttttaaataataatattaggtataccaattgtatacaagagtgtacatgcagttcatgttagcagttaactttaaaaaataaatgacaccttaaatttgctaacattcagtagtttagataattttaccactaaaatttgaagttaaagattaactgcaagtgaattatagttgggaagatttagccataaaacactcacttttataatctctttacattacatgtattgagtattcaaccatttgcatgaattctcattacaccaaaaaaaaaaaaatacaaaactaatatgcaccatatgcattagaatacaaatataaaa

SEQ ID NO: 298866 - DNA, 3760 bp, Cannabis indica
gtgcattatagaattttcttataatttattatttttggtggaacaattttaatttaatattaaatattatatcaaatatgaaattaaattaatatattttacttaaaaaatttcatattaattttatattaataataataattaacttatgatataattataaattttcaacacataattaataattatattaaagaaaattatgcactaatttagtgtagatattcaaaattcaacatgttaaatttggtacataatttgtacgataaatatttcacaccaatatttagttaaatagtgcaccatttaaaatctcatactgaattaaagactcttacactttttcagtttttgttttcattaataaataaatttctattaccacgtccaaaaaaaaaaaaaaatctatttacaaacaattaatatactattaataatttatgttgtaaataaaatcaataagttatcgatgttattcattattttaaaattagagtagatgtagccttttttttagaataaagtccttttatttaataattaaagcatgatgctaaaattcttaaaccccatttcgcattattgttatgatctgttcttaccaaacttttttatagtttatagtatcaattatttttcacttatatattgaaatgagtaaatacttagatataagtaaagtacaaattgaattacttttttaaaaaatcactgatcaaacaagataaaagtatcttttctattgctaattctacgacaatctcttttaagaaggagggggcaggaatccaaaatttctttccacattcccgaagcaccattatcccttgtaatgttaaaaaaacccattcctttaatatatatagcattaacaatcgattcccaaatattggagtggtcagttaatatatctttcacgcccacttgagatagagtaaaagtttgaataagagttttcacacacctaaacctgagactaattctcctgaatttggaatgacatagagagctccaaccaatagtgtgtatgattttcttctcctcagtatcatcccaccaaaattcctgtaaactcttgtcaatttttgagcaattgaactcgaaatgatttcagaggtagccacataagtcgctaaggaagagccgactaattagattgagcaagccttgccagccttggataagaagtttgttttctagcttgtcaccctttgtagaaccttgtcattaaggaattggagatcatttgatcgctttaaaaatcggaagagtggaagccccaaataaactgcatatctcttcattcttttcataccaaaaatttcaacaatttcaatagctttacaaagcccgactctctttgaaaaataaattgtggatttgtgatagtttacaacttggccacgaccaagcacaatactcgttaaggcactttaaaaaggcttttacttccttgatcgatcgatgctttctttaaacaaaatgatattatccgcaaacattaagtgagtgatggcagtttcgttcttggatatcttaaaacccgcaatttctcttttattgttcttggccatgagcggtcttgagaggatgtccgccacaacgatatacaaggttggagataatgggtccccttgacgaaagccgcaggagagggtgatatacccatgaactaaaccatggaaaaggagccccatatttttgacctcaatgcatttatgtacccattttataaaagcccaaaccacccaatacatcaaggatgagcctcgtgctcatcttgtcgtaagctttgtccatgtcgagtttgatcatcataaatcccttctatcttctctttttgcccatagaatgtacaatattacgggcaacaacagtgttttatgtaattaagtgcccttttacaaacgttgtttgagttggggagatgatagtcaaaagtaaaggtttgagtcgaagagctaaaatttttaatatgcacttgtaagaaacgttgcacagtactattgacctatagtcattcacttaactgtgacaatattttttaggaattagaattatgtttgtaatgttttatgaattgtagtagtttcaaattcctaaaaaagtgggataccatatcaaacacatttgttttagcaatgtaccaatgttgaatgtagaatcccgtaggcataccgtctggactaagagccttgtaatttttcattgattataagcatgcttcaatctccttttcctttgggacaaaatccagcaacaagttttcttgagaagaaggtctgagaccttaaagaaaactcagtgtcagtgaagtgtttgatcgattgtcagagaaagtatggttgaactgttgaataaacagatcaacaatagcctttgggttactctcccaattttcactcttttttttttattacttgtatgaaaattattcttctacggaccactattgaagccatagaaaactttgtacacttgtctccctctttaagccaggaaactctcgacttttgtctccaaaagatatcctctcttgcaagggctttattcaaattttctctagcatcatcgagattcctttgattgccttgattattgcactctagcctttgaacttttctctagcttctccaacttgttggctgattttttgaaagtggatcttgttccaatttcagagctggtctttttttttttaagtttatgatagaaattaaccataggatttcgctgaatatgattcttccatgcattccttaatacccagaaacatcatgagtcctttccccacattaatttatacttgaactgagtcattttgcagttaacttcttcctccgtgtcaggtaaatttggtctatcattcgatattcctacgtttaaattccttaccaccgcatttgagaacaaaaaagtgccagtcaatcaaagccagggctctatcaagatgtgctctttataacaaatatcccatgtttctaatctattttttagaaccatgtcactctaggtcaagcaccctagttcttgccaccatacgtctgagattaaaggagtacctgacagaattaccatggtgagtatagttcagactttcgtaatccaacagagtcattcaagtccccatgaacagcgaaagggccataccaccagcaaagtagtcttatactttcttccaaaaaccttcctttcctacaagagcaagtggaccatagactccaaaaaattccaaacattcccaagaggatccgattcaattgaaccagtcttcagatttttatcatagttaagaaccttatatttgacatcatttctccagcaaactccaaatcctctaaacttcccaataggtggcacatagatgaactcaaagaaatgcagcttgatgcataacattttgaatttttccatagctaatctcatttcagatagaagaaccataccaggatttgactacgtataatctcattacagatagaagaaccataccaggatttgactacgtataagaatcatcaattgtcaaactgttgcgacatttcttagcccgcgacagttccaagccagaatcttcatgtgattttggagacttttttcgagaaattcctcatagccccaaagagaaaaacctagtcgtcctctttctttgcatcctcctttttgaagcaccgtttcttcgataccaaaccatcattctcaataagctattttatcatacatatgggtggttctttggtactatttgttgggttttatg

SEQ ID NO: 298867 - DNA, 4452 bp, Cannabis indica
atatatatatataaatacattttatatttaccttttctggggataagataataggaagatggtaccaattacttcttgaccatcgttttctccttgaatttggaggcgaaggaatatcagttagaataataccaccgtacttctgtatttgtcgtttaacatccttagccttctggcttgaaagtccagttagcagaaattgtatgccttggaatatcaatcccttaccagcctgagaacaacaaccaaggaaacctttttgaccgtgatggtgtgaccttttggcaatatacttaatctttttgctagtgaccatagtcgagcctacatttaaacaacaaacaaaaacataacatcagtttcaaactttttttatctaatggtataaaatttactcagcaaccaagccttacagtttcttttggaggaatgcagctctcgactgttcttctttggctttatttttacttcttcagagaagcgaaccctttttcgagcaggaaagtttctatcacgggaattcttgtcgttggattgtctctttggaagtcctttaaatttttgaaatttgataacatcaactggctgcggtgcttgttcaggatgcacatctccactagattttaaaatggaaggtccagaagctaactgtgggtgtgttagctttttcaatttgtcaactgagttttcattcataatagtttcacaaacttcctcattctcatttccagcaaaagaattgtgaatagaattgaaagatggcaactgcttagaactcattttattagaaccaccaatgcaattcatattcggtttgagagcactatctttccatggatcacaacttagtgattgaaatgactgattatagtgagcacttttcccattagatgcagaaagattttgtggaataagcatactatacatcttgagtgaagaaagctgtcttctaactataccttcagaaccttcattaactatgtcagtgtttccacactgaatttcaacaagttttgagaggtgtgaattttctatttcaagatctacagtggatctgaagtgtccttcattcccattttccataacatcctgattctgaacttcaacagatttggtatcttctgaggcaatactgcatggaacaaccgagcaaagaggatcgcccaaagacaaacttgaagatttcacaacatcttgagaaattattatcccctgattttctttgtcaagcagacctgcattgtttatacttgattgtgaccctccatgggacttgaactcacgtattgaaactagagagtttgcatccggagcaatgtctgcagattctgatagtaagcttgtctcacaagcaaacgctttcatgatactgttgacatttttcatttttaactgtgcagaagcatcttccttctgaagggtggacaacttaatcgctgcatctacttctttctgaaagatggacaacttaatcattaccacatgaaaaaacataattttaatttacatgtcttccagttacggtaagatatattgaagaatttacaacataagttattgaaacaaatttaatctaaatttcgatgctatatttgctgcatgtgcctgctcatgggtaatggatgcaaaaaatgctaaataattcaatattaagaattaagatcggtcaaatcgattatgttttcttacaggttacagcatagaatttcctaaattcaataatagatagaataatgaaaagtatgaaagcatgttgaaattattggcatgcatatttgaaggaattatatagacaaaaacaggcacctttgttgaccagccacctaaccatcgactttgaaatcgttctgaaactaggtaagtaaccctatcttctccttcacagaaccataaattgtagggtgcatttcagtttgcaatcaactacaataggaagagaagtagcaaagaaaagaaattaaaattttcaactcactggcatcctctaactttgattcatgagaagcacttcgttctctggtttgcagctgcgatgaagtcagaactacctgggatgagccaactgtctgggagcaaaagttgcattgttattttattattcttcatcatcattttttttataagaaatgaaactacaacattcataaaaatggacattacaaaccaaattccattgttatttcgagtgactacactctacacagggtgtcaagacatcacaactccagcattctaacataataaatatagtaataggcaggttatctaaaagcaggaagcataaacagaggaaagaaactgttttgcatgttctgtttttccttattagataccttagatagtaaattatgtcagtataatttacctgtgccatatctatatcacgtggacttttggctgtggatgaatcatttttatttgctatggcggaggcatttaaactaggagtagaaccatcaataagattattgtccctctcacaattaagagagtctaaagacaaatctgttatttctactgtatctaaatttaaattattttcaagcaggtttggtgtggcaatatcatcaaaattgatttgccgagcccaaagttcagtactgacagaatgattgtcatatctgaaacaattttgagaggctggagtctctttgacatgagaaacagctgagccactaacttgaagattgtaagtatcacatgtcaatcctacatcttcaaaagcatctgtcattgcaaaatcatccaaatctgagagagaatcaagctcatcagtttcttcagtggataaatcaaatgaatcttctagccattccaatcgtgtctgcttcacccgaagggtaacttccagtaaatctgttgaaattatttcttctaaatctgacctactatttgctatttcatgtataaccaatgcttcagacgctgcaattgagagtttaactgcatcatacagctcagaatctttaagatgtccaacattgaactctttgtagtgcctcagaggattcttgctcttgccaggatacttttggcaaggttctggcttggaatttctaggatgcatatctaaaccaccagcactgcagcttattttagggcaactattttcttttcgagcaacaggattttcaaattgctgcactcgtgaaataattttggaaacaggttgagatgcatctgaagccaaaaattgagagggaacacatagtgcactctcattagaaagatggagatgaaaatgaagcacctgctgatggaaaaaccatttagattaacacaaatactcttaccaagaaagtagaaaagattaaaataaaaaataattaaatatctattttacaaaacacaatcctggctacacaaacccaaagaaagcagcacagtgcagaaattaatatgggcaattactctagaattttggtcaatccatcttaaaaaattagattctcaaaagttgaagaaaagtcattgtcttgcaaagtgtgttttggcttcaacgtcttttgaattaacactcccttaggggttactttcttttaagaaaaagtgtagactaatgatacttgaaggatattagactaccatttgcaaaacactaagagttgtaactttcatgatttgtactcttcatctgaataaatagttccaaaaatgtataatgatattcgaatatgatagaaaaactcaagggatactgcgagtaaggctgtctgagatacagaagtacaactattaacatgcaacatgacttgataataaagggttcttattaggaagtacccttgaaaaccataatcttacattttcatgagatgaagccaaactcattgatgaattgtcttctccagaaatgaacaggtataatttatcatgcataccttcctcccttgacaacaaagctacattgttatcagcgcaaatgtttccttgaaatgatgtgagatcctatccacagaagtgaataaaaacattagccaaaaatttaaaaagggaagcccttacatttagacttggcataacatcagttaatgaaatccaaagacggtagacctgaggtagcttctttcacaccaaaatttacaaataaactaattaaagtttacttcgcacacaccagcaaatcttaagtacaagaacacaaaatatgcgggtcacttgcttatcagctatatctcaaaataaaatagttcttaaaaaggccattaaataaagaaatgatagaatgctccgtaaatttatattaacagttgcaaaaatataaggaaaatttttttatataaatatatatatatatctattctatataaagtgtacctatataactgaaattcttagtttttgagaaatttatgggtgacttttattttttatttaataaaatattatttatatataataaaatattatttatatataataaaataataataaaacaaatcccattaatat

SEQ ID NO: 298868 - DNA, 7104 bp, Cannabis indica
gagagagaggacactagcaatctttgagcttttcacttctttccatgtgaagaaagaaataataggcattatttgagaccttttccaaaatgtcagtcacaaaagagagattccccagttaaacaataccctttaccctttaataccttcagtcattttctagattttaattacatctcacaaaatagtatacacaacacattttgaacttttttttttgttatcattttcaaaatatgtagtaatgacatttggcctgcaaagactacctcagaaatcattaatgctttgcttgtttttccaacacatacaccaatatagggaggaatctcctcacgggtttagtttggaactttgcttaatctaccaacatttaataatacatttgcttaccattacaaaacatccctagacaacaatactgagaatgatggacataggacaatgatatccataaccattacgtttgtgtgtttgtttttgtgctcaacaagtcatttgttataccaagattaatattaagtaagacttcccaatattttattttcaatggtaggtaggtaagcttaatcatgtggatataattaatcactcaccaatatgttaattttgtaattgtaccctatcaacatcataacaaactagcttaacaactatgtaattagtaagatgataagaacccattttaatttagtgtcatatattatgatttattgcttcaaatgcattgaacccttcacaggtgactatgtaagaacaaagagatgaacttaaaatgaaaccttattagtttgatggttttggcataaaactgaggtattatagagattttttggcgccaaccctatctagttggtgatgaagccttagtttgctttatcagccttctcttatataaaagaccaagctataaaagacaaaagaactcactcacccaattataggttgtgaaacttttgaaattcaaatctaacggtccttttcttttccatttattttttttgtggatatattttcatctccttcacttttttttatagtaagtacaagacccaatttttgttaacatgattcataatacatacttccactttttaatgttgtggtgtgttgagttcaatatctatactttatgaccaattttattgttgtattttagtatgaaattaaagggcagggcagtagtgtattatcaatgccaactataatccaatacaatcatactggcaagcaaagctactgggccaacaaaaaactccaaaagtaccaaaagcattaaataccattctattccttttttaaagagtgacaaagaaaaaaaaatggtagagctgtccaaaccaagtgaaaaaaaaaaaccttatttttctaatatctattattttgatataataaaaatcaacattaaattgcagcctcatacatacaagcaaacagtaattgaaaagcttagaaataatggaacaaagatggcagaggagagggaccttgcttgtactgtaaacatctagcaagaaggaggggtccactgttggctcctctggtccacccattgcatactccttccatatttttctttctctgtctctctctcttcttgtatatactttttttttacagtattattattattgcttttaaagtgtttggttaccaaagatctttgctaaatctaaatttcctaaccctttgttattttattgctaatcatgtgaaccccactaactatcatctaacaagtgtatatttaatgacattggttggttgattcaataatcttctgattattttctaatggaatgtgactgacatgtgtcagaatagtatcttctccttctctgaaaaaaaataaaataaaattggtttaagtctctaaaaagaacattaatactactgggaattagtagttggtataacaagaaagaaaaagaagaggtcaacaaagttgtagtaggagaaggccacattgagtaaatcagaaaacaaattattaaatctatttagatgctttgtttaatagatactaggtatgctatggcagccagtaattaattaaaataattaatactagcagtataacagagaagagaacaaaaaataatcttaatggggacaaatatttataatggaaaatgaaaaaggaaaaggtaaatggtctgaagaaaaaaaaaagtggtaactggtaagtaaagtaaattaaagaaaatggtaaaagtaggttcttgcaagttttgagctttcaaatcaaaaaataaaagaaaaagaataaaattttgataaagtggcatatacatatgtgttggggaaggggccttatatataaatatatatattatggcttgtgggttcgtgtagaggaccaagtgaacacagtatttatttggagaaaaagaaaacatataacggcagtatcaacaataacaacaataataacagtgagacatatttgcagagttttccagagagagagagctctggcgtgttctctctttctcagcaatcttttagtccattaccattattaatatcgaagttgcagagaatttgaagaagaagaataagtacgaaagagaagaaaggaaggaaaacaaagatggggggaggaagaggagcttcttcaaggcttagaaaagcagcaaggaatatagcagttgcagctgctagtgcttgtggttcattctctagaaggaaagctcttgtagatcccattgcctttgacaataccaactctgaatctgttagtttcttcttcccaaccccttttcttctttcagtttttcaccaaacttttatttcttaatctgattttgtttagtctacttgaatagcccccattgtgtgatatttgtttttcttattattattttctataaccaagaaagaaaaccaccaaaatgactaattgagtttctccacctcaattgtctttgttccttaaaactagcttttctcttttatttgcatatgggttgttgggtttggtttttgttttcataatcagacaaaaaggactcatttttattgtaaaattgctaagtaaaaggttaaaccaaagagggtaacagctaatttcccttaaattttttgttttaacagatctcaggttcttccgttgtgtctccttcaaaatcaaagaatatatctttagaagaagatgaatatattacagaggaatttgtgtcttcaaatatcaacccaaatttgcctcctgctaaggtacaatacaccccttcaagtcattcttattcgtttgagctgaacccctcttaagatatgaaaaaatattccaaatccccgtgaatacctaacaaaaaataaactttaaaataagaaaagaacaaaaaaaaaaagtgaaaaaaaggtaaaaaatgtcttctttatttacaaaacccattctttgagtagatagcctttggcggccgtatttttgactgtttttttttttctttttgagtcacagaagttcaatacttatttctttccttgatgatttgaaaggtgcagtagtcttaaagttttatgtatatttgtgtttctgcactttccagtcaattcaagcttcacattttctaaatcagaaacacccttgttatatttatgtacaataaatctaaattgcaaaaagaaaaaataaaaatgatatccaaacgcagagagtctgaattttaaagtgagaagtaattataacaggtggggaaatagaataacaaaagttgtgtggcatgtgaaggctcctgacacatgtgcactactagtctgaagtttgagaaaaaccactgctatccaaccttagacagcagagcccactcttaaaaagaaaagctttttcccacctgccagtgacactaattatagtgattactatgaccatgttattcaatcttttaccaccaccaccaccaccaccatggcattccctcctttccttttttaatttttagacaaacagtttcaatttggttattatgatggttttcaaagcacaattggttattcattcatgccactaatatttgtttgctagagtttgctgtggattcttttcaaagatcttggtacattcatgattgatatttgaaactccaactgaagtttagtttttttgtcatgtcaaaactcaaaccaatatgattgcctagtgtttgttgaaagttaatcaacttgtttcaaaacatttatattttttcactcttactttatatatgaccaaaagccaactatttagggacgtacttgataattgaacccgaccatgttcgatcacttcattccacagtgaaaaaagattagcttttctttatttaaagttgataaagtaatcaagcaagcaagtttgaattgaagcttttgtcctaccttcatgttttgtgtgtgtgtgcaagtttgactagttgttaagaattctaattattagtgtagttattatgtatttactgtgtgcttatctttttcttgtgttgattgtatatcacagaacttgtgtgcaatatgtctagaccctctaaactacaacagcaaaggaagcaacagcccaagccaagcaatttttacagcacaatgctcccacgcctttcactttgcctgcatttcttccaatgtccgacatggcagtgtcacctgccccatttgtcgcgcccactggacacagctcccccgcaatctcaacgctccttgtgcctctatcaaccacaccgaccccattcttcgaatccttgatgactccattgccacattccgcatccaccgccgctcattcatccgctctgctcgctatgatgatgatgacccaattgagcctgaggaaatgtctaactgcccacgtcttcaactctctctagtccccatcccgacgacctcaccaacgaactaccaaccgcccttggcaatgcctctcagtcgccatttacaatcctcaacttgctcttcttcctcctcatttctacaaacaaacagagcctatctgtctgtgaaacttgctaaccaacgagccacagacttggtcttggtggccagccccaacgggccacaccttagactcctcaagcaatgcatggccttattagtgttctctcttagaccaacagatcgtttggccattgttacatactcatcagctgcagctcgagtctttcccctcagacgcatgacatcttgtggtagaagagcagctttacaagtcattgatcgccttttctacatgggccaagctgatccagtcgaaggactcaagaaagggatcaagattcttcaagatcgagcacacaagaaccctgaatcaggaattttacacctatctgatagtcctacacaatcttaccatgcttcgatgatgaacatggaagttccaatccccgttcatcgttttcacgtggggttcgggtatggaacatcaagcgggtacatcatgcatgggttcgaagagtttttagcgggactactcgggggagtaataagagagattcagttgagagttagaacagggaatgagtcagcaaatgggatggttgtacgaattggggagctaagaggagatgaagagaggagagttttgttagacttaggcgagagtggacatgcttgtgttgagtatagttacagtgaagacgtgggagaagttgatgaacggttcataacaggggaaactttggtgagtattggagatagtaagagtgatgcagaggaatctggcttggccgaggaggcggaggaggtagcgggcggtggtagcggcggaggagggaggaaggatgctattggtggtgggagaccaagtagtgtagagagttgggattaccatgatccttatatggcaagaagatgggctaagcatttgcatggtggatataggttttgaagtaatctttacaattacttatatgcgtgcatattgccatatatttgaagcaaattattattctctttggtatggatttgtacattttcattgaaaaacattttagtttttacatggctgttgcttgaaaagcttttcaatagggatattataaacatatttgtttaatatagaatccccaattaattttatggaactaatttacaagtggagaagatatcatttatcaaataattttattgttaatttggtatttctaaaataaaaaagtagctactcccaatgggaagtgattgcatataaaattaaagacgtcctttttaaaatttaactatccatcttcaaatcagataactgagaaaaatgtcaagataataatataaacacaaacaggaatatattttatatcaataacgtagcaagatagttttctttcacttttttttttttttgagggattctttcacttttaatgctaatataatagtaataatgaatatgaaatattttttctctgttatttgttaacagcaaaagaattatatatggtgaagctaccaagttagtgtagtgggatgggagttaggaaatggggtgaaacccaaaattcgagcctacaattttttcgtaataaaggcactgtagtttttttttttttacacaattttatggtttttatacaatatgtataaggttaaaaaaaactataaggtatatcaaaaagctatagattaaaaatataaaaaaatcaaaaaaaaatgaaatattttatgggaaaaccgtataaggtaatttttgataaaatcacactaagataaggtaattagttaccctaaattatttttctatatttttttctttttataaaatatttttgtttttcttttctcgaaaataagctatatttttttataaatttttgctaaagctaattatattaaaaataataatggtgatcctcgtttatactggaaaaactgttgattgggatatgcaattttgaatatcaaaaaagttgtttaaattgtactacattatgacaaaaatacaaaaaatttaaatattttaaatttatcaaaagacatatatatgctagatttatgtaattaagattaagggaaatttgattttctatacttagaaaatcaaaaaatttgatttctatgccaataatttaaacccaaaaaaaactataccttttttttcaaaccccaaaaataccccctcacaatattctctctctctgcatc

SEQ ID NO: 298869 - DNA, 2884 bp, Cannabis indica
gcagtaggaaatagagacgttaccagttgatctgtagctggaagcttcaccaattgtgtatggatcttgaatttgaaagtgcaagggcttagctttttctgaggcgagctacaagacggactaccccatcaacgtaacgggggaacctctataaaatactgtgtttgattctctttttcccctaactctcatctgcatattcattcattctcacatttgaacattgcatgcatcttcaataaaagaaaaaccctgatcactttttctttgttttgtttttggtaaagttaaatgtttaatcaaatgctttgtgtcaaaagtttgagtgtgatacgtggacagattgtgtccacttgctgaagtgtgaaaggtcaagattgaccttgtgtttgtgtgtgtgagttgactttgtgtagggataggactgaaaaatcccaaaaatatcaaataatataaaagttatcgattttttatcttcaacaagtctttaaaatctacatcattggtcaattttattctgcacatagcaaatgattaataaattttatcatataatatatgtgcttgaattctcaaaatttgacaagaaattaccttccataatggataaccataaaacaactcgtaggtgattctatttcttcttactacacagtcatttccattagaagagttgctattcttctttgtatcaattgggccactactcttttccattatactatgctacaaaattaattttaattattttataagtttaacaacaaatcaatataaaatatctaattagttttgagtaagacttattatgaacagaacagagtaagagacaaaacaaaattacatcttttagtctcattagttttagtcaatacagtaaaattatttacaaaataatgaaaaattaatatgcaatccatttttaattaattaccgccgttaaaaaactaaaattttaacacaaatagaagcaatattcacaaagttttcaatcccacaaatacaagcagagttcgcaagaagtaaactttgaaaaatagtttaacaaaattgaagaaaatataaagattcaagtcacaccaaaattcctccaaataaaaataaaaataaaagagtggattacagaagaaaaaaaaaatcaatctttgaaatggttcctgtaagaggctcggttgctttttttctttttcatcatttgtgaaaagaaaaaaaaataatcacatgtaagccaaaaatacaattacaacccatacacaaaattaataaatcacattaaaatttgagtgcgtgagagagatggaaagatatgattcagatcttaagaagaaaagccatttacttactagctaggattccagtgggagcttgaactagagttgggatggtgatgagagcttgggctggagaagagaagagatttgatgaaggagagaagaatggaaaatgcacgaaataatttcaaccatttatttatcaaaaaaaaaaattgaaccattttttatgtttataaaactattaccgacgaagcaccaccgatataagtggatccaactggtaataggataaatggtcaagttattattctattagcggcaggatctaatggtaaaagtctgctgctaattattttcaaaataaaaaaggtaggaattttcctgcacaaatgtacaccatccaataccgacgggacattccataggtataaactaaagtctgccactattgtttattttaataaaaaaaatcattcaagattactggaggaatagtggatccaccagtaataattccattaataggggtggacatgctccgcgggtaatgtgtccgctcttatttctaatttttcttgtagtgtgctaagtgtaatttttggagtcattagtgttatgcctgaaagtttgccaaatgtaaattccaaaatgcacccaagggaatgtgttggtacgaggaggatcaaaggaacaggtcaagctacctgtgcccacacctgtgcgctcaagctccgtgcgcccatgcccatgcgcccagcctccctgcgctcatgcctgcacgcctagcctcctagcgagcagccctcttcgcgtgcccagcctccactccatgcacgcccaggctccccgcgagcagccctcctcatgcacccagatttcccgcatccactcccacgagtagcccctcccagtgccccctttaccctctttttttctcctcgtacaaatagcctatgcacataagctcaacatgaatgtcctgaatgtttacaaaatattatgggcatgggggtgaggattaataacttagaccaaggctttgcgagcaagagcgtcagagacaagatagcgaccatacagcaagtacagataatggaggcaaagtttgcctcactcgaagtacaaacggtagggagaacttttatcagggaggttaggcctggtgcgtatggtctttgggacagatgagcttattttgtatagtcgctgggcgacaaaattttgtaatatgcacagtaaaacttttataaatattttcgtaaacagaatctcgatataatacaagtatgttatttcggtatttattagtaaaataaagttttaattattcacgatttttgataaactcgttgattagcaatgagctgcacatttaagttaaaaatcatgttaacacgcctaaaatagtagggtgttacatagaaagtttatttccattaccaacagtaagagtttctttaccattgtatttgcccttttaattcatgttgctagcatcagaagtgacatgattactagccccactctcagcatactgataactctaagatttagagttattttcatatctttaagcttgaatttaatgtgaattgtggagcaattaatgt

SEQ ID NO: 298870 - DNA, 1894 bp, Cannabis indica
cacatctctgtttttctacaaaactaagaaaatagtgatcttagttctcatttatgtcgatgatataatagtgacaaggaatgacgctgacagagtaaatggattcatcttcaaactcaacaagttgtttgctctaaaagacctaggacagttgtatttcttcttgggcattgaagtttttagagatgacactagtctgtatctgacacaaaccaggtacattgaggacatgctgaagaaggtgaatctgagtaatctcatgccctgtcctacaccaattacagctggtaaaccattgtccaaaaataagggtgaactaatccacaatccttctgtgtacagaagcatcattggatctctccaatatctatgcctcaccagacccgacatagcatactcagtaaataaactgagtcaatatctgcagggtcctaccacagtccattggagttccctaaaacatgtattaagatatttaaaaggcaccagaactctgggactccatattagctgcagcaacagactgaacctcactagttttttagatgcagattggacctgctgccctaatgataggaaatttgttgcaggttattgtgtgtatttgggagaaacagtggtgtcatggtaatctaagaagcaagttgttgtttcaagatcaagtactgagtccgagtacagggcccttgcaaatgtatcagcaaaaatctcttggatagagtcactgctgaaagaaatcaagtttcctcccagtctgccttcaattacttagtgtgacaactttagtgctagtgcactggcttcaaaccaagtcttccatgcaaggacaaagcatattggaattaatgtacactatgtgcgtgacaaagtgctacaaaaacagtgagaagtcaggtacatccccttacatgatcaagttgtcaatttgttcactaaaggcctatcgaactcaagattagtggtgagcattggtcggtttggtcggttttttcttctttaaaaatccaaaattcggttttcgattttaacggttaaaatctgaaaaccgaccggccaagataataattaaaaaaaccgaccatttattgaaccgcggttttctcggttaaaaccgtccaaaccgtttttgagttctctttttatttttttacacggtaagactagcatgtagaagttataaaagatatatttaaaatttaaattttagcattttagaatctaaaataataacaaatttcaacaataaaataggcaaaaattagatttaaaacgatatgaatatatgttactgaagtccactaaaatcaaataactattgctttatattgtaaattcaataacaaatttaaacaacaaaaatgaataaaaattagatctagaacaacacatatctgccagtccactaaaatcatagttaaatatatacaaagataaaattagtgaattgaataatataaaagatgttgaatatatacattaaacaagaaaagcaaataataatagatctaatgccgcaagaaaaataaaattgctcttcttctttgttgtagagaacagatgctaaccattgttttctttttgctctagttgttatggtgccataaaatggagagaatggatgagagatgagagcatacatgcaattgatgagaatgcgagataagtgagagagagccactcattgtgattgagtagtctaagtctaagaggctctctatggaggtggatacattgaaggcagctttaagatagagaaattaggggagaagaatcggtgccctagaatatactagagtaaatgacttactttcttccaaaaaaacaaaagtaataaatgagagtaaatgggtgcattgggattaagcaaaaaaaaagaatgggtgctttgggaaac

SEQ ID NO: 298871 - DNA, 2015 bp, Cannabis indica
tgtataaatttatattgtaaaaaaaaataaataaaaataaacaaaaaaaaaaaaattctgtataacataatttattatacagatttatgattataataaactagattataacattttcattattatagtaaaattttgaaaattcacattacttaaaaatttgtatgtaccaaatactcaacttaatttttttcacagttctgctacagtttttttgttcacaggacgtctacaattgtttttccggcagtacagctgtatcaaacttgccctagatttgcagtccaacgacttgtcgttacaaaacgtatgggatctgttttacgtcgtatagtcgaatttcggaagataagctgccttatctatctacactattactctcccactcccagtcccaccctctctcacttgcacgaaaaccaattaccactttatgaccaaaaatggtttccaggacatttgcgtttgcagctcagtcttccttttactgcttttctgatttgcccaagctaaatccctccaaaatctcccctaaacagactccccacaggagctccagttttgctaataaccaccacaatcgagttccatggctccctgaacctaagctcaaacggttgagttctgtttgcttctttaatgctggggataaatccaaagatggtattcaaggcaaggaggtaatgttttttcgagcttaattcgatgattggttttgggacatttgcaacttgacatcttacaataaattgcatttgaatttatgttagaggaagttcctctgtatgttaattgttgagcgtcaaggaatttaaagattggaaaaataacgcttataccttaacaaaattgtcaggaaactgaattaggctggccgattctggagcgttgggatgtgccttggggttggcaaacagcgtccttgacctccttcgcctgtggattaaggtgccatttttattttgaaaaacaagaacagtgctattttgttatttattagtgggttcattggtttctagtttttgtccttttggatgtcaaaggaaatgatttttttccaggcagttttgttttgacaggattagtagaggcagcagctataccctacctaggacttcgtgttgaagaattgagtttagatgagaaggcagagattttgtttcttgatcaagggtattcgtactttggctttgattttgtgtcaatattcagtatcttataatacaagaaagtgtaccctgcctattatgaactacttgtattgtggtatggaatatgttatactatatctttaaaaatactctctagagaattggaggttttgaatatgttatccttgtattattgcacccttgagctgatttggttattgttttgcagcattactactgcagtggtacttgcagttttatatggtgttgctaactccttccaaccgctacctgaggacatgtaccgctatggtattgatctttccaatcattcttttttattcagcggattgtttttattcatgggtgaattcccccccttccccctctttttctttttctgctgttattttcctatttggttgcattaaatgatcttcacatgaatgtgtggatgttctgttaagtttcccttgacaacttcatgcaaaaacatgttttgtgtttatgtatgtagtgcatattgccacattattgtttctttatcaaatattttcattgatggttcagcagtgtaaatgattccattgaaatgatataaaataccatattgtttcagatttaagggatccattcaatctacggaaagggtggcttctgtgggcaggcatcggtcttgctggtgctatagctgccatttcattaacaggtgttgccgtgtcgtttttcagtggtgaaacccctcaacgagaggttaggagcttctgatgcttagtttttacttctttctttcactttagatgctgacattgtaataaataaagatttaagggctcgtttggaacgccgtattaggtcgtattg

SEQ ID NO: 298872 - DNA, 2040 bp, Cannabis indica
gagatgtcatctttgatgaaacatctttcccattctccactctacctaaacagaccacagactcctacacatactcagaattctacccctctgctgtcattcctacactgagtcaatctcatcctgttaatcctgatctcagacctgtaatcactaaccaaactgtgccaattttggcaagttcttctgtgcctgtgcaggttacaattccaccagcaagcattactccagctgcaacttctgcaaattcccattactacacctgacagtaatgtttctttacatgagaatactgtccatcaagatatcaccaatgatactcaacaaagcctggagttccctggagttctaaatgcctctgatgtgtcaaatattgctgcaacacaacctcctactgctgttcctgagccaattgccactactagctccaatcatgctgttgctactccgaatcctttggccaatactcatcccatgaagactcgggcaaagtcagggatacacaaaccaaaggtctacatgaccattaaaattcctaaaacagtcaaggaagctcttcaagatgagcagtggaacaaagccatgtctgatgaaatgcttgcattgattcggaatgccacttatacattagttcccttaccacctggtcgagaaccaattggatgcaaatggatttttcgacacaaagagaactcagatggtactcacaacaaatttaaagcccgacttgttgcaaagggatttcaccaacaaccaggatttgatttcacagagacgtttagtcccgtggtcaaaccagtcaccatacgcattgtaattacattagccttatctcgtggatggtgcatcaaacaattagatgtcaataacgcgtttctcaatggtgatctcaaagaggaagtgtacatggtacaacctcctggttttgaagtgcaagcttctcctcctcttgtatgcaagctacacaaagctttgtatggactcaagcaggctcctcgggcatggttcgataaattgcatcattgtctacttcaattggggttctttccatctaaatcagaccactctctctttattcagcacacatccacatatacaaccttaattcttgtctatgtggatgatatcctaatcacaggaagtgatccgaaagttgttaccaacatcattgctgctttgaacaaccagttttctttaaaagatcttggtgatcttcattactttctgggcatcgaagttaactctacaccagctggtttacatctttctcaagcaaaatatgctcgagatttgcttattaaaggtcaaatgcaagaggcaaaaccttctccaaccccaatgaccactggtgtacgtcttttagctcatggcagtgaaacaatgtcagatcctcacctatatcgctcaattgttggtgccttacaatacttgctcatcacaagactagtgtgaacaaggtttgtcagtttatgcacaatcctttactcactcactggttagctgtaaaacgaattctcaggtacttgagtggtacaatctcacacgacctgcatctcaaacgtccttcagatcatgacatcattgccttttgtgatgctgattgggcgaccgatcccgatgatcgacggtccacctctggtttcaccatctttttggtgacaatttagttgcttggcaatgcaaaaagcaacaaacggtctctcgctccagcactgaagcggaatatcgcagcttggcaagtacagtagctgaactcacatggattcattctctttttacagagctgcgcattcaacttcctagacctcccacagtatggtgtgacaacttaagcactatccttctcaccgcaaatcctgttcttcatgctcgcactaagcacatcgaactcgatctctactttgtgcgtgaaaaggttatgcaaaatcaggttcatgtcaaacatgttccagctgtggaccaacttgcagatggcctaactaaagcaatctctagtcaacgttttcccctctttcgatccaagcttacaattcaagatct

SEQ ID NO: 298873 - DNA, 2756 bp, Cannabis indica
tgtcccctcttgactggtccacgtatattgggcgattttaggagcaacaacatttttactgtattaaatttttaaatatactattttcaaaattttaaaaatattttgtttcaataaataaaaaaataactatagaacacttaaacaacaacatgaaaataactataaaataacaaatagtcagctacaaagcaacagaaaaataaaaagactttaacctctttgcaatattacgaagttatttattttttacttaattttgataacttgattaactttttatactactgtattattttttccataaaatttgttagttattgttatttgtgtttccggataggtggcagatgtaattttaaggtcccaaaatcaaccaagacaagagcattcaatggcccaattaagccagcgggtcagcccacgatggagtccaagcaggactttggatctaactacaggccgcctctaatctctataaggtcgggcccttttgggccctttttggtcccgggagggaaactcgtctaatgaaggaaagacttaatagaacatatctggatgccctcacggggtaatccagaataggcagtcgaagaggtgtctgggtactgtcctacatggcacctttctgacactgaatcccacaaaatcagggatttgtcccctacgtcagacatgggaaaggcgcacaacacaaaaagctacacaccttttctccaacatccactaccctgacatttacggtacactgtcgccatcgcatgcccacctgtcaccatcaaattgtactatttcgaacggacggtgattatctctcaaattgggcccaacctactcgacccaatgtcaatataacaatgtattttatcccattagtggacttatttccatgtacaaaaccctcataggtctgagtttagcagaaaattcagtttcagcctataaaatcgggctttatcccttctcacaaagggttacaaaatcttggctagaaatcctattaaaatttggcaagaacacttatgtaaaatacccaatagccaaagagcttcaataatattgactcgtggactaaggctcattaacgtcctaaccacgtaaaaaaaaaattcttctttactttaaaatcatcttttcttagcttaaacttttattaatttgagactgaaaaatctcggtaaaattttggtatattcattgaaagttgaggaaggtagtatccactgttgtaatctacaataatggttgcagctagaaacataatcatcaagcaaaatgctcgttaagaccatgaagatgctaccgctgatgaagagtcaaaccagcaccctctagcgaacgttcaggcgggcatcatagaggacagagagatgtcaggggtgggtaggcatccttctcaaaaaggtcatcaacatgagaaaggcattgacaaaactcccatcaacaaagatgaacaagaaggccacgatgtggaccaacaggattactatggcaatgattatgacaaaaactacgaagaggagtattatgaggaagacacataagtggtgtggctaagataaatggtcttagatcaataaaggaaaacaacaaaacaagaagaagctacgcaccagattaaagaaaccctcatacagctaaaaaacatggtagtaaaagagaacctcaatgctgaaaacccaccagtgggaaagcctaaccatcctgggactggaccctctaatccagttaaaaactagggaaaattcaaaatggctaagccccagaggaagaattatccgccaaggcccttgcacaacactccacaaaataataggaatatgactgacccactcctaagggaagatacgaccacttgaaccctaggactaaatcatccattcgatccgtgaagtagattcgaccaaaagaaaggcactgtactcagctaccgaagcttgacgttcggggaaggtaaaaccattccaataattctatttaccaaagtattgatgtaatattcgagaaatttaaatgtgattaattaaagcatattttataaaatatattaagggaataaatgagtaacattattatcttactagattaattatgtgataattaggattttattataaatgtgagaaataagcgtaatttattaattatgaaaattttcttacgatatgtgagttataagcattttatttgtgaaataaaatatgtttaggtccgccaattgtggaaactcgattggtatgctagaaatatcacaacggtattagaatgtgtgttcttaattttggaattactggggtattgtgaggtaattggttatgactattttatccctagttttggaagctgcttaggaagcaagtaaaggtagttttgttattttattatttaagttaatccttaaattttgtcttttagtggttttctagagaaaaacttaaggtttattgctgaattgggattaaaatgagaaatttcatcgtctatttttattttagataaacattaaccctaaaacaaaaataaatcactctcgctttctttccttatctctctcgactaagaacaacttgttatcccaaattccgcacagagcgatgtggcatccttctaggtgacacgtgtagaaaattttaagacctggacaggtggcactagtccaagttgagtgccataaaggcaaccattgctcaaaaggagcaaggatgtggggaagatgatgaagatgaagattgcgcccacatgagcgtcgttcg

SEQ ID NO: 298874 - DNA, 4627 bp, Cannabis indica
caattgttaatactaattaaccattcttctttctcctatttaatgatagattataaattaaccttgttgactcaaaaatttggactagatttttgagccacacccgctcgttaaattggtgagaatgaataagtagttaagtaattgtaagagagacacatcaaatttatagtagttcactccttgtattgtgacagtaatggagctacgtctaccaaaactagtacgactagagtattgagtgcagtttggtattatggttaattgtgcttagttaagaacatttgagactcagttatatgtattggatgtgggtagtagacttataataattgggtgtatgtatactcaattacaagtcagatatttattgagttatgtcatgcttttcttactgagtccgtcgactcacagctgcttccttatgtgtaggttatgagaaaaaagaactgaacaatggtggttgaaggtcttcggtgaagattgaatatctagttgacttgatctagagggttgagatctatgaaagatttgctggcgtaactagtgtttttgtcgttagacgatatttttagaatattatgttatgtatgtatttcagttagaaacgggatcccgattgtaaacttttaaatcagtttattttaataaaattttaattattacagattttttgtgcaaatcacaccttattgcaaaatcctttgactagaaatggttagtacaatgattagaaaatacgtaatgtgccttacatactagggcgttacataaggccatccttctggtttgaaaaaacatcctttaaataaaaatttgtaattcagacattatccttgtccccattttcattgcattgtctgccattttactaagcaaaagaaattgcatttctttctttgaaccacattgctgaaaaatgttttaatcttattcatattgatatttgagggccattaaatactttcaccacataaatttacaagtatcttattactattgttgatgattgttctagatttacctagattaatctcattaaacaaaaatttgaagctaaagttacccttccaactttcattcaactagttaaaactcagttttgtgttcaaataaaggaaattaggtctgataattccaaggagctacaatttcctgagttattcaatcccttggaataattcattatcactcttgtgttaaaagaccacaacagaatctattgtggaaagaaagcattaggacttactcaatgtagtaagagctctttcgtcccaatcctatcttcctttatattattagggtgaatgtgtctacagctgcatacctaattaaaagaattcctagtcccaatttacaaaaaaaaagtccattggaggctctttataccaaagtccctagttatgaacacataaaagtttttagatgcttagcttatgcatctaccttatttgcttctaggactaaatttccccttaaagaagtcccttttgttttcttagggtaccccataggaatgaaagcttataaaatttttggatctcaacaccaataacttttttcatctaggaatgtgcatttccatgaacaaatgtccgcctttgttcaaggtactaatttagtagttgtttatcagattttttttctttctattatgcctgtttcatcttcatctttacttgatctatcaactttctaatctgatgtttctattattttctctccaccaactattgtaaaaccaactcaagtttcacacaagccatcttatttgaatgactatcattgttttttatctactaatcaatcactggatcctccacaggtgccttccctaggtactttacattctttatcacaagttcttgattacaacagactctctccatcattcagagctactatcttatccatttcaagtcaccaagaactagctaagtgtagtcaaactcaagggattgtagaatgaaataattccatggattctaatatagatgccttagaagccaagttacgatcaaccatccactctcgatgattgttgactcaacattgtacttgatttgtagttaatttacctcctaatcaacatcatatatgaagtaaatgggtttacaagatcaagtttaatgcaaatgataccattcaaaggtacaatgctagacttgtggctaaaggctaaaaccaacaagagggatttgattgcacatatactttttcccttatgactaaactagttactatgaagtttattctagccttatttgctattcatgattggatgttaataatacttttctctaagatttgcatgaagataccaattactgctgtttgcaaactccataagtctctatatggccttagccaggcttctaggcagtggtttgaatagcaagtttaaattgaaggatttgggaaaattaaagtacctccttggtctatagatttctagatcagataaatgaatttttgtgtctcaaagaccttatgcacatcaagtgcttgaagacttgggataccttggacgtaaacctgtaagtactcctatggaaggaaatttgaagcttagtaaagatggtaatcaagatgggaaaggcaatctgacagatccaaccttgtaaaggaaaatagttggaaagcttcaatatttgaccataaccagacttgatctatcctattcagtaaataggtatgatcagattttttagttaatccaaggaatagtcacatgaagacaaatcaaagagtttttcaatgtgtcaaagcaagtcctggtcaggggatcttcatgtcagtaaactctcacgttagattgaaagtttatacaaattcagactacgtagcttgtcctatcaccaaaagatcaacaagaaggttctatatttttcttggggaatccatcatctccttgaaaagcaagaagcaacacaccatctttagatcctctactgaaggagggtacaaagcaatggccaacaaaacatgtaagttggtctagattctttatgtgctggaagagctgaagatcaacatgaaggccctaccattttacactttgacaacaaaattgtataacacgttgcagctaatcatgccttgcatgagaggactaaatatattgaaatagactgtcacttggttagaaaaaagtgcataaatctgttatcaaaaccaattatgtttcaagcaaagatcaacttgtagatattctaacaaatcccttatttcgaaaccagttcaagcacctcaaagataagatgaaattgcatacatatacattttatcttggggagtgttaaaatttggtcagttaaaattctgttaggaagttaagttgttagtttgttatggtaattagtaactattatccccaaattttggctaacaactagaagcttacacgtgtagcacataaggaatatgaattagcttaataatcatattattaaatgaaatttaaataaattgcctaaaggaattatggatggtagaaatattcaaactcgctcccatgtaggcagatgcgagatgagaataataactattacctgttaagattggtgagataataattctatctcgggataaacagagtatataataaaaaatgttcaaagatgagagaaccaatagcttacagctcattgacccacatatttatgtgtggagagaaaaactatattcatccatctcattctttacacgttaaagtaaccacctcgctaataccagcaaagtaaacgaatactgggaggagcattgtatttatacttagcatttttacttcaaagataataaagaaagacagctcacacttagagaggaacaatcgacatagtcagcataaccgtttaaggataatcacaaaagaatggttgggcaattgttaaatattatctcatatgcatgaaaatgaaacgtcgaaaatattcacgtttcatgaacagttacaaatgattgaacccaacggaataactgttgccctatacacctataaatagggacagacctcagggtaaaagggacggctaatttcaaggagaaagagcaaggaattattattactgatattattgtattatatattccaatcattatctctaataagatggactcgtggactataaagaattaacttcaaaattacgttaaaaaccttcttgtgttcatttattatcgtaattaaatctgtggtatatttattataaaaaacttatatatttggttaacaaaatctatgttaacagtaactatttgagtaggattagtaactaattggttactggtttagttcttgagcttactacctctagaaatacacatacattgtaattgtttcattctagttaataatgagaatcattctacatattctcacaatctctatatctaataatactaactataaataatgataatttttctcattatttattattgacacttgataaataacttgtcatgaccgctttagtgatttgaattagtaaaggcaattaacactaatttttgttattttatgattatttatgaaattaattatttgtggaccccaatatttagaaatgagtaatagagttataatttctcaattccgaagattttattaaactctaggggtatt

SEQ ID NO: 298875 - DNA, 1543 bp, Cannabis indica
tattgatcattgttcatttatttccccttatgaatctcaacatcttgcccttaataatttgcttcatgtgccttcaatcaccaaaaaaaattcttagcgtatctcaattcgctgatgacaatggtattttctttgaatttcaccccacttacttccttgtgaaagaccattttactttgaacattttaatgcataagaagcttgataatggcttgtataagtatgactcatctcaacttcatcttcttgactccaaccaataaccctccaacctgcattaagttcaagataactccagtactaatttattcaattctcaatgtaactcacacactttttcacaaaaagataattcctttgagttatggcataaaagacttcgatatccttcctctaagattgtccaagttgctttatctctttgtaatatcaagttgaatcataataaaaataattcttttatttttgaagtttttcaagcttattatttgggtaaattgcataaactaccttctccaacttctaccacttcgtacagtgagccactatagttagtacacaaagatttatgggctccaatacccataacttcttcaaatggatataggtactatataagcttcgttgattctttctctaaacatacttgtctttatcttttgagaacaaaatatgaggctttgtccaaatttataatcttttaaaaccaagttgagaatcaactaaacactaaaatgaaattaatccaatctaattaggggtgaatatcaagccttgactagttcttttgcacgaatttggtatcttacatagagtgccttccctcacacacatgaacaaatggagttgttgagcgtaagcatatatacattgtgaagagtgccctaaccctactagctcaagcctcttttccattaaaatagtaggatgaagcctatagggcaacaatttttgtcattaacagaatgcctacacctcagcttaaatatatctcctcaatagaagtgttatttcactccagcccaaactacaccattcttaaagttttaggtgcctttgataccctgatttaagaccttacagtagggtgaaactttaatataggtcacaactctgcatatttttttattacagtctagcccacaaaggttataagttcctagccaaagaaggaagagtttatatctcgagggatgttctatttgatgaaaatacctttccttatttatgtgcatcatctaaggattctgtcataactcaacaatatgatttcatgacaaaaacatctcttcatgctatttcatctcaggcaactcaacctattgctaccaatctctctcattctcttccaaattgcatcccaaccactcaccccaagcatctcttctcaatttgatacaggaccgatattgtttaataatgcacttgtatctaatattgttccagcacctattgttgggttttataccctaaataaaactcatttcaatataatcagatttattagttaataaagatcagaaataatattttatgttgcatg

SEQ ID NO: 298876 - DNA, 3058 bp, Cannabis indica
ttaagtatataaaatcaaaattttctaaattaaccttcaagactaacagtaagttgtccggtagtgtacctccgaattaataacaagctatccgggagagacatttcatatacggtacaagtttatgtggaagtactttccaaattctacaaaaccttctccataaagctttctggatttacactaaactttcaatacctactctttgaatccacaacttccaatcccagacaacaaaatttgtaactataaccaaccaaatccttaccatccagatcattaaagataatagtttccacaatatataatcataattgaaataatatttgtgtgtgtaagtattaatttatttatgcatggcctgtgtgtctgtgtgtatgcataatatgagtagttccctttacttgcgcaagtttgtaacttgttctccacataaatctaacttaatcatatataattaatgtcaacggatagtatatatagcctcattgagttgagttgtgaatccatagataaataaagagatatcaatgtgacaatcatgtgtatgtatatatgtatttatataattctctactatactatacttttccaacggatttctattgaatggaattgtcagaaaagatgcttgctttaaataaataaaaagaaagaaagaaaagatgtttgcttgctttatgaataagaatcacttatatgcatgtgctagtaccaaaattcagaatcctatatagttcgttttatcacatcaaattaattaccaacaaagttaatcaaaatcaaaacttgattaattattatagctaagctaacaacacaaattacaaattcatcttatatttatctttgcttctagataaagataataaaagcaaattatgaatcatttatcaagtggaaagaaaatgtcacatgagctaggtaccacctgtcatatcacgtaatttggttggaaatgtttattgaagaaatctacatcatttaatgtacatgctctttcacacgtaattacttcctttcttagccatttcataattctacaccaaaaaaaaagaacttttagaaagagaaacaaattaatatgactattttgagttggaaaaaaatgaagagcaaggataagattaagcccccaaattgagaacaataaataaactttaaggctaccacggttaaaagtcatggtgttcttgttcaaaatcaaattttcaactcccaacaaagccaaacgtgttatctcatgcaaagtttaaaaagaaaaaatggtaagagtatgaaaaagggtatgagaagataggacttgtggtccccccaacccaaccacgccataatccacaaatgactatagtacctttatttatttttctcttaatttctttgtgtctttcattcaaacttggatctttgaaatgcttgactatctgggccttattattttcccctatctcgagggttcaaagtttgaactttcaagaattcaagtgacactaattttctttggttatgtacatttgttgcctcttttggcacagtagtggaaagtagtgtccccatgcctattccttcttttcttgctctgtaacctgaagcttctttcttcaaccgaggcactttagttacatatttttttataccaaaagccatactcttagtggaatacaacagtattttctcttcttcttttcttatacataatattttattaaattttatcacttatacaatagtcaaactttgatgcctaattagctggattttttcgtgtacataactacaaataattcattaacaaaggagggaagaaaaaaacagtactatgggaaaatttaacatagaaaagaattttaagtcaattgtaataaaaacaacatcatttgtaaatatcaatatcatacaactgtagtaaatcacacagtttttttttttttttggttggtggggtatgagtctaatagactgattttacaagaatatagatgaaatgaaccccacttatatttggtatttaaattaaattaaattgcataaaattaatctaccagaaacagtgggaattactgttattgcacttgatgtggttgttgttgttgttgtttaagagacgaacaaatcttcttctcctgtaagaaaagccacatctgaatctaaaacaagccaactttctgaatctacgagcagatttgagccttagccatatgaccctttttactcttaccaaagatctcttgatcctttcactcaagctcttttttctgcaaaactgatagcttcttagaaaaacttgccttttttctatcattgtagagttaccattcaagttggtatagtagtaattactactactattattattgctttgatctaagtagttgtagtaccctgaaccaaacgactctgtcctactcaaagtcataggacctattacatattggctctgtcccaaaacagccatataagaaaaaaattaaccagagataacttaatcactactactattactatactctttttaactcaaaaacccagaaatcaaagtttgcttctttcttcacctctttgctgaaaaaacccagaaacaaaaatggaaaaggagtatgagaaagagaggtttattgggttttctctgttctgctccctatttactgaaaatcccagaatgggtctttgttggagagagagaaaagaaaaaaagtaagatatatataaaggattagggtgatggtgaaaaagggtgttatatgtaatatgtgtgtatgtgctgtgttgataatattacattgtatatggtatttgcgtttggtttgctgtgtaagcgagcagtgcgccgccacaggagctacagccttaggcttagcctatatatatatatatatacccaatgaagactccaaagaccaaagactgcctttacttactttacatttgtttctattttgtcttaattgaaatttaataataatagttattattggaaggtattttctgtttgggaaattattgatagatgatattgattatacttatactaagtattctatttatttttattttttaa

SEQ ID NO: 298877 - DNA, 2795 bp, Cannabis indica
gttattgtggatactctttggttagatttgtgtccttcgggcggagttaggaatctacccattactcactccgatcatggagccatcctctttgatacatgctggaacagacggaaggggtataggcctttcagatttttgatgcctggttgagtgagccttcttgtggggaggtcatcagaaaggcttggcatgcttcttctatttctgaccagtcctgtcccctgaataagagaatcgggagaacccaatatgctcttcgcttctggagtaaaaactctttcggggactgcgaccgcagcatcaaaaatcttgaatctcagctccaaactcttcaatccaaagatgcccaatcggtggacttagaggctgaaaacaaggtactacaagatctcaatgagatgtggaatcgaaaagaatctatatggaagcaaaggtctcgggaaaactggcttatgaaaggcgacagaaactcaactttctttcatgcctctactatggtcagacggaagagaaatcacatctggaatcttaaagatggcaacggcactctccagtctaatgaaagaaccatgggaaatatcctcaacaactacttccaggaacttttctcttccaatggaaattctaattttgaagggctagactatctcattgaaaattcggtgtcccctgtggacaatgatctgctgattgctataccagatgcagtggaaatccaagaacatgtctttcagatgcacccctcaaaggcaccgggtccggacggttttcctgggatgttttatcggaaatgttgggattttgtgggtgaggatgtcgtgcgcagtgttcaacatttctttgcttcgggggagttggagtatggccttaatcacacttttatctgccttattcccaagggagttaatcccaacagtgtagaccgattccgcccgattgctctatgtaactttgtatacaagattattgcaagaattatatcccaaagattgcgtctggttcttgatagccttattgccccgattcagtccgcctttataccgggaagatggattgctgaatcctcaatcctcacccaagagatcgtgaatgtcatcaagaagaaacaaggaaaagggggccttatggcaatcaagatggatatgaacaaagcctacgatcggcttgaatggaatttcctcaagaaagtgcttgaattgtttggcttctgccctcattttgtcaagatgatcatgacgtgcatttctacagtttcttatgctattctgcttaatggcaaacctttgaagagatttgtgccatctaaaggtatacgccaaggggacccgatgtccccctacctctttctgctttgtaatgaggttctttcgagactggtttttcgtgagcaaaggctgggaaacatacatggcatccgtctagctcgaaatgctcctgagatctcccacctcatgttcgcagatgataccattttctttcttcgggctaattctacggaagctagcaacttaaagaaatgcatcactacctttgagggttggtctggccagaaatgcagcaagcaaaaatcggggattcttttctcgggcaattgcaccgggacccttagaagagccgtggagggtcttttggagtttgggtgcatccccgactcggagaaacatttggggaacccattcactttcaccagaagcaaaagaaaagacttcaactttctaatgtccaaactctgtgagcgactggaaggttggagattgagatctctctctaaggttggaaggatggtgttcattaattcggtggcccttgccatgccttcctactcgatgtctaccttcaaattgtcggtttcttcttgtagagatttggatgcgattattagaaggttttggtggattggttctcttgacaatagaagatttctggccaccaaatcctgggattccatctgtcaaccgaaacaaagaggagggcttggctttagaagattggaggatgtgaatttagccttcctttctaagttggcttggatgttggccaccaaggtggatagaccttggttctatgctcttaaagaaaagtactttccacgtgattccttctggggtgtgattgaaaaaacgtcggattgttttgtgtggaaaggtattttgaaggcacggaatgtcattgcaagtggtgcttgtacggtcattgcatcgggggaggagactgatgtttggtggcagccctggatcccatggatggattactcaagctttcgtgatctaatggaatccattaggcacaaagccccaagtttgaaaagtgttgctgatctcatgtacagaagaacaaaaaagtggaacactggctacctcaatttcctttttggttctgatatcggtgggcagattgggaaaattcagattgcaaaagatctggatcgagacactctcatttggaagcagtcggtttcaggcaagttttctgtcaaaggtgccttttgggaagcccaggctaacagatttggtgaaccaaggaaaatatggagttggatatgggatcactctattcatccacggctgagtatgatgctgtggcgggtgtgtaccaactccctacccactcgtgacaaagttggttgtggttctgaaactttttgcccgctttgtaaatcggacattgaaacaccctggcacttgtttgtgaaatgtccttttacctctgctctttggtttgcaggtcccctgcctttatgtgttagcaacattcctgaaacggagttggtggagttgttggaaattatttta

SEQ ID NO: 298878 - DNA, 3162 bp, Cannabis indica
cggggggacttggtagtagaaacgtggggcctttcgcaattgaaattaagaaacggaccctattgacataaagttgattcaaacttttttttttaatggtaagttggttttcttttgagagagaaaagagtattatattaatttagatcaaattagacaacagttggagataaaaaaaaatgtctgccaaagaacattcactgtctagtgtaagagcaaacttaaccaaaatataaacatgagtattaacatacttgaaaacatgagtaatatgtattcgtggaaaatcagacactagaaagttaacatcattcaaaataacattaaaagttaaagaaaataaatgagaagattgcaatacttgaaccactataagtgaatcagttttaatgtaatctgctaatgaattgagagataggagtcaaaacttaaagctaggctaatgcttccatttcttcaaattaaaaaaagccctaaagtggcttagataaagctgcaacaataacactagaagagtctcttaagagtgcaccgacaccaataacacctttagactcgttactagcagcatctgtgttaagtttgagtctttccgaaagtggagctaaccatttgggctttgaagtaagacgagaaggagcacttgaagccatggttgctgctgatggatgtgtctcaagcctttgagtagtagtacgagcagcttgatatttatgcagatgtgatgtcgcaaacaataaaattgcatcagcttttgttgtaattttttccatggtattcaacatttcttttaaaccagatgcaccaacagatgacaataaactgctcaaaatgtgttgttggaaggcttgctaaaagtaagggtaaaaatcatttggttatggtcagtttttacaattttataaccgaatagttggttacggattttattttacgaatatcataaccgaccgtttagaaatcataacggtataaaactgatcatacagtttttggcagtttttagcgattttttagtttgacgattttggactgtttttggcaatttttttgtttaaccatttttttgtttcaaaaaccaaaatcgattgccatgttaaaaaaactgtaaccaaaaccgaccgccaaattcagtgatgacgtggaaccaaaaattcggttacggtctggtcagttcgatggccgattttaatttttcagtttttataaatacccatagctgagagatgtagaaggaaatcttcacaagtggtaaaacaagcaagtttaaatcaatttgtaagttcaagagacgccacacttcttttgctcttttgtgaaaaaataaggcatgatttgttgtttcagtatgagatctgcagagaggacataaagaatcagcagcaatgtgtcttcgatgtagctctacggcaacaggaagtgccatgtaaaaagctttccataaaaatttgaatctctgatggaagattcagcttccaaaaagttttccaccaacgttcaatggaggtagagctacacgtatcctcctattcagcaaggcttatagcaaagtgatagcctgattttacagtgtagcatcctgtgaatgaattgtaccatatcattgtttcatctgatggaaataaattcagtgggatgctaagaattctgtcaacatcagcttggcaaaaatttgattgcaaggccaccaagtcccacagcctattctggtttattaaatgaaaaactaccaaacttggattagaaccttcaaacaaaaaaggtgtaaaacaagtgtgccctaggatccaaaggtcgaatttacagaagatgttgttacaagttcctactctctatcttaaccccttaaacaataactccttaccccaaacaatacttctccaagtcaaggatgggaaaataccaagatcaacaataggaaattgaccattcaaaaaatacatgtgttgaagaatctttcctagaagggagtgtggaaattccagaagacgccaagcttgtttggccaagagagcttgactaaaatgtatgaaattctgaaagcccaagtcactgtgtattttagctttgcaaaggaaattctaattcttccaatgaattgaattatttgatgctatagaactccaccagaatctagccatcatgctttctatttggtgacataaagtgactggcaacctaaaatagctcatggcgtaggtaggagtggcttgtactaccgcctttaaaagaaccttctttccaccaattgaaaatagttgctatttccaaaagctatgaagattccaaattttatatgtgatgccacaaaagagcttcattttatcacgccccacaaaagagggaagccccaagtattactcatgacatggctggattggcatgccaaatagatgttggaaaaatctctggtcttactctcttgtgttatatgagaaagagagaacacaatcgggattgatagattggcatgaagcgctgctatatagatcaagagatcttttaatagaccttgctgattgtttagtagcacgacaaaagagcacactgtcatcaacaaagaaaaggtgcgcacactagtggagctgaccttgaaactttcaaaccttgcaaagaaccaatgcttttctcatgttgtaatagccaagagagacctttaacacatattagaaatagatagggtaaaagaggattgccttgtcgtatacctcggctaggaaccagatcaccatgtactactctgtttaataagaatgaataagatactgactgtaaacaatgaagaatgagttgtacaatagttgtcccaaagcccatcttcaatataacttaagccataaagtgcgattctacacgatcaaatgctttactcatgttcaatttgattgccgcgtaggctttagaaccacatttcctatttttaagaagtgtaacagttcaaaagccacaagaacattgtcagtgattagccgctgagataaaaaagtactttgatattctgatacagccattggaaaacatgattgtagccgtaggataattgagttggagaccaatttatagagaacgttgcacatacttatcggatggaattgggtgacatggtttggtttctttactttaggtatgagagtgatgaaaatcttgttgggttttatgccc

SEQ ID NO: 298879 - DNA, 4189 bp, Cannabis indica
agacttagttgatagtattgcactatcgaattgaagtaattgctatggatcgaattgaggtaattgctatagatccatcaggtacgcatatattattattatgttttatgttatatacaaattgatcttgggtttattattaatttatctaacatgttggtcaatctggaagcaccgaaatgaattagtttggcagaccaaagtccctacagcagaagaggtagtttcattagttaaaagaactcactttgatgattagagaaatgctcagattagatataatatcccaccacatttcagtgagaactatgggaaattgagtattggactatcccaaaagttgatacaatcaaaataaatgttgatgatgctatgttttacaatgagtgataatatggttttgaatttgtagctcgagatgataaggggctagtgcttaagcagcagcttagtcgaatggggaaattgcagcctgcaatagtggaagcaattggtcttaagaaagtattaaattggattaaaaacaaaggatggcctaaagtggttgttgaattcgactgccttatatgagttaatgatctcaattcttttacaaaaatgtcctcttcttatggtcatgttatctttgattgtattgcaaggctttaatttctgagttgtgttttgttttaatttttttttaaacggtctgctaataaagttgttgctttatgcgggtttctttaggagagactaactgtgtttttagtggggtttcactccctttttcatcattagttttgaatgatattatctaatgaagatgaaacttctttaaataaaaaaaattccaactatttttttttaatatgataataattctactcaatttttgctactgaataataacacacaatttgctggatacaatagcactgttcataggcaagacatgtagcatacttttaactttcttcaaatgaggcattaattcacctcattaatccgactaattaagtaaaccttattccgatacaacaaatcgacccttcccttgtacaaacagaggaacatataatactaaaatcaaatattattactagtacacagtaatcaaatactaaaatccatgatctttttaactgtcactcctattgggcttgcctgaatcaatcggcatctgagacagatgaaaacaaaaataggaagaaattattagttaatcagtctcaaaacagaacaaagtagttgaattaaagtgaaagcttgagtaagttagttatactgtatcttcagcatttggaactggagtccaatcgttagttgctgggttacacgtggatgaagcatgacagcaagtgactgtatcagcttccaggttgtagcttctgtcacttgtattctctaccttgatgaaccccgttcctgtctgaaattaacaatatcccatccttactatttcttcactttattaaaaaaatggtaaataccattttggatcctgtcgactgaattttctgttttgctaaatgacaaaataaacactgtatttttctaaaatgatacaaataagaccttaaactaattttttgtcaaaaaaaatttaatgataatctaatctaaatgtgttatgactgtttacatttttttttatatctgttctatttttattattttaaaaaatacaagatttactttgtcatttaacaaaacagagaatctaatacataatttttgcaaaacacaaatccaaaatagtatttacctttacaaaaattaactagaatctaaggataaggataaaataaaataaagggtagctccaaaaaattaagaaaaaatgaataaaatttagtacagtgtgatgttgcttgtcaacacagctgagatccttgtagtagtccgtctctacaaactcctcctccacttttttcccttcataaaccagtttctccttcgaaacggaaaacaacacacatatatatattaacaacagcaacatacatgtattaagaataatgtaaatggaaattacctgttgatcattctcaagacgttgaaactcgacgtattcaggaatattagaatgattattggtggtggtagcactatcaatagcatccacgtattttgaagagtattcactccgctgaggcttagtgtgtcgttttggaataattccatcaaaataatctctcgttttagcctcaatttctccctcttcctctagtgacaggtgaacgtcactcctattaggccttcttgttgagctttccattgccaatgagtgtattgagtagtagtgttgtttctaaaaccttatttcttctgataatttttagtatgagaagtatatgcaaatttgcctcaccttagaggatttattttgtattgttgggtgatttcaattggtcatagtacagaagatatttttgaagaaaatatctaatcgaccttatctgttttagtgttcgtacatattagcattggaattgtaaggtgggggcattgccaataaatttgcaaggctggccttttctttttccactgacgtttctccatcacatgatcgtatcattgattagtttgattagtttagttactactactagctgtaacatttgaacattatttttccaatatttttttttccagtttgtaacaaaacaaattaataatagtgctaattacaaccttttagtcaattttcacatctaaaatcacatgtcgaaatattttttttgatagcggtatccgttatagttacagtatcattcctgtaaatttttgaatagtttacaataccaaaaacagagttcctgatattctagtatactacgcgtgttcaaaaaactttaaaacgtattttcgacactgtatactatttgaaaattttcaaacatttacaaggataatatttcaaatataacgaacaccccgtgaaaaaaaaaaatattccgacatatattttcgggcgtaaaagttgactagtagattgtacaaaaagttaacgatattactcttattattatttgttaagtttctgtattctatcttttaaaataacttcaatttttttttttaactcacacattaccatgagcttctcgatatttgtctttacatcatttaaatattacaaaattttttaacatatttttattaataaaaacaaagaaattacaagaataagtaagaaaaataaaaaattaattaaaggaacgaaagagaaaaaaaaaatataaaatatgtttatagcatatgtggagaaatatttaggatgaagtataacagaggtttaaaacgtttaagggaactcaatttttaactgagcattcccaataagacctaaaatagattattagtattttttttttaaaagaattatgtaaaaatttacctccatcaagtgagctatatgtgagataattataagaggtgagctatagctcataactattttgggccagtcttgaggtgagacgaaagaggcggtcaccttaggtcccccacagctcaagccctatttcgaaaaaaaaattaaaatataattaataataaaatataaaaaataatctcataatactaaatatatgttgtagcttaacgataatttgattagagtaatatttaaaaagttaagtgtttaaattctaacaacatcactttttcattgggtcatatttttttatttttgcttaagacccaaactaacacaaggctgaccctatagctatttttgagctaaatgtagctcaataaatagtagtgaggtaaacatattagacattattttttctctatcattcttttattattttttttctttattttttttttttgatttatactaaataacatagatgtaaaggcataatatttaaatgatgtagagaaaaatatagagaagctaatgtatggtgtaatgaaaatgtgtgaggtaaaataaaaataagaaagttttgattaggtaatttaaaggatagtgtttacccaaaaactaaccttggtgacgtagacatcaatgtttgacacgtcgtaagatggaaaaaatttatagagttatcccgagtcatagtagtcgacttgggagggatccctagccctagcccatgttgactctgggaactccaaaacgtgtgcttgatcccgccaaattatttctaactcaccatccttcagtattttgaaccaagaagacaagaagaat

SEQ ID NO: 298880 - DNA, 13476 bp, Cannabis indica
ttcgagttgtattttttgtcggtttattcaggttgggcggtttgtaaattttgttgaaacccctagtttgcccctctataaaccttgctatttttcgtaaaatcattagttcaccttcttgtccacattgttatggagatatagaaattcttactcatgccttgttcttttgcagctgtgttagaagggctggaaaggtacaatcttctatcctttatttatttattttttgatcaattagtgaatttcattactccgaaagaatatacaattacaacctattagcactttcatctgaaggccttatattttagtctatacaatctgattactcctctattacacgttttttatattacaaccattggattacaacatcagaacaaaaacaaaccaaaaccagaaattgtttcctggtttgcacaacttctggtttttagatctaaaaaccattctctgtctatcggcttggttttgcttggccagaaacacaatgttctattcttcctatcctccttaatctttctcacaacctgcttaactgatatggcatctgaattccataaaataccattgcgaacttgccaaatgtgatacacaacagcagcaacagcaactgttataacaacttttcgaaatgagctgctttttgctctttttatccacctaagcaatctgttcaaatctgttgtttcagctctccaatttaaccattctttaactttggataagcaattatgagagaaagaacataagaagaataagtgtttagaagactcaatctgatttctgcaaaacagacatgagtcctcctcaataatattcaacctatgcaatctttctctagctttgagcctaacttgtacaacaaaccacaaattaaagctatgtctaggaatatttagtctattccaaacctcatggctccaattcactctgctttgtgatggacaaagagctttgtagccattagaaattctataagggactgctgcattttgctgaatgttcatgacctctttaacttggtttttgacagccaccaatttcttccgataccaactagcctggggaggagcttaataattccactaatcctcgcctttcatatatacacaatggatccatctaaccacaaattgtcttccttgtttgcaattgcccacagatatttggtcatcgcagcaatgtttcattcaaaaatctttttcagtcctattcctccaactttttttggttgacaaacataatcccaagctataggagcagctcccacagacacatgatgacctttccacaaataggctcgacatatagcttcaatgtcccttatagtcttcttaggtaacaccataatttggctccaatataagtgaattgacatgaggatagagttaacaaaaacaacccttcctgctagtgataaattccttgaactccatgttttgatcctttattgtctcgaatatcttttcatgagattatctttaataataatgctaatatgtgtgcacaagatgtgaaattttttctgtgtagcttgatttatttggcataataagaataaggcgtgaaggagttagctctcagatggggattctaccattcttagtttggctaagagttatttgtaagaatttaaagccgccaactataatagcaacagtattttgttatacaacatgcctctagctgatgaactttggaccctttcgcctctgggtcagtcaaaactcaacattgatgcagaaacatgagtccaacaacacaaagctggctttggaggtgtaattcgtaataaagttatcgcagcaatggccttttcttattcttgaagcaaaattccttctaaaaactgtcttggtgcattggggaagctttccaactacatcaaattgaaacagattgcaaagcaattacaaaatgctattcttttaagcaaagaagaccactcaatttttggagaactaatcactcaaattaagaacactttatctcatttcctcactgctttggtcaagcatgtgaagcgctcgaccaatactttagttcataagctgacaaagcatgttttggtctttcataggccatctttccaaaaaaataagatactatgccaaggaaattttgacaataaattgtcaagattcatacaaccccagcgagtcgatatattagattttgaaaagtaaattacatatgttattttaggcagatttttatggaaggatatgatagatataataattttgtttacgttttgttttttgctgaaaaaaaattaataaaaataaaaggaataaaggtccaaaattgaaaagacacgtgaggaaagcaaaaaaaaccggtaagttcgataaatcggaataagatacgtgtcaatattaaaaagaataaagtacaacctaacggccaactcttgttcttatctttgtttttttatattattattttggagtgatcaacggtccagatcactccacactcccaacgctgagccattctttccgaccttatttaaacgcttccatccctctcaccacgcgttttactctctcaatatccatcatttcatttcttttttcctaacagatttttctctctcaaaaaccccaaaactttggaaaatactcaaactagggtttgatttcttgtttttgggtgtagatagagagaggatcggagttttaatgattttaatttatttggaataataggatcactgaaaaataatggctgtcatctctgtgcatggcgaggttcgtcaacaccagcctcaggtggggagctctcgagctttatatgccacggaacgtgatgattcctattcgctcaagtctgaatcgtcttcccgcaatcttgccactttcaaggcctctgattccattgaaggtttgttcaatttctgttaaagttttttttttttttgggtaatgtgaagtgacgaagcagctagattttttagttttattgttgtagaaatgatttcagtagacttgccttgattttttagtcacttcttgtcgttgcaagtgccttaaaataatgttttatttttatgtattgtagtcgatgaagatacgcatttggctctagctcatcacatgtacaaggctgggaactacaaggaggcgctggaacatagcaattctgtttacgaaagaagtccaactcgggctgataatttgcttcttttgggtgcaatttattatcaggttctttcttagctcaaaaatgttcagatttgagtttactgtacagcatttcgattaagttatgtatgttgaaaatgtttttattttttctttctttctttcagttgcatgattttgatatgtgcattgctaagaatgaagaggccgttcgaattcagccacatttttctgagtgttatggtaacatggctaatgcctggaaggtattttcatatttaccactatgttccactatcattggtgtatttatcttggttctttattaggtagtgaactaaacattttacctcaataatcaatttggtattttttttcataatgcaggaaaaaggcaatatcgaccttgcaattcattactatttaattgctattgaggtttgcatatacctgtttctttttttctcttagttatctttatttagtattagtttgtggccgtgaattaaagtttatgcatcttggctagttattgatctttgattttctttgactgcagcttcgccccaatttctgtgatgcgtggtcaaacctgtgtagtgcttacatgcgaaaaggaaaactaaatgaagcagcacaatgttgtcgtcaggcacttgctctgaatccgcttctggtaaaatgccttctgtttttttttttccttatctataacacgctttatgttgcaccagcgttttccacattgccttcaatcttggctagagtcttttgtttacattttttttgctattaatgatcctaattattgaattcgcacacaggttgatgcccacagcaaccttgggaatctaatgaaagcgcagggatttgtggaagaagtaagttctaaatacaaaataattacacattctgctttatatgaagtgcttgtatggtttatactttcttttgttgtcgtcaatgaaaagctataattgggttactggtgtctcacttctgctagtattgtggatgtaatgaaaaagtaatttgtcctcagttttgagttgacttccaattgaagtcacctgttccgaactcttttcctgctcccacataaatgtgggtgtagtaagatctggaagaacccttccacaattagactttcacgatactacagtaaaattactgatgttagcaattcatgtgtggaactgtgattcacagttcgatacagatataatctacaaggcaggggtcagatgagggttgcttctagttgtacttccacttccgagactgcaaatagtcagaatctaacattttatgcaggcatacagttgctaccttgatgctttacgtatacaaccaacatttgctattgcatggtcaaatctcgcgggtatatttatggagtcgggtgatcttaacagagcccttcaatactataaggtaatctttttttcttgcttttattttcttgttcgaccaaaaaaaattgcttgcttgatatgctttgctatcggtgttaatgaatttttgttacaattatgattattaggaggctgtaaagctcaaaccatcatttccagatgcatatttgaaccttgggaatgtttataaggtaagcagttatgtatgtgccagtatggttggctagctacaagtggatggaatcatattggagaaaaacacgatatttcttttgcccttttccaggctcttggaatgcctcaagaggcaattgtgtgttatcagcgggctctacaggcaaaaccaaactatgcaatggcttttggtgagtgtttctatacattgtagactgtcctggcatttctatatttcatgttttagctattattttaatttttaacatagcctataaatatgaagacataaatttgagctaaaattttgatgtttatgttgtcttaaaagacccatacttgcacacttgaaaaactaaaagtaaaatccaccacaaagtcctgctaacgtacaaatttccctacgaggtttgctcaagtgaatagtgggagttttatgtcccctttaacgtatgcatatttattaaaaggcccttaatgtataaaaaagtagtaataatacacatgcatatttatttaaaggaggtattatgtatgtttttcccactattagttatttttcccatttgaaagattcctattcgtcttgtagtttctattttaacccttttagatttattccatatataaagtatgggatattattgaggaacagatgttttgaataatccttcctaaatttcgggaattattttcttggttctgcccttggattttatcatattttggcatgcaagaatgaggtaatatcctcgtgttcctcaaatattgtaggtttgagtgaggagcctagtgcgtgtgtgtattttatttcggtctattggatggcttttggtaaagtagatttttctggaggataaatgttgggagaattatttcttggttctgcccttacatttcatcaatttttggcttgccagacaatttcttcatgttcctcaaatattgtaggttcgggtgaggagcctagtgtgtgtgtgtgttcctcaaatattgtaggtttggctgaggagccatgtgtgtgtgatatttcatcgttgaaagttggcaggtgaaacatagtatttgaaaacttttacaaaatagtatggtgcctaatgtttaagagatcctttgtcatcttggttttgatatttcagcattgaaggttggcatgtgaaacatagtattcaaaaacttttacaaaatagtgtggtgcctagtgtttaagagatcctttgatctcactgtaagaggagtacacattttgatgctcaaataatgactggaacatcaaaagttgtaaaatcttagataaagtctgcctagtgtccaaacatcttttcaatatgcataaaccccactttttctcctaaaggatcaacaaaatatttggtttcaaggatgacaatgattcataaattaattttgaactaaaattcgtatgcaataattgcaatgtatttgtggtatatctttgtagtgaagaatggtcaaattcaatttagataaatctttgttttttcctttattttatgtgatagtattcatgaacacacattatttctttcaataactaagtcagtcatataataacggcaggtaacttggctagtacttattacgatcaaggccaattggatttggccattcttcactacaaacaagccatttcatcagatccaagatttttggaagcttacaacaatctggttggctctctcgtcgcctgaatgatgcaatcttgatattgaatttgtgattttatcgattgacttgatttttgtaccttttttagggtaatgctctgaaagatgttggcagggcggatgaagcaattcaatgctacaatgtatgttgatctcatattttggatgtgtttgttttgaagttgttcaatgtttaatctctctgtataacttgaatctgtatttgaatgtctgaagcaatgccttacattacaaccaaaccatccacaagcgcttacaaaccttgggaatatttatatggaatggtatgttgccctgatgccactcattgatcatctagttcatataaattccattcctgacatgatgtgtatgaacaggaacatggtgccaactgcagcttcatattataaggccacattgagtgtgacaactggattatctgctccttttagtaatcttgcaattatttataagcagcaggtatgatttattattaatattgtatcttatatagataaataattttaatttttcttttatatttttgggaccccttattagagctataataatgctcagcatgttaaattaaaacttgagatgaaagataaaaaggaaccaatgtaggaaggattatacacagtagtataatttcttccactttttttctaaaagaaaatcattgaatttctggggcacatattttcatcacagggaagttatgcagatgcaatatcttgctacaatgaggtgcttcgcattgatcccttggcagctgacagtcttgtcaataggggaaacacttacaaggagattggcagggtaaatgaagcaattcaagactatttacgggcaatagctacgaggccaaccatggctgaggctcatgcaaatctggcttcagcctataaagacaggtaattactatctttcatattgttcacatcgttgaattagttttcaagttggacaaggaaccagtatttttgaaagctgttttagtagcctgaaagtcgtggctggcttggtgtagcaccaacaactatggtgattgtgtccggaagttttgaaatattattttattatgtttacaatctgcatatcttatttttattataattttaagatatttcttttacaattttattttaagaaggaaaatcatgtagtaatttaatttaaatttttattgcctaactctcagcatatgaatgaaatttcttactgtgacaataaaagagttctaattggtgtttatgctgtagtgggcttgtggaggcagctgttaagagctacagacaggctttggttcttcgacctgactttcctgaggcaacttgtaacctgctccatacattgcaggttaatgatttttattgtatctataattttggtgtgcatagtacttggctttcgtaattctgagtttcaagaaattcagtttgttattgatttccatagtgtttttttttctttctgtattgcaacatttacttgagttcaattattcaggggataaatttctattttcaggtgctgggagccattgtattttgatttattaatcatgttaataacatccttgccttatgaatgaacaaagcctagatatttgttcttgtttattacgatcattaactttaattctttttacagtgcgtgtgcagttgggagggtcgtgataaactttttactgaagttgaagcaataatcaggagcagattgatgtcagtaaaagtctctgtgtttgtctcttttttgcttatatctaccagctatgttaattttgtagtgttgatgggtttttgttttttcagatgtcacttcttcctagcgtacagccgttccatgcaatagcatatcccatcgacccaatgctggctcttgagattaggtaagacactcctttagaatactatttttctcagaaatgttttcttgtttttcttacttctttgtctgctctttcagctgtaagtatgctgcacagtgctccatagttgcttcccgctttgcacttcctaccttcaaccatcctacaccaattcctgttaaatgtgacggaggaaacagacagacgttagagtggggtatgctctcttgattttgtgctacgtatatgttttagctactctacgtatttccttaccctacgactgttttctgtgccagatatgtcagcagtgactttggtaatcatcctttgtcacacctcatggggtctgtttttggcatgcatgacagacaaaatgtggaggttcgtagttccttacctttcgttttgttctgtaaagtcagccattgagcttttctaattattgcaggtgttttgttatgccttgagccaaaatgatggtactgaatggagacagcgtatcttgtctgaagctgagcattttctagatgtttcttctatgtcatcagatatgattgcgaagatgattaatgaggataagattcagatcttgattaatcttaacggttatacgaaggtgatgctatttaccccttttttttgttttctatctgaagcttcattgttttttttttttcataaacacataaaagttgaggaaataactatatactaactggtgcagtttcagaagaatcattgtttgtcatgggttctgatgatgattttgaaaaagtgaatccatggttgctttgtctcattactttcctctttaaaaatgcagggggcaagaaatgagatatttgccatgcagcctgcacctattcaggtatcgtatatgggatttccagggacaacaggtgctagttacatccattacctggtaactgacgaggtaagatgggtcaaattttacatcgtacttatttgcttttgcctttttggggggtctcggtttcatataatgccctctgtttgatttcagtttgtctcgcctttacacttatctcatatttattctgagaagctggtacatcttccccattgctactttgtgaatgactatcagcaggtcagttttctagcatactatgttagagagagattctgtaatttttttccctgttacctgaatcttttttgtcctgcatacagaaaaatcaggatgtgttggaaccaaactgtctgcacaagcgatctgattatggtctgcccgaggacaaattcatttttgcatgcttcaatcagttgtataagatggaccctgaaatattcagtacatggtactttcacgatacttcttcttttcatttttataaaaagcatctcattttttttcatccttttcatataggtgcaatattcttaaacgtgtacccaacagtgcactatggctactcagattcccagctgctggtgaaatgagacttcgtgcatgtatgatggctgatttactataaccattaattcttcatccgcactcgtacacactagtttatggaaaatttctgctttctcattgcatatttaacttttcctctggtgaactattcagatgctgttgctcagggagtgcagccagaccagatcattttcacagatgtagctatgaaaaaggaacatattaggcgcagttctttagcagatttattccttgacacgtaagtttttcctccactttatacgtgttgctgatctctctattgttcctttttggatttaagatgcgtgcatttatgtgaagttgccttgggctatttggtttttattgattattgaattttccctttcgcgttttaggcctttatgcaatgcacatacaactggcacagacattttatgggctggtttaccaatggtgaccttgcctctcgagaaaatggctacaagagttgcaggatcactctgtcttgccacaggactaggagaggagatgattgtaaataggtaagcattttgaatgtcagtatgcagcacattggtatatggtaatctgtgactgaaaaagttatccaccagtgcattttccaatatgaatgtgtttgccttttgggttcttgggaataaataaattgtgcacacatcataattttagctttggtgcgtggttccttgattgtgtctaatcttttcttgtatgccttgcagtatgaaggagtacgaggagaaggcagtttcattggcattgaatcgtcctaagctccaagctcttactaacaaacttaagttgaatagattgacttgtccgctatttgatacgaaacgctgggtatgtttttctgatgttactcgttattctgttttgcattacacagcattaagagaaatggttgagtcttttactactgttgcaggtgaggaatttagaaaggtcatatttcaaaatgtggaatatgcattgctcaggccagcaccctcagcatttcaaggtcactgagaatgatttgcaattcccgtacgatagataaggtatacagttaggagaggcggcattgtagatagaacaaacatgaggaaattatttatcaaaaagtaaaattatgttgaaaagtttggaaatgagatgagtacaagaaagatttgtatttgcgtgattcttccagttaaaatggaaatattcaagattaatatttgctgtgtaactctgggaccggcttcttggcccttccttgcgtgccttgacaatattgtgtacaagtgtcttttcatgcgatcattttgtatgcttatggtctcaatgaaggtcactagagttgttctctgattttctaactattcctaaaagcctcatctattccttaataacggagaacgtaactcttcagctgtaatgggctacacaagaatattgtatcactctttcacctgtaatgtttgcacaaaaccttaaaattggaatccgaagtctgaacaaaattaccttgctattcaaggaacaccaccacctgaaataccaactccaaatttgggacgattctgttgtatgacatcttcattttctcagcagagtacttgacctacatgagttcaccgtcttcaaaaacctcatacgacattggattataacttctattgctttgagttgacaaatggataccgagctctctttgatctgcaaaattttgcatacatggtatctgtaagcatgccattttaggaggaagcgttcacccggattcaaacaaagaaataatcataaattgacatgtttaggaatctaagtatgatttttgaaatgttaaaaagcatttccgaagtgcaactttcgacccaaaggagcaagatatttggacatataaaaactttcctagtacctcttcaattgtcgctttatctcaataagaaaaggcacactacaacctccgatcagcaaatgatgattaaccacattatcatgtgccacgtacagaaacttctaactgctcaatcctactagccaaatcatgctttccacaattcttcaaaccatcagtgaccaaatcaaagcaccgggaaatgggagtcaaacccaattcagtcatctccatcaagaaattagcagcctcgatgaacctgccgccacggccgaacatggttatcaacatggtgtaaacgggtcgattgggcgggtgacctttaaccttcatctcactaaagaagcaatgagcatcatcgaactgtccactcttacacattcctttaattatgggcgcatacaagcttggaaatggcttgtgcccatcttcaatggaattatgcagaagcttaaaagcttcatcgattctacccaatttcgaaaccacaggaatcaataccttgtaagtattgatatccggaacaagaccgattctgcatacttcgtggtaaagctcaatgcaaaactcaacttcaccagactttgaaatgacttccacaacagaattgaacgtagaaacgtctggagaaaagccttgtttcaccattcttttcaccatttctttggcggactcgatgtacccagcattcagtagcccttccactagtagatcccggcctcgcaccggcggattgaaccctttttcactcatttccttcaagaacaattcagcttctctcatctttccagccgagcaccaagcgttgacaagaatcgtgtaagtccgcttatcggggaccaacccttttcttatcatccttcgtactaatgcataagcgccatgaaagagtttcacttcgcagagcgagaagagaagggagttatggagctcgacggtctgctgacatcggaaaatcttcgaggctctgttaaagacttggactgcctggtctacgaggccctgtttcccgtattcctcgattatgaagcaaagggtatcggaagagacgattaaggcgtgaagggtctgcatctgttgaaggattttccacattgactcgtacttttttgtccgggcgagagttcgcgccagctcctccagctcgacggtggtgggtttgtaagagggatggtgggtccgagcccagttgaagaaacggagtgactcagtgccggatttggaacaggcccggaggactcggtagacgagttcagagtcgatggagattcgcatcttgttgagagttcgctccatgtagaaatcacgctgtacgatgttggagatgtggtggattgctgcaaagtaatcatctttggaagttttggtgccattttgatttccctcgatgcggtcgctggtgtggaggtagcggacgataggctggaggctctgtgtcttgtatgtgtttgtgtttattcctctgagaaagaggaaaatagcgtctttggaggacctaaacatcttcgtcttctttagcaaaaaatatcaaataaaaaaaaacatcttcgtttttgcctcgattgtttttttagtagctcacttatatactatattcttgagtaatttttcaagtaaatactatgtttaactcttttacgcataaatatttgggttttcttaatgtaaatactccaatttaatttttaactctagtaatttttttagtttaattagtatttttacctcttaaattttgacatataccaaatcatgttccctgaacttttaatgtcgttaaaaatgttcttaaactattgagattgttggatttaaagatttttgtctaatttcatt

SEQ ID NO: 298881 - DNA, 4411 bp, Cannabis indica
tacacgtattctaggagaagagctacattacataccacttaattatttttagttagttatgttagtagctgactagattaaataagagaacgctgcctggacaaattaattaagtccaagtttcttaagattcctcttggtataaatagctgagtagagtttagagagagatatttatgtaaagtttagagatttaatctctggttgggagttcccaagtgactcaaatacttggcaattttgtaacttttctctgttctttatatcgatacagtaatttcttcatctattgcctaccatattatttgagctggatgtgcttgtaacttataagatataatatatatatatacctatggttttttcagcttatttacaattatgcttgtctccaggaaaatgataaaataaaataaaatatcctaaatttacattggtgtcattgtttaaaagcgatgccatgcgaactctgtgttgcttacttgatttatgagattagtcagttatgctcaatcaaaagattgaagatttgttaagtggtttagattttctttttgggaattcgcaggttcctgtagctcctctgcaacgaggtgatggcacttctgttttccctcaaagctggaacaatgaaactcttgaagttggtgatcatcctcctgagaaagcaattcctgctatgattacatggacatatggcggtaacagtgtggctgttgaaggatcctgggacaactggacatctaggtaagcgttgaaatctaagtgtgtttgaatataaactacatggtgacaaagatgaattgcgttatgtggccaggaatcttatcatatttgtgcatgaatttatgccaattgcttataatatatttttgtggttgcaggagaattttgcaaagatctggtaaggatttcgctgttcttttagtgctgccagctggtatctaccattacaagctcattgttgatggagaatggagatacatcccagaacttcctttcatagcagatgaatctggtgttgtctgtaatcttcttgaggttaatgtatgtatctatcataaccttggttgtgcattttatatttcttcccatttctttattattgtgctgactaaaaatgttttgattttctatcctaaccttggtcgttgtgtatgtataacctgtggtagattgatgatcttcttgttatgaatttttataacccaaattctatgatttattggggacctgtacatataacctgatcccaagacttctagctcatgttacctaactaccagtgtcctcttgagcttgaaatacaaagagtacaattgcattactaacccacctacacggctatattgtttttggtggtgcttatatttatcctagtcatacaagtgaaccacactctggtgcatttgggcgtacaccaactttatttgttatgctacttttatttgtcagagaaggcaggggataagaaatatctgtttgtatagattacctactctactttgaattatgtcaaatacgaattgaattttcgtaaacttttcctgctttgtataggattatgtaccagaaaatctggagagtgttgctgagtttgaggcacctccatccccagaatctagctatggtcaagtatttccagctgaggaagatttcgcaaaggagccggtgattgttccatctcaccttcatctaactgttcttggtatggatagacctaatgaagcttcttcttcttcttcttcctcacctcctaagcctcaacatgttgttcttaaccacgtctttatagagaaaggttggccttcccagtctgtggttgccctgggattaacccataggtttcagtccaaatatgttactgttgtcctctataagcccctccaaaagtaagttatcccgtttttcgaaacttacctctgtaaagaaatctgttagaaatgcattgtccacataaatctgtgaagctaatagttcgcgtttttagaacaaacaaatttcgtgtcgtgtttttactgcaatgcttgatagtttttttacttatgtttttcttctaattggatttctgtgtgtcctttctaccaattgtaaaagtgttttcgggtcttagcttacatgcacttttttgctctctttgcttattatttattttacggggacacaacaatactatgaagaaaggaattgcgttcagaaatgctttgaacaaatgtattaatgctatcagagcctattgtgccttgaatcgatacctgattacacagattgttcaaaagctcagctcgaagaactaacggtgttataagaatgtaagtaaaaataattcacattgatttatttatttttgctttttgatgccacacctaagtttttctagtccagtaaaagggtttcaatcctgacatgggttttgttttttttgctttttttgttctatcctttttttaaatatatattttaagtcaaattgagaaatactcatgtatgttatataatgtggttaacagtgctgttgttgttcttgtagtttcaagtttccatttagaatccctataaaagatttgtaaggtgaaagaaaattctgaccgaatatttccaaccaccataactgttgttaatatttcaaaagcattggtatacccctaggttggccatgcaataaaattatctgaagttatttttattatatggaatataatctgtgtatttggttggtcatttaaaacataccagaattcatacagcatagcatatcgaagcaaatatatgggtgttgaaaagtacatagtaggagccataccatcaaagatgatagacatgatctaatattttacttgtttagaggaacaaacaatcacgtgctcgatttctacggctacctttcttgcgatctgatgaacccgaccttgattttctcacctcttccatcctcttctgcctttttctgcaaataatatatcaatagttagccaattctaacaacaattttttttttccttttcttttgcctctgttagtataagttttggtgcatttttgatgaaaaataaaaaaagaaaaaaggaataaaattatggcacataaaaaatcgtgcatggaaaagtgtgaattggttatgtaatttatgaatgatgaacaatcttgttttgttttcttaagataagaccaataaagggaaggaataaaaaagtgaacgaggttatgtgaactctgcaaagatttagaaacttgaaatttttctcagctattgggaaatacacaccttgaattttgataagccatcaaacgattagatataggaactgctttataaatcaagcagtatattttttgaaaaacacgcaagaaagtgtttaagaaatgatgaaataagcaaatgttaattggcatagaagaaagacccatatagaagaaaggatgttaatatgttaataaagtgtatagaatgcatgtaatgggaaaaagaattataaggaaagcattatataagatagctggcggcctaaattctcaattcccaaactgcgacaataagaataagagacttccagtacaaattatagtgttgtctaaagattaggtacatattctcaactccactttgtaaagctaattaccaagtttgtggacgtgcacatgtaacattcctaaaaatattattctctgaacttttgagataacaagaaattctagtgacactagaatccttttagaataaaatacaaaattcatactaagttttagtaaaactgataaaaaccagaaaattgtaacatttgaagtatcattagcaccaaaactttctcatgttttactcgtatacgaacaatgtggtaaatagtttttccttttaaaatgtttcactttatcattctttgttttattattcatatttctttgtttgttttcagtatattgaaaagaattccttttatatttcaaaataatttcttaaatgactttagcatctgtaaagcaaatgacagccacaaccaatgaatcacacagatgaaatctactaaaacatttagacttctatgtcccactctaaagttattccagaaaatttaacgaataataaaccattttttttttttttttgtaaatgggaataataaaaccatttgaaaatttctatttttacaatattattagaagatgccatttttattttcttttgaaagaaaaagatgccgattctaagcacttcaaccgcattgacaaaaaaaaaaaaaaaagaagaaaaagaaaagagagaggaaggaacgttctcgttctcagtcagattgagaatacaagttggggtttgaccgagttattataacgacaatgatcgaaacctaatttggttagaattaaagtttgattaaatcacaaattaataacaaaagtgacagttatgaaatct

SEQ ID NO: 298882 - DNA, 877 bp, Cannabis indica
ttgttataactaaaactaaattagtgacaacttgtgtctaaatgctatgttttagtcacaaataattttttgttgtgactaaaagtcacatttagtcacaaaaaatttatgttgtgactaaaaagttgttactaaaagtacgtaacagtttatttctcgtggaaacaattaaaaaaatgagaaacaaaaagaaaataatatgtaataattttacctcattattatttatcaagctacttaaaggcgaaacgcaacatactatcatttcactaagttgctctttctttctttcaagcaaatgtcctctaaatcttttgccttatacatgtttggcctgaaatttaataatataaatatttatataaataaaaactgaaatttccatatatagtaaagaacagtgataatttctcttctccaagtgtgaacagatcgaaataagtcaacttgttaggtggtcgacatataggaaattttttaagtacaaattaagtcaatttgcacatagtttaagtctctaactttgatgcctttggttcatattcgatcccatacacattacaattgataattacttatagttgattgtaataatttatatatttatattcttaccgaacactattaggactaagtttttggcccatttcatttcagccttctttattggacctatgctaaaaattcttttttgtactcattaataaaaaaaatactctcatatttaggcatgttataaaaatccatttagttagaacgggttggagctccgatgtagcggatcacttctgatctgaaacattcggatacatattggatcttggatcagatccgctccgccccgcctaattttttttctggatcggatctgatccga

SEQ ID NO: 298883 - DNA, 1461 bp, Cannabis indica
tactatataacgtcagtaacaaagcaaaagcacagaatgaggataaccgagttcttatttcatcacacaaaaaataccttttctctttctctttccattctcttctcttcctcttctttcttcttgcgagccttctcccttaaagtgagcaaatatcaaagtaataagcgttcctcaaatgcaccttatacttccccaaaataactagagaagatcgcattgataaaacacacaaatggtaaacaatgacggtcactattcaacgcaccttagctcttgttgtttggctttcaattgctctggtgtaagggaaggttttggagcctcgattttggtattggctggtacctgtaaatacataagcagatcagaattcatccttaatgtggtatagaaccgcaagagaaaaacaaaatgaccagacatccaaaaaccattcatataattaaatcgaggagtttcgtatttgtgacagacattgcagttctaagggaatagaaactctaagaaaaaccgatcgatcaaataaaaaagagataactttaagcaagaaaggttcaccaatttatcataccataggcatctggtctatgtcagaatcattctcgtgttccactacccaatttatcgcagcctccaagctaccattacctgaccaaattattttaataaggaacaacatcgatacagatacaaacattattttctttctcatgacatatacatacattgatacatatataagaacttactacatggagaaagaaagagaaaaaaaaccgagtggtttcctaagaatcataatattcataaaacattcaaacatacttatatcattgtaacgagctcaccagaataatgaagtgcacgggttgctcgagcagttggaaaacccatcgcttcaagctcctcaagtatctttttgtcaacctcaggaacaatcaattctaaacaagaagaggaagaagaagaagaaaaaatagaactccgataattagagaattatcttaaaaagagcaaccgtaaaaagggaaaatagcatgtcacattatatcattacttcaatttactttccaccattaatcacttcattttcaattcaactttagaaaacccgaaatactagaagccaaaatgactgtcaatttcgttttgttgacaacaacaaagctgatacaagaaagggaatcacactctatcaaatttggtttgtatactaaacaactaaatttactagacctgtatcaaaaccccagaagaagattttaaacaatgatatggtgcatcaaatactatacaatgctaaccaagtccttagcaaataaagtcctatacagatgtttcaatttcccacgaaccaataaaatgccataaataagtctccaaccatattctctaaacacactccttagcgggagtaactcaaaaaaaatgagcttcaactatacagaaagtgactct

SEQ ID NO: 298884 - DNA, 1655 bp, Cannabis indica
tctaaaatagtatttaccctttccaaaatatgtttcccaaatattattgctgggccttcattgaatgaagtttcttagagttggatttattagatcaccttcttgtccctctaaattgggctatcatggcccaatgggcaagtactcaagaaaaagaaaacattggatttaattagggattttataaaaatattatattttgagcaaaagtttataatttcactgctacatataaatttttacaaaaaatattatttttttataaaacaaccgtaaaacaataaaacagaataattaaaaacaacaatgcaataactaaaaaataacaggagaataacattaaaaactaaacaccctacataataattttgaaaaaaatattcgcctcacaataaaaaaaaatgagaaattttaataagtggtgtaaaaatcccaattaattaacaagtcaattattaaaaaaaataataattcaaagtcctatttgacaatgcacttaagatccatagacaaatcatgaaaagaaaaactagacacaaataccaactactatataaacattatatatatagccctgtcatgtatggagtttcaattacaacacaattatattaaaaaaaactttaaataaagacattcaaaagagaagcaaacaacataattgagtattaaattatgtaagttctgcaaacaaacgtgagatttaatacttaattacatcaattaataccgatattatattagtctatattattagataaagaacaaagacaagaagaagtaacaagtaagtaacaaactagaagtgaaaaccgagtggatggcggtggccgaggagtgttggagcttagaagcagcgtcaggggaagaagcattgacggtgtaattagacaaagtgtcaccgtcgaagtacttgaacggatgatcgtcacccgaaaacccttgtttgtcaccaacattgatgtggagcttgtgaccagcctcacaatgcttgcccacaccactatagaaataatagtcaccagtttgggttaggtttaggactaaagggccttcatagaaagctttggtgatattgttttgggtgcaatgttcatagtcatctttgcctacccataccacattgttcccacatggcctggatgggaaaactgaaaatatttctcatcaggacaaaaaattaaattaaatcatatctactaaaattcaactattttttaccaactatagcaacttgttttcatgatataataaaaactattagaattgaaaattaagaatatttgtggcaaaaatatttaaattattatatttgtagcatttaagtacttatatatttctttttctgtggaagaaactaaattattgcatttgtaatacttagtatttaatattttttttgttatgcaggtttggttttgggcataggcgggttgggcacctagttcaggagctaaaaaatctctcttttaaaattatatatttttaatttattaattttgaaaaatactacatttaattctaaataagagtctaattttttttttatggttcattaaattttagagtcgaccctgttattctgtaacatttaagtttgtctgttgaatgagtatttttccgcaaaataaaatataagattttttttttttttt

SEQ ID NO: 298885 - DNA, 966 bp, Cannabis indica
ttttccttggggactgaaattaaaatgtccttgagaatgatacaaatgaaaatactaaagcttttcctcaatgaattgttttatctgtgtgttaatctctttatgttaagatctagaatctttgtcttcttattattgatctgcagaatagtactataatgttttcaaaaactagctttataattggcacaagatatagtaaaactaatttctttaattaacattgttgcaaatcataacctgatcaagatcaccatggattcaaggacaacaaacacaatgacaacaatctcataaacaaaacagaacaagaaatcaatgaaaaatgaattgaattaagatgaatgaatctttaaaatcataacagtaatgaaattcaagaggagaagagatacaacatgggatcaccaatacacaaaacacaagattacaaactcagctcacaatgagagaagtcacttcaagagtgaacaatctctatttgcaaccctccatccactctcaaatctagctgaaaattttgtaagcttaaacatggtgatccctaggtttctcaatattctctcttctctgtaaagctctctctcactcaatcttggactcatcttctatatgttaattttgaatacaatgagcattataaaatcacaaaataaattcaaacaataacaattataatgttcatgaaattacccaaaatcatatcattatatttagagcatttcaatagagttttttgcggctaaatcttcttaactattattcatcttgcccttaactctctaagctcaaattttgacagtaaaatcttccaaattattgaagtgcttgcaaatttaaagtgtctatctaatttttacagtaaactgtcaatatagattgtttatgtggacacttttgtatctgtgtcaaatttatattattatacctaatattattattttaaaaatataaaaattatttcaa

SEQ ID NO: 298886 - DNA, 4288 bp, Cannabis indica
atagaaaaaaccgaccgatgctcagccctaattgtaattttactttatttccatcaatacatactttgttattgtctataacaggacacatataatgctcaaattctagatcattaggtccggataaaaacatatagtatcaattacttctaaagacttttttaataaatttaaaacaaaataaaattaaaaaaaacatacaatggctaaaaaaatattaaatatatgtcatttacaaacttaaaattttagatacttcccaatttaaccctgtttttggggtcaagaattagaaggctacgcgggagactcagaactaactatgcaccacaccattataatttgcaaatacagaataaatatttcatttatctctctccagaaacacatactgccttctcattctttcatgtttggagtgatttacagactccattgttcgttaaagaaaccaaataatttcatcgatatgataacttaacaataataaaagaaaaatacaaactgaatacaagagaatattttaagaaaaccactctccagacgttataagagaccgaaaggctcaggcagagtttcgaatccattgtcaaaaataggcccctgatctgttttgtcatcaatacagtgcagccagtttgtgtttttcaagtcttctttcagcaaaatcgcatcatatcgtgagctctcatacatgtctatttcactcaactttgcaaaatgtctaccagcatgagattcaattccattttcagcggaccgatcaatattgtcattctctaacatgattccattatagttggtttgtaaccctccattcatgctgacagatgatgaagaactcaaacttcgaaccgactgggtttttgaggtcgtggatcgaatgctttgtgggaagagtgtggtaccggtaagtgaccgactgttccctgcaccacttcttatatcctacataagaaatttcagatgtcaggatttatctaactggatgcaaccttcatcttcaagaatcatgacacattttgctacagcaacagaagtagaagattgagtatgatactgaagttctcattccatttcaaccaactatgatgcacacagtgcctttctacattcagcatacattgacaaattatagtttcaacagattaaattatatgataagattttgattgtgtattcaatcctttcacaggaatccaccaagattatatcccggaagagtttagctgttctataatggccaagttcaagacagatcgccttacaataataagaacataaaatatattgggaaatttgaaaggtgtcgcgacattctaaatgacagtggccagctatgggtcctttgtttgatgtatcattgtcaagagttctaaacattgttaagaaaaagaatcatattctaatacttgtattttttggcatattttagaatgacaaattggtcacgcacgcaattagtaatttaaaatctaaaactgttgacctccatttagtgtgtcatttaacattatattatgaaacagagagtatgcataccatatgcctgatagccatatccagagatcttttggagatcgtcctcccaaatccattgccattggcatcggcagatgttgttgatgtttttacaggttttctcattgccgaatctggaagatgggagcccttccgagcttcagcatcagtatggtgtccatttccatgttgacgaccccttccagttggttctgaaagtcttcctcttgtgacaatgggtgatgaatgtcttcttgagatattggtagccgctgtggtatctgaatttcctttcgctgagactgtagcgcctggtcttgacctacctgcagaaaccggcctatctgctggtaaagtggttctaaggtttgggggtgtgtcatgagaaaaatcaggcgggataacaggctgaggaggccgaacacgcggtccaggcgagcttggtctggatggcggatttggattgcgtccatttgatagcacacgggcagctgacagtgaaggacttgctgctggggaaatagatggtgctggattcctacgggtaggggtagatggacgggaattcgatcgaacaactggagaactcaagtttgccgggatttgtggtctagaactgggagtggagggcctagagctttgaactggtcgacttttttcagcagatgagttggatagagttgggcgagctctagaaggtgtggaaggtcttgatattgatgtgcgtccaggagtggagggtcttgcactagatgtagaacgggtaatgggagaggatggccttgtataagatgaaactgatgcagagctagtgttaagtattgatccagatctgttcgaggaatagttaccatacattgatgtggaggttgaggagcgagtcactgagctgcttctagctggtcttgaatggtgactattctcagcttgtgaagctgatagctgaaacagagaatatgacacagatttaatcacatttcaatactttatagctgaaaataaatggtaaatctgcttaagtgaaaattaatgtcagagaagtactgcagcagaacacagctagtacagtacgcatgaacaaacacaaaagaagataatgccagcacacctgcaatgatgcaactaatgtttgaaatacaataatacatggttgcacatacccttgaagccttagtagtagacgatgatctggctaaggaactgcttctcgtagccgctacggttggtttagattcacttgactctgatgtagggaatattgttggagttccaggaggagtgagaagcctagtggggagggaaaagagaaatatggcatacaaacaaattaaacactgataactacgatccgtacaatttcaacaattatcaaaggaaccaccaccaccctaatagagcaatagtctaataaaataacatttagttgaccattattgtggacattgtcccacatggaataaatggtagagaattgagtcatatataagaacatggactactccactcattgtcaattagttttgagatagaccctcataattcacaacatggtatcagagtctaattagagatatactactttcttaaaaaaaaaaatatatgcactgaaaatcaatggctgagccagaccgaaatcaatggagaggccatgtaagagtatataaaattattttattttattttcttaattagtttttacatataattttaaaaaatttaaaaatatttgggggcatccgcccctagctccgtcactgctagtgaaaatcatatcactgacgacaagattcatttcttattttctctattgagtaaggtgtagtttttcacttaactgatgtttgaatctgcataaaagctttccagtggaaaattacttgagaagagaatgtacagactttttatataaatatatatatgactcaaaattccaaacaagaaatatgaaggatattagataaataatataagaatagataatatttttattgatatgaagccttttaagtacccaaaatcaaaattgtaagaatttaagctaaagctgacacaatcataccaatatatcccacgtgccaacagcatataatatataagctacataaatataccaactcttcagcaaaatcaatacaaagaacaagaagcagatctgaattgaaatgaaggaacacgatgaaaaaagaatgatagtgttagaatttagaaataagatgaatgtggttctatcttaaaattaattggcaaaaggagtagttcatcatcttatatatcctaatttatttttacacattagtaataataatgtgagactatctctaatacactttttttaagtttggatttaaaaactgtgggtataagtaacaacatttaagagatcacagggccgaatgtgatatttgaaagaaatctactggctaaatatcgggaaattattattgtgaaatttgtgaattttgaaatatgataatatgtgatatattaaatagtagtgatgatatgtgtgtaatctgtataaatattaaattaaatagttaaaagagaccaaccaatcgtagtcgtgttttccaccgtctgtggaagacaacaaatcatcgatgccactacgagacactttcgccgatccaactgatagtttccccaatttcaccgaaactatagaatacaaatacaaatgtaagaatattactcacaattagaaataattatagattatcattatctaatctaatctaaaaggtaaaaacactcatatgatcaaaaa

SEQ ID NO: 298887 - DNA, 924 bp, Cannabis indica
gaagagaccaaacctcttgaaagtttggaataggagagaacaagcctctcgaatgcttgatttgtgtactgtttcagccattcaataaagaatttctctgagaaatttcattatttgtgtcttgattgctgatagaatatttcaactctaagattattctatcttaaacctaccctaaacaatgcagataaagtctgtcgactgcagttcctacattatccctataacataaatgtgtcgataaaatatcacaccagttctgtgatgatacaaggacttaccttcttcttcaatttttccaactgttttttttccttcacaagttctaaagatatttctttgttttgtgatgagaaagcactaccaccagagttgtctgtacacaaattcattcagttataaaattataaaactaaggaaaagatttactggaatatataaaatcaataaaataaatgctccaccttcaagatgattagctacatcactttgagcaacatataaacttgagtcctgcaagatatattacgagttaatgccaacaagaaaaatcatagaatgagcaaccaaaatgtactcacttactactttcaaaatcagaacaagtaacaaacctctgaaagatatccatcactgtcagactcatttccaattgcattgctatcatcatcactaaacaccgcatcaagagaaaaggtttctatatctttgcatttgcttcttctaaagacatcaaaagtaaagtaaaaagcttttaagacaattgttttggatatagcaatagtaaaaaagacagtccctgagattaatgctgataaactccaaatgcagtagtaagagtaaagtgattatcccttttctaccttacattgggcatcacttttgtgtcttcttcttcttcttcttcttcaatatcattcttat

SEQ ID NO: 298888 - DNA, 2476 bp, Cannabis indica
aaatatccgaacggttcccgacccaatagggttgcaggatccgggtactggaaagctaccggtactgataaaataatcaccaccgaaggtcgaaaagtggggattaaaaaagctctggtattttacgtcggcaaagctccaaaaggaacaaagacgaactggatcatgcacgagtatcgcctaattgaaccgtcgcgtaaaaatggtagcactaaggtacgtaattaaattaatatataatcaatttgtcacatgtaacttaattaagaagcttacttaattagtttattgttgttttttcgtataaaagtattaattaaattactttctatttgaaaattattgtagctggatgaatgggttctatgtcgtatttacaagaagagctcgggctctcagaataagcaaatgatgatggctagtccaatgagcaaagaacacagcaatgggtcttcatcgtcctcttcgtcgcacctggacgacgtcctcgactcacttccggccatcgacgacaggtttttcaatttgccacgtgtcaattctctgaagacacttcaccaacagggagacgaaaagctcggtttccttaatctgggttctgggaattttgactgggcaactctagcagctttgaactcggtgccggaacttgtaccgggtaatcaagcttctcaacctcaacaatgtactggaaccgtcggatataataataatgacatgttcgtcccttctagtatccctcctctctgccacgtggatcaatctccaccgaagaataagttagagaactcgatggatgaagaagtacaaagtggactcagaaattctcaacggattgataattcgggcttctatcagacgaactcgaacgttttgactcagaattactcaaactcgctggacccgtatgggttcagatacccggcccactcagcgggtttcgggtttaggcagtgatgaaattacagaagtaggaatgcattttgggagggcattattgcgaaactataacaatcaaagtagggagtgcatttctgtaaatatctgagattctttgggctaacattttggctttagatatgaacaaaaaaaaaaaaacaagaggactattcaaagtgttgggggtgtaaaaaaaaaaagggtagatagcagtttcctgaaaaggaaatcataataatagtatatgaaaagggcctaaacggaatttcgcccccacttttttgcttgttagcatacaaattcgatgtatctctactctttgtataatacaatccaacaaggacgtgatcaatatttggtacatgtcattttggaatcaaaatattgttttataaatttggtttcggtcgctatctacagttaatattcttaccaatgctcttttaccttattgattatttcgaagttgtttttcaaaattaaatgtgttttgatatcatgagagttatagactagttatgtgttgctttaatttgtaagagatgatgaacactaattgataatcaccatatattatatatgatgaggtttttcgatttgcaaaggaaggaaggagtatattggattaataaaaaaaaaattctctgcataataatatttttagatttagaaatcgaatagtttagtttataaaagaattagtcagtattgatcgaatatatattcggataagcattgtcaatatgaacatgatcatgattgcaactgaaaccaacttttgtaaaatatactacgaactaattaataatcctcctccagtagtgtggacgttattaaatttcgacataatatatataaatatttgcacgattaattgatgttgatgatgtacattcattgcgaaattccagtatggcatattgtgccaataattctttattgttaagatacaagcaaaactttattcttcacagaaactagtcgacattcaaaggtatgatttgtttacataacacgtgaaaatcatgtagtacttttatttgtctttttgtgaccaataaacatttctcccgtctatggcgcgatcacgttattataactattttttgttgatttttcttcttcattctaatatggaaatatgttcatatatagttgtgattttgtgttccttttttctattttgaaaaatattacagtcaagggtgttttattttgcgcactattcaaaaataaaagtactgacttttacttttatattttctttcgagtgaaatttaattggctaatgcaacaataatattgaacttctgtaccgcgtagctaaagtataataaatgatccaacagttacccctacactacacacccatgtataatcaattcagctaattaaaacatgaaaaaaaaaatgagcaatttgcggcgaaaccctcttatgttttgatttttatacacttaacccccttatctttatttttggtggcaaaacccctttatgttttaatttttatacacttaacccccttatctttttt

SEQ ID NO: 298889 - DNA, 4105 bp, Cannabis indica
aaaaaaaataactgcattgtttaattatttaaataacatactatctttttgtcttttttaagatatatttgaagtagccactgaggatggtacagtgctagcaatgaagttgcaccgacttggcagagtttcttttagggctgttaaatctaagcgtgattatctgagacatcgtaacaattttaattggctctatttgtccagactagctgcactcaaagagtttgcatttatgaaggttgtaagatgcgatctttatgaatttctattgggtagtttataatgtggtaccgacctgacacttgtctttgtttgaataggccttgggagaacatggttttcctgttccaaatgctgtggactgtaataggcattgtgtgattatgtctcttgtccaaggctacccactgtaagtgttcccctttaattaaattattttatatttaatatattaagtaaataattttatatatttgacacattaagttaaaaaaaaagtacaatacaagcatttgcctgaaggctttactaggaaacacattgtagtactccaatccttctctaagtctgattgtgtaaccccaactctgttttgtaacaataagcagccagaaatgtgacttcgtccgaaataacagctcgttgtgcttgtcctcatactatctcctatctttctttctcacatatgttattattattacaattatcgtggcatgcttaagtgaaaactaatattatgttgctccagcgagctagaaatgatctaatagtggccattgttgtctgatgaagtgtgcaggtgaagcaattgcaaaatccagagccagtttttgagacaatcgttggccttattgttcgactggctgaacatggtctcatccattgtgattttaatgaatttaacttaatggtatggtacatggctcctggcactttgtaaagccattacttttgggggttttatttgtttagaaatatgacaattctcatttattagatcataaacattaattgatctccttatttaatatgggtgttctctttggttccttttctgtctagattgacgatgatgagaaaatcaccatgattgattttcctcaaatggtttccgtatctcatcgtaatgcacagatgtaaggaactctcttattaaagactttcaatattaatcatattcattttgtgcttatttccatgcgacgatattatttaattacgctcataaaccctcattttcaggtactttgaccgagacgttgaatgtgtcttcaagttctttaggaaaaggttggtgatatttttttttgtttggaagctttttcatatgcttcactcactgaagtgaatcgttatttgagattgtgactcgtataagaactcttacatttcttccattgataagagtacatcattttgatagcatgcttttaatggtttaatagcctaataatgttagtctaccgaaaacttttaaatgatcacatttttttattctgaatttagctgaagttctttttcgaaaaaaaaagaatttagctgtagtttttggtttaattatgcttctatgctgcggcctggctgtagtggtattgttctttactgtttaactttagtttagtcatttccatattttcatttgtgatcaataaacctattgatttgtacatagttcttatatatctttccgagttatttttcttttgtcctggtgctaaagaagcttctgaatttaatgttcttgattttttgtttttccaatgaaagattataactccaaaggttctagctagtagtgtttcatgtggctctagtttgatgctgctttttcacttggtattattttcgtttttaatgttaaggaacccacaccaaacactatgtctctctgtctctcagtacccaacatccttgttccatttcatttcatgacatacattgtatgtctctctgtctctcttagaatgatttgtagtctttgaaacataagttatagagaaaattaaatacatacaaaagtatgagttgaacattgatgtaggatataattgcaatgaaatgtagtttaagacaaaattacttaaacaaatcaaaagagctgcaaatggagcagattgagaggtcataattctcaaggctaactgcttttcttctagaaagaaacttgcataagttatattacattacactttttctttatctctgttttcctttattttgctctgttagaatgctagctataattcactcgaattgttgagaacaaagacttatttgagtctctctctcacatttattttccttttcctgttaggtataatttgtcttttcatgagtacactgtcgatgctgatggcgaagatgttgggacatatgaaagtaacagactttgcttttcttcaatatcaaaagatgctatttttctggataaggaacttgctgctagtggttttagtacaaaggaccaggaagtcattgaaaaggtattcactactaccatggaatggagttgtatttttaatgcttttatactactgcagttgaaaataagcttttacatttgggaaaacatctctggccttttttttccccttcgaacattcccgtactcttgaattcttatttatgcttacacggctgtttaaaacattgcaatccaagtataatgtgaatactcctcccccaggggaaagttgtttattagtttgagcttgccgtagaacttgtcgatattcagacaaggtgttgttttctacgatgactgtgtattacatctttctttaagtttatccatgatgtgaatcggaatatatattttatgttcgattatatcatttataccttgaaagtgtacctaaatattgttatctaaaataaaaaaaacgaaagaaaatgtctctaaatataactactttaatttacagttcattgaaggtgctgtagaggagaataatagtgatactgatgaagaaactagagatgacgaatgtgtctctgctatggatgaacaaaacattgaaggtgttggttctttgcacttgcaagatgaggtaagttatatcatactggaaattgtcaaaacgcatctcatagttaagacgtgtttgaattactgcaaaggaactttcaggaattatccatgttttattgtttcttaatacgaactggaatttcattaagtggtctttacttttgtaattcaggacgagcaaacaatagattgtgtggtggcaggggaagtcaaggacgcagaacatgatcaccaagcaggtgaaagcagcgtacctatgactgaagatacgaatgacgatgatgaggtctctctctctttttccttctcaacatttatttatagaacgatcctgtttatgtgttcttttcttttcttgtcaaactcttaatggctgagaaggaaggtcttaagtgagctatatgttaatagtcaagggttagttaaaaaaacagttaggggtgagttagtataaaggaattgatttgtattgttaaggaagatccctattttctaattctttcaatattggaatggttttgaatatttcttctaaaagatcagttttctgttttttggttcttcaggaggatgagtcagcagatgaagaaggtgaggcgaaactagcaagaagcttaaacaagcagaggaagcacgcgatatcagcagtccataggggacgacggaaaactgtctcgagaaattcatacaaagataagggtggtaagaccacttacaactccaaaatccataaacaaatgtgtgtttggtaagagtaacattaaggatttgattagatggctcctgtttttggctacaaaaacatggttagttcaattttgattgtaaaatgagaatagtttctatatttttgttttaaatcattgtgtaaatgttttaatacgcaaatcattacccattgtataatatgcttattaacttttttggccatattaatcctatgattagttaatatttagtgtattttgagcaactccaaaatagctctctatttttatatttttagattcctcccaatattttacttatgttagctaatgtaaaggtttttctttttcaattttcctactttaa

SEQ ID NO: 298890 - DNA, 1780 bp, Cannabis indica
aacctttgtgttcttatttttctttactgtttttatttctgtgcaaatctatcacaatttaagctcaaatatagttaacgaaaatctgcgttaacaataacaatgcattaaaacctagaagttttgttgctacatttagctacacactattcataaggtaaatttttttagttataatagctcatctattgtataagttattttgacacttttttttagctcttagctatatttttagctttgtatacatgagttattatgagtgctctaaggaggcattgggcgagggcaagggccgattttgaaagtaatttaattattaggtccttgctctaaggatatgtagcattttaagacttctaaaaaaaattgcaatttttaaagattttttttttttgccatggaattgggtggacatagctaggcacatgtttggctcattttaacccgagttgatcctgccctacatgcccaccatttaagctaaattattaaaagtatttttttgttgttgataaaattacaccaaatataatatttattcaattattaaaatcctatcacgggattaaattattgaaagtccaaaaatacctctctacttacactaatataataactagcaaagttttgaattacaaaattactatattgatgtctttgaatttcctaatcttcccaagaccacccattaatgatgtagaaagacaattgaaattctagttcattaaaaatggaaaaggatcctacattacaaagaacaatattaggataaagagacatgtcatattgggttggaaaaatttctgatttttgagataagggtttgttgatcaaataactatacttataatttgttagagaatttgtttacattaggtttaccataattgtattttttttcaggctatgtttggaagttgaattttggtagtaaaagaaagaggtaagaaaaatatagaaaaaaaaaatcaatttctcattttggtatggaagtatgaaaaaaaataaaattgattcaacaaaccttttttatatctaacatgaaaaattaatttcttaactttttttcttaacatatcctaaaatacaaaattgatctaaaagtatgtaccactgccaagtgccaatacttaattaattcatcttgaaagtttaattttatgcataataaaaaaattataactatttatctgtgaacatagattaaaaaaagaaaggagttgtgacatggtgattgccttaagggtaaatagttttttgactgtgaagttaagagctccgattcttgattttggagaaatgtgctgcgatctaaggagattttaagaaaaggggcgtgcaagataatatccgatgggacagagacaagtatttgtaatgactcttgggttatccatggtacagatttttatcttaagcccaattatcgtcaacagctgggcttggagaaagtatcgaatttgcttttacctgacggaaattgggacacacccaagctacaccacctttttgaccaggaaacggttagtaacatcttaagaggcggtaattcgagtggccaaggaagggatagatgggtctggacaaaagaaccaactggcctgttttcaacaaagtctgcctatcttattcaagcccttgatcgtgctcctttgtgcaacattgctccggcactatggaacaaactttagaactcaaagattttggagcgacacaaggtccattggtagagtatcctttccaatgctctacccttaagagcccctcttgctaagag

SEQ ID NO: 298891 - DNA, 1379 bp, Cannabis indica
tacatattatacaatgttctcaatacaagaataatcatgagtgcataatgaagctttcaataccatatattggtaaaagtatagtatagtggtatagtacttaatcccaaaaatgttaggtaggtgacaattttgatagaccaacataattttgtttcaattgaatcactattccccataatccccagcatgagtgcaaacttgatttgaactttgaagtactagtggaccaaattaagttacccttggcaactgatatgtaaacattgaccctcaaaagtctttgataaatcagatatgtgcttgtgatggtaaccctacactctgctcggccccctagaaaatcagagagaaaaagtccactgaaaaaacacaaatgtcttggaaatgattggttggtattggctaggactatgaaagcttatatggactttgttatttctaagaatagactaaagaaactccaagacaaattaacacagggcaccagctaggctagctttgctttttctatgtgcatatatagctctctatatacatatgagctatatatgtgtgtgtataaaaccagcgtgcttcttaatttaccggctagtttatgagttgaaaccgtacataaaagggtcagtctgtggttactttacaagtctttctactgagacaaatttccgcaaatggattggtgggtgagcttttgtgaatgtataaaattggtattactaagaaaagtatcagtaatagtcacagtaaaaatttcaaaagaaagaaagaaaaagtctttacctgcattgcatataaatggaaaagaaccatttctgaagataatatcctatcatatctcatgcaagcctgtactggggccttgttcacattcattttattttatttttttcaattatgttatgattatataattaattttatttattttaaacatgcttttaagcctttaacaacgtttgaagatattcaaacttttaatcactattcatattgatgataaactcttttcttcttttcttttgttaaattaatattcaaaataaaaagagtaatagtacaaaagttgatttctataattaaaatactagatacaagttctattaatagaggttcaagaaataaatttgaaaactaaaatattaaaaaataaaaaaaatttgttgagattttaacacttaaccacaatactataaaaatggtttctcccgtcgtttttaaatagttgtttaaaatattctcatcggtttttataactatcgcctatacgatcatcgtaaaacagacaaaataagcgacagttaaaaaccgtcgctaatgtggactttttgacggtttaaaatcattgcctatactctgttataggtgacggttttaaa

SEQ ID NO: 298892 - DNA, 993 bp, Cannabis indica
agatgaagtagcgatttggattgatgatgacccatgtaatctagtttcttttctctctcttacaaaaaaaaaaaaaaagacacacaagggaaagtcagcataatacatggttaccttgaaatagcccaaggggaaggcaggacttctcttcttagatgacatggtcccaatgagatcctcctcgatcgttttgcgttatgagaccttggaggggggtccctccaccgccttgcaatgcaggaccccagaaggggtccccttcattaccacacgccatgagatcccgaggggatctcttcctctttacgccacctagcccctaaagggggatcctatagccattgagagaccctcaacttcctcatgttacaagtcttccatacaagacccccgtcttgaagcattgatttgtattgaccatgaggggcctcatcagcctttggatgacgaggaactaggcttcatgaagaattcctttgcaagaatagaacttagctaaaccataagcatttgagggcatcacaagaaatatgaagctttgaggacaagagagatcaagaacacgtcaaggcaaggacgagtctgtaggtacgaccatgacgcctgtaaaagttgggagagaatagtgggcgtacaaggacgtacatttgatacgaggtagtgggggtgtgatatcaagtgtcagtacgacctgaccctcgagcattactaccagaattccactactttaagcattttccccagccatacgcaacatagtacatggtccccctaatttcgtcagtaaaaggtgtgtattttaatgaggacaaattttatcagtaaaaggttgtatttcgtcagtaaaagtttgtatttcgtcagcaatgaatatcaatggcggcatgtcatcagtaaaaagtcgttggtgatacttcgttggtgataggtgttattactgacgacatttaaagtcgtcggtgataaaaataattaccaacgactttgtgttgg

SEQ ID NO: 298893 - DNA, 4301 bp, Cannabis indica
gaagaataaaatcctagttggactaaagctgctcaacaaaggctttgatactatttgtaaagtatacgtcactatggctacgtgaagtttttttataataaattatcaaaaaaataaaatacaccttgttaatataaatagtacaaatatttaaactctttagtcaaaaagtaaaaaataaaatggaatgttcaaaaaaaaaaaaaatagagttcgtagtcaagttataaccgtaattctttcatttttgataattgctcacttaaaaatgatcattgaattgtaaactctaggatcttccataattcatataaacatattatgatctccaattatataattacttttttatttatttatttattagcttgtagtacatagttgttcattaaatttatgaatttctccattaacatattcatatatcttgagaaatttggacatcgccttcatttttattaataaagtaaaataaatgtataaaaaatatttatattaaaaaaacataaaaattcaaaaaacaaaaaaatagtgtgataaatgttgtttttcttttcttcaaatcaatgaaataaatgattatttatataagtacaaatataaaaataaaaaatacatacattctcttatatatacatttttctgcaatatataaaatagctttaggtattgtaaaatgtaaatgagaaggttggagtattttacaaaatttagataaataatgttaaattattggctaattaataatttttcctcccgaacttggaaattagacaaaaggctttaaatctaacaatctcaataaatttttaatagccaaaaaattttaggggcatgatttggtacatgtcaaagttcagggagaaaaattactaattagcctaaattaatattgagaaatgttaaagggcaccagtggtgcctaacatcctcctatgtgtcagtatcgctattggtccaactaagtatcgggtctcacatagtttaatataataatttttaaggagtatcgctaacgtgacatgtcgagaagatactagacacaactgatgcctaatagcaatgttcattaatattaatgaaaatttttaacttttgaatagtatcacatgacatgtgtatgcgtgtattaattaatacggtgcctattttccttcacaatattcaattttgcgagtgtgagttgtaccactcatctcatgccatgtataattactgtgaagtgtcaacatattattggttggattaattataattaaggataatgcatgttactagtttgtcaatattaataattaggtaattaattaaaaacataaccaatgaaatgcagcttatgaatcgtgctcacacaatacctaaaagcaaggagagccttaggcaaaaattcatacccatccattttcacaacctccttttaattataattaattaatctccttccacattgcaatctctccctttaatcactcttaattattaatttatatattattattattatacacatatagatacaatatacagatgaggaagctatgccctaacattgagagggatgatggacttgaaacggtccttgaagttcctatacctgaagaaatgttcaaaagcatgggtaacaactccaatgtaagatttcaaaatatgttaacatggatgaaagctcaaacttccgataaatggtccgctccaatcatcgccggccgccttaatgagttacgtttccttctttacctcgtcggatctcctcttattcctcttcaggtccaattaggccactccattcatcgcccactcaaagattgttcaatcgtaagaacacatttctattttcgatctcataattatgtatatatatatatatatttaattaatttataattacagcaagcttctacggcgaagtacatagtccaacaatatgtggcggcgacgggtgggcagccggcgttgaactcggtgaacagcatgtgtgtgacgggggcggttaagatgagtgcgtcggaatttcaagaaagcgatgggaaagagattgttgatgtaaagaaatggtcagaagaattggggggatttgtgctttggcaaaagaatcctgatatgtggagtattgatattcttgtgtctggctgcaaagttgtttgtggtagcaatggcaagctttcatggcgtcattcctctaatcaacaaactcccatctctaaaggccctcctcgccccttgcgccgatttcttcaggtcatttttccatcattgcaaaatattatagtttcttttataaattggtatttcatcaaaagttaataataaacactaatgaaatgtcacatttttaaaataatatgttttaatttagataaataatgtgatagcttgaaaaacttaatgcatatatttttttgttcatatatcattactcattaataaataaatattgatctctcttgtgcttaagtgagtatgtgagaagaaaattaatgaaagaaagtgtaaagaacttatccaaactgttggtgtagagaattatttaacatattgaggttataagaacttatgttcaatttatttatattaaaaaaatattatcaaaaattgaactcactttctactattttaaaaaaataaagtttgttttattatttaacaaaatagatagtttaattattaaattttacaaaacacaaattttaaaatagtattattaacccaatgcacaatgatagtaccatttttaccatgtattatgacaaataaaaaatgagattatttgttcagaagaaatttcaccatgtactatgaccaatatactttttaacttgttaaataaaacttttgataatttacgaatttacaatttctatttatctaataaaaaagtatttatattatgacagtggagataattatatttatgggataagttgaaaaatatcacttttattaatcaattaattaaatttacctttaattttatatttaattgaaacatacctctttttatatatgtattatacccaaaatacccagatataagagagtcacattaagagaatcttgaagtgacagagataaaattagtataatgtttaaaaaaaagtaataataatagaatagattttaaaaaaaaaagataaaaataaaagataacaatataaaaaatgtatagaatataatttcctctatatttatactatgttttatgattttgtagggtttggatccaagagcaacaaccagcttatttttagaagcaacgtgtattggtgagaaaataatagacgaagaagactgtttcatattgaaactagaaacaagcccagcaattcgtgaggcccaaagtggcccaaattatgagatcattcaccacaccatttggggctactttagccaacgatcgggcctattgatacaatttgaggactctagactactaaggatgaccaacaaaggagacgacgacgttttttgggagaccagtacggaatcggtaatgagggattataggtacgttgacggagtcaacatagctcatagtggtaagacacgtgtcactgtcattagatatggagagcaatccgccaatcacaagagagagatggaagaaacgtggaaaatcgatgaagtcaactttaatgtttggggtttgaccatggaaagctttttgcctcccactgaatatcaacgacgtcgttaagagcatttttgttgtcgttttgtttaagtatgcaaaaaagaaaagaaaataataatgtgtaaatttattaggttagttaggtttgtatcttttcgttgagaattttagttaattatttggaatgaatcaatcatgaatcatcacatgtatcaaagaagtaaaatcaagatgttaaatagttctataattcgagtttaaattagtataaatttgtattatttccgaatcaagctctataaatatatagaatggtggtagtcattaggggtgttcattggatcacgatttggacccatccgatccaatccaattgaattgagtcatccgatccgatccaatggatgtattggattggatcggttccatccattggatgctttaactggtttttattagattggattggatccatccaatgaatcccatgaatgaatccaatccattttaaccactatttaggctaatttcgttaaaaaaatatatatatatatatatatatgaaaaaatataatttaaaacctaataaataataaaataatatataaaatattaaataaaataattaaatatataaaattataaatattaaatatgattggatggacat

SEQ ID NO: 298894 - DNA, 1851 bp, Cannabis indica
aaataaattcttttatgaggcctctgcacctcttacatacaaatacaaccatccaatcacttgaaactggttcaagcatgttatcatgtagtagataatttggtggattagataatgttagataataagtatacaccattaggatttatttatggtattatatttgcaccccaagtaatatatgtatatatatatttatattggcaccattaggttaagtatacaccattaggtttatactatcaatttatgaccacctaaatgagccaatgcccaaaataaaaattagtttttgaagaaaaattaaattaaatttgtatttggaaaaacaaattgctgtagccaaaataataatacacaaaattcagaaataataatataatatataattacattaaaataattaaaactgtacccaccttgctgaattagagttttttatcccaatattttcacttgataacttgcagcataagtcatatgagactgacttgattccatagtttggtggtaatttgatttttttaacttgctttgtgtaaataatctagctcctcacaaagccagtgacactttgttgattggccagtctttgtatttatttgtttaaattctcatacagttgcatggtacttcatgtattaaacagccgatcaagtttgtttttacatttgttatagtttattggggaatttttcttgatgtgcaggctcaaggcatcatttccaagtctagatccttggagaaagtcttacagtcaagctctaagaaggaagctaagctcattggatatgacgaaataccgatagatgtaacaccatccactgattctgttaaagctgacaatctgactatagaagaacctgtaatctacaagtttgtttccgaagatcgttccaataatgaactgaaaactaactcaatatgcaagagtcctaacaaaaagctccccctaactaatggccaggctagtaaaaccgatgacttagacactgactcacagacttcaggtacagttaatatatattttatatacttattttgtgcaggtcttctagtcgtcaaggtgttaagttttgaccactcttaaaaatatttttcaggtggttcacagagtgaaaaagcggcaacagcaagatcccgattgtatgaagtttgcgctgctaattcttggaagcctccttcatttgaatgttgcaaagatgagggacctggccacttaaaattgtaagtctaatgatgtgtgtgtacatttctttgagcagaatttgcttctcttgtttttatggcatttttatatgaaatgtttgaatcattttttttttctgttcagatttacttacaaggttttagtagagatagaagaagcttctgatatggttttggaatgctttagtggagaacatcccaagaagaaagcagcagctgaacatgctgcagaaggggctctgtggttcttgaaaaaacaggggtatttatgaagaaaaaaaaaactttccaataatttaacataatttttttttctcactagatattggagggcatccttctcagtgaaaattatatatgtacttgagtaatcacaaaagtccttgattgaaactgagatcaacctgaagttgttctatgtactctacccccgttgtatatagtatatttttattacatttttccattgaaggtggttttgaaaaatcacattctaattggaagtagatgtaaccagtggtaactactaggaaaattgctttttttttttggaaagttttggccttataaaaactttcagaataacatataaagtaggggtgggcatccgatccaatttaatagggaaatttatatggtata

SEQ ID NO: 298895 - DNA, 3479 bp, Cannabis indica
ttttacatcttatggattggagcacaattaagaatagtaagctaaatatgtatacacacaaactcaatttttatgacaaatttaacacaaattttagatcttccattgaacatgatcttaacaaaaaaatgaactttaagggtgtgctaaaagatgatgcaaaatttgcatcactataagagcatcttcaatggaaatgtaaataagtgatgcaaatgcaaaatatagcacattttgttaaaagtttactccaatagtatgccaaattgtgatgcaaatatgtaacataacaaaaagttattcaaatttagatcacaatatagtataatgtaaaatttgcatcacaataaatgttatgcttttaattatttttaccattatgccattttaaatattttattattaaatttagttaacatgatcctttacattaaatgacgacttgtattattattattatcaaattttatatttacctttacattattattattattttacatgttttaataaattattaagtgagtattaaatgacatatattaatttttggatcaagatttacaatatgcaatggaataaaatagtaaaatatcacaaaattacttttttgtaccaaatataactcaacttttacatgttttattgaagatagtctaaatgcactagctatttttcatttacatttatgttattttgattattatatttagctttagcattacataacaaacctattacatttattcttttattgttgtacataataaaattaatgataaattattattatttgagtaatttgtggtataaatatttaagtttaactcttagttacaaataagtacctaagtttaattttcgacggtaataatacttaagctatatttctagaacttttttaggtacctaacggttaagtgttaaataaattgtcatgtgacaatccctgattggtccatgttattaaattttattttttttaaaaaaatagtttaattaaatataccaataagaaaatgacacgtggatgatgatttgacatttaacggccagttacctacggagttccaaaaatataatttagatattattaccactaaaaattaaacttaaatatttatttatatttgggagttaaatttaagcatttataccacaaattactcttattattttatattttaataaaaatattgattaaaattaaattttgtatcaaaattttattattttgtattggagtacagtataaaaatattgatacaaatatatcaacaaataataatttttcgtactaaatataatacaatttttacatcttctattaagtacaatcttagttaagttaagttgtggtgacaaaagtggttaaattgttgaaaaatgtgtttcacataaagcatatagctatgcacttttaattagtggcctttataaaagcatcttataatagaataccctttgcacattaaatcaatccaatccataaataaaccttccactctattccatcatcttcttcatttttcctttcatagaatttatacctaaatatatatatatttataaaatatatggcttcctcctcatctctaattagcaacaacaattccatccaagagggtttgtctctacaatttctttttcttcctacccaaataaaaatgtttaatttttattattttattttattttttaatatctatattgaagtatataaattatgttttataaatgcagatcatgatcaagttgttgatggaaaatttataccaagtcaagaatttgttctgcaaaaacatgctgcattctttgatcgaaaccatgatggaattatttatccttgggagactttccaaggtactaattaccataattatttttctttattttatttatatatataatattataaatttattaaccctttaatttttttttaaaaattatatatttaatatttttttgatagggtgtcgagcaattgggtgtggaattgctttgtcaacagtagctgcaatcttcatcaatgttggtctcagttctaaaactcgaccagtatgtttttcttaattcttttttaattataattaataattagcccaaaaaaaaaagaaaaataatagacatacttgaaattttattaattttggcaataccttttcttaacgtgtactcaatgtatgttattattctacttttttacttttcttttttgagaaatatttgtgtgataaaaagttatggttatattataatctgtaatttgtatatcagaattatatataatgatcatatatttgagtagaaattattaactttttaaattaaaaattaatgttttgtgttggtgtgatagggaaaatttattcatccactttttccaatagagataaaaaacatacacttgggtaaacatggaagtgactctggtacctacgatactcaaggaaggtatatatacatatttacaacttatttcatttatatgaatcaaataaataaataggatttattctgtacgaattataatctttatagaattatgctcttagaatttttttttatgttgtaaaaattctctcttaattacaaaattgatgcgaatatcttcattggagatattttgcttattttttaaataatttgttgatataacaacattgtaatttagtttaagagtccaaataaaaaatataatatacataataaaagtctatttataagttataatgagaatatatatgtgcattttgagaaataatatttgtatatttaatattaataaattagattttaagtagcttgaaattgttaaatatgttatttctattgcaataatttatacataaatataacttataataggcacataattaaattattttaaaaaacaagaagatagtaaatcatctttattatgaattaataaaaatataatagatgataatgtgaacgacttttggaatcgaataattaaagaaaagttttgtttttatggttgagagtaccataaaattgacatatgatcatcatttgatcatggattaattgtgtgtttaattatatttataattattaattaattaattaggtttgttggtgagaaatttgaagagattttcaaaaaacatgcaaagacaaatccagaggcattgacatcaaaagaactggatgagatgctacacactaatagactccccaaagattatcctggatggtaataatcattgtttattacttattctcttctttaatattattaatttataaattcatatatatatatatatcactctttatttttattatttatttttcctataaatatcattttaaattttgtactttataaaaattattaattagatcatttattcttgtattttttagaatagtattaaatagattcatggtcaattttttaccattttaaaaaatacaaaatttaaattatcatttaataaaacagaaaa

SEQ ID NO: 298896 - DNA, 2056 bp, Cannabis indica
aatctcaacaacaatcactattctattatttattcaaaaacaacctatataacttcattttttataagaaaaaaataaccttcatgcaaagtgtttgtcattgaatggggacggtgcagttaatttttgaacaacatgggtgtatttggatggaggtgatgatggtggctagtctagagagagagagagagagagagagagatggaacatcatctttggacagagatgatggcggtcgagggtctctcttgggcgaaggttattgaggaaaggcatgcatgtgatttcttaaaaaggtgaaacatgagataatttagtaatggagttatattagaaaattggtttgctatagtgtgtgcttttaaacagataagtaaaatttcttttttggaaatacacaatacaactttacaagtaacaagagtagttccattacattttacatgatcaaattcacaagaatatagtagaatagctaaaaaatgtactatattactaaaaataaaaactttggagtaagcctacagtacattctttaaaacattctttaaaagagttttttattttttatcatgttttgacattcaagaaaacatagtctattatttttttcataatcatatatattaaaattattcaggacctatgcaaatttttagaaaattatcaataatttataatgtcgaaacaagatttacatattttattaaaagcatgattgtttcttttatacacatggtaagtaattattcaaattttatttttcggcattttgaactattcttaattttttgaatacttacaagtggtcctaagtaactttaacataggcaattataaaaaaaaactaaactaaaaaagttttttagataaccaaatagatatcgaatctatcaaaataaccctttagcgagcctactagaaaaatttccaaaacatggcaaaagataactaaatctaaacatttgattgatcattagcaattttaatctttaggtcagtaataaacttactcaaatttttctccgatgatccatcaagaactaggccatttttcattatatccttcacctttgttgcattctccttcaatacagtaattgattttctacacattaaagaattgattttgtctacaacttcaaacctagttagcgacttctcatcacaaaggttcatcccagtcctccaatcatcgactaacaacttcctattggtcaactgatcagtcatcaacggaaaacacaacattggtacaccatgccacaaactttccaacactgaattccaaccacaatgtgttaaaaagcctcctattgcataatgtgagatcactttcatctgattggtcaatgtcactatcaaacccctatctttagtctcatcttcaaaccctattggtagagcataaggcttcacataagacacaacatcaggacgaagaacccataagaaattcactttgctaagcataagcccatgagcaatttcgtcaatttctttctttgcacatggaacaaagctaccgaatgagatgtacaagaccgagttagggagcttggagtttagccactcgatgcaatttgactcgggcttgatgctggtgggtacaagagaactgttgaaacgtgatggaaaaagtgggccaattgcatatatgggttggttctcttgtatggccaaaatggtctcaaactcgagctcataaactgtattacagagaatcatatcagcccttttcacaccttcgaatgctttctttatgaattcgtgcatgatagtggagacatcgagttcttgaaggtttgatggtaagtcatttggtttaatagccttgactcccggaatgtaatcaataatgtcctctctattatctatatatcaacaacaaaagacattaaaaaaaattaatacttttttttagaatagaaaaaagtttatacctcaaaaaccaaaaaaaaaaaattatccaattcttaacatggtataagagcaaaaattaaaaataaataaaaaaaaaaaaaatctctaagcaactaatcaaaccaaaaaaaaa

SEQ ID NO: 298897 - DNA, 2087 bp, Cannabis indica
tgattataatgaactagattaaaatattatcattattgtaatagaatcttaacaagtcgtagcactttaaaaattataatttaccaaacactcagctcagtttttttctacagttctgctacagctgtttttcctcacagcacagctacagttactttttcccacagcacagctgtgccaaactggccttagttttcttcttattattattattattataataattttatgtatgttgtagtacagtatactcatttccaggtctatatgtttccattttaagctttgaatatatataaaatctgactcataaccaagtcatcttcatttaaatggccctacttagctagacaataataatcaaatttgctggcaataataataataataatagtacaagatgtagttacactattatctaatttctcatgaataattaattaaagttaaacacacctctaattatatattacagaaaataaaaccatatatatgccattgctacctttatcaaatattattaatgtacttgggtaacttagagtaaatcataagtaaattattgatttaatcaatctttacttgtacaaataattttgtattatatcaacatcttccttccatattttattatacttttgccttaacaacaatcaattcatttggtcgtgcgtataatattttggttttttttttaagtcaaatgtataataatcttacatttattgttacactataaaaatattataaaaacttattagcgatttatcggtaggatgtgaaagtctataaatattattccgtaatgattaatagaaataaagattcatttagccatctcaaaaaacatattttaaaagatttgccatgtctcaaaaagaatttgttactttaaatctataaagtgtaaaatccgttacagattttatttttaattaattgagaaaaatttgtaaattgataaaacttggggattaaattttccatctccaaaaaaaaccactcttatcccatatcagaaaaattctcaattctgcctttggggtttcaactctcccataaagttcgtattttgtcaattcaaattaggaattttttttttactaataattcgatagttaaaatcattctattctagcttaatttctttctctatcaacgttaaaaaatttataccatagactttatactcttttcacattataaattattttgtaatgaaactatatacatcttacagtacacttaaaatattttaattcaaaatatataaaacccgatacaaaattgcattaataacattatgaaagctcaaaagagtattagagttttaccaacttattgattaatatatactatgtaaacattgtgctaattaacattacttaagcttattagggaaagaggtagtagtagtagtagtaattggtaatggtggattattaacaaaagtcaaggaagatctcttgacaaacctacctttcattcttggtcttttctcagcattgagttttcgaacctcgtaccttattttcttagaaaacaatcttgttcttcttttctctctgtatctcgaaacacgtgcttctcttccttcttctaatcccaatcccaatcccaatgctgctgtgtttgataatctcccaaccccaacaacgtatgatccactacccaaatagttattattactttcatcattaatcatttgagttgtttcacatgatgaactcatcaacatctgcattattaattaattaattaaataattaatcaaaagtaatttctatcttaattaataaaataaaatatatatatatttatataaaattaatacactttgttatatgctaatacattttctacttgtttcaatatctaaaaaaaatttctagtttaattttattttctcatgatgtaaaagttgtacttattttaaaatatttgtaaatttttaaaaaatttaggataatttataaagctgaatataaagtttaaatatattatttaggataatttttaatattattttttgacacaacaaaactatttaaaattacttaaaaatttataaatgttttaaataaata

SEQ ID NO: 298898 - DNA, 1685 bp, Cannabis indica
aaaaatacaaggctatatatacactaaaatgagctaaaaagactcaacaagaacttgtactaaactatagctaaactaagtacccttaatagacttcttcaaatttaaggtggtagaacagaccatactaagtttgtctcttaaaagagggaacctagaacaagaaatttgtttagtaagtaagtctgcaagttggccttcagaaggaacatgatgaactcgtattttcttttgcatcaccttgtcccgaatataatgaatatctatttcaatttgtttggtgcaagcatgcaaaacaggattagctgtgagatgaacaacagtaaattatcacaccaaaccaggagagtagcaggaggtgtttgatgtagctcaaaaatcaatgagttgatccaactgattgtagtgacaacagcgggaatgttgcaatattcagcctcagtggaggacctggatatagtagcttgctttttcgatttgccatccaacagattctcacctaagaagatacaaaaacctgttatggatcgacaatcatctgggtcagcaacccagtcagcatcacaaaaggcttcaagttgcagagatgaaggacatttgagatgcagaccataatcaagtgtacctgcaaagtaccttgggatccttttgacaactacaagatgagattgtaagagttgatgcataaactgacatactttattgacactgaaacctatgtcagatctggttatagttgcatatcgcaaagcatcaactatagacatgtaggttgtagcatcttccaacggatcactcccatagtaagacaaccttaacccactgttcataggagagctttgagttttcactccttgcatattagctttacattgtatatcttgaatatacgtttattgagagagaacaatgtcatcttatgtataaatagcttgaataccaaggaaaaagttcattacatcaagatcttttaaggcaaacttggagcttagtgtagcaatcaaagatgatactttttgagcttgtattcctggagcttgaggataacttactccctgaggagcacttacgactccttgctatctaggaataaagagatgtttgtgtgctactccttgtctgtgatatatgacaggtattcagacccaattaaatagatgactgtttctaactgatccctcaatttcatctttcaagtactcgcattcatttgtggtatgcccaacatcaccatgatattcatatcttttattttgatccctcttatgtcttccgcctttgaacattggcgggggctttttataatggaccatgttctaagtgactttgtaaacattttattgagtatcaactaggctagtatacttagagtaccttgattcaagacttcttccttctttagagcttcattttgacttggagccttagaacttcttttgttccgggaatgaattatgttcaattttgaaacttccatttattgactcattgacactgtatctagtctgtgccactccaaagttggagaaactcatctgcgctaggactaaatatttggaccgagtttgacccgaacatggccaacccgcccagaccagacccagtcaacccgcccagaccagactcggtcaacccgtaaaattaaacccccccccattctgttcgggtgggtcgggtttaacccg

SEQ ID NO: 298899 - DNA, 4051 bp, Cannabis indica
gaatgaaatgaaaattatttcctttccattccattccatttcattacctccaaccaaacaccaccaatttttttctcttttttgtttacattttagactaatacaattcctttcatgagaaaagataaaaataattaataattaaattaaaattaaatatactataaattccttttaattggtggatagaaatacaaatctattaataaatgacacatcaccttaaaattaacaatcataccaactacttaaaaaaaaaattaatctttaacagaaagatgaatttttattattgtgaaaactttaggggattttataacgatatgtaaagtttatggagtaaaaatttaatatagtaatagtttaggggtatacattttatttattttaaatattaattattaaaaaaaatcttattaaatatttaaattaaaaatttaatataattaattaattctaaaaaataaatttttacttattggtagcctgttattacagtaaaaaaaaactgtaaccatcatgcttatattaaaattgtaaccattgaatagtagtatcaaaactcatataggttacagctagtagtcataaaataacatgtcattttattttttttcgaaagtaaataacatgccatttcaaagaattcgaaagtttttatttgtatttagtaaggattttttttcccagttcttctttaacttttgtgcggtgaatcatgtaatctaccgatggaatctgtaaataaagatatagtaacttttgttgtgttaattaccttattggtcctagaacttttcagtccctatgttgtcattttggtccttaaactaagaagattggatttggtatagaattgtagagaacagagtgtaaatgttctaattagagaagaaaatcttcaaatgggctatttaaagaatggtatcatatttttcaaaaaagaccatcttaatatatcttttttttttaattattttttttcaatttcctttaatcaaatcttccatttataaatctatatttttttgaagaaaaaaatagtaattataacgtactatacagttaatgagtaacattctcattttggtaacaaaacaattaattatcagatatctatttgagcaaaaatatatcactgcacaaatagaatttttccatctcaaatcatatatttttttcttcaagtattgatataaggtatcttaacgtgtcaaacattatatcagtgtatcgtattataaatagttagcttaacaatgttttatataatttattaagtaaattgtgtgaaatttaatattaaaatacatcaatagcggtcacctttatagtgcttgagtgtccttagcattttcttttcttctttgactatcccttagcattttcttttctcctttgtctcacatatagagcaaatatattggagggagtgtatgtttattcccttttggccttgggtatattgtttcaaagctagttaggatttttatcttcttaatattgacatttactaaatcatacatcctgaattttttaggccgttaataattctcatgaactattgaaattgttagacttaaaaacctgtctaattttattcaatttgtcaatgtggtgattgtccatatattaagttgtgcccttaaacattgatatctaccaaatcacgatttataaattttaacacgtatcaaattgtgttcttaacatttttattcacgtcagactttctttaataaaattggacaacaatctcaatagtttaagccgaatttttaatgatttaaaaaatttaaaaaatataatttgacatatattaaaattcaggaatctaaattagggtgctaaagatgaagaagtaatccccttcaagagagagtaataaacactacctaaatagtgaagtttcctttttgggttgacagacagagtaataaacaccacccaaatggagaaatttcctttcaccaaaaattgggtatattttccatgatccactattgactaaagaaggaaaaaagaaaacacagctcccatatctttatggtctaaaccaaaaaatctctatataaacactaatctttacaacattattccatcatattctcacgatagaagtgaaaaaattaaaacaaagatatttgcttttattttctggttctataatctaaacaaaaaaaaaaaaatgaacaccatttcgattttttgctttgtgacccttgtctccattggtctgagccaaatccctcatgttcaaggagacttgatctctaatgcatgtagcaaagctttgtacaaagatctttgtgagaagacactgcgagcagaccctagtagtggtagtgccactctcggtggtttagccaaaatcgccctccaagcagcggcttcaagtgccaaaaacacccaagcccagatcactagcctactcaaaaccgctaccgataagagtgtcatagcggccttgaaggattgcagtgataattatgatagcgccaatgaggaactcggtgactcgctcaaagctattgatgccaaacactacgacgacgttaagacttgggtctcggcttccatgaccgatggtgactcgtgtcagagtgggttcaaaggaagctctcctttgacacaagccaataccaaatttagtcaactttgcagcaatgttttggccttaaccaaccaacttggttaaatccaatattaatctagtgtttattttgatttttctagccatttttttttttaaaaaaagaataagaaattaaaagactattataagaataagcaatgtagggaaaatgtaaacgatggagcttgtaattcgtggtgtgctctcaaataatataatattactacgttttgatttatatatattggttcataggtaatttatttatttgcttctctattatcaatatagtttatttgtaatttgacagctgcgagaccggctggaatcgtttttttcttttcatgttaaaatggaatttttattagccataatcaatgttacaagatgagcaatacaattatctattacaatcctgtagactaagttttgcaggcgactctattaccttcacggtaagcaaaataacatgagccaatttgacaaaaaatcataagatgttggatattccccaacaacaatatcctctacagaagtcacgatacctcttgatagctaaaatcccatattcaagcaatcactctaaacataagctcggccgaagagggctttggcagggatgttacgtgatcaagaaaaaagcacaccgtaccaccccactcatctcgaccgaatacttgtcgacatcaactgcatcatggacattcattttcagcagatctctgtttccagacccttggcaccactgttttcgtaccagtaccagccttcaaaggcacctgcaaagtggcgaggggaagtcacaactcggaactcgaatcgttttcatttgcttgttttgttaaatttctcttagcataatatatattaaacttttggatgtatctttctaatcttatggtttgtttgaatacgtatatattattaattatgattcatgttaagtaatttactaatgaaaataattaaaaacaagccgtaacataaaaatacattgtttaaaaatttatatattttttttcttaatttttatttagggcttttttcataaatgtacaataaaaacaatataattataaaaaatgtgtaaaaaaaaattattttaaaaatttatatattttgaaaacttattacatgaaaccatacattttaaccattaaataataaattatgtttattaaaactcaaaataaacaatttcgtaaaattaattaaacagttttataaaaataaacaaattaattttttgttattaaaagataaatgtttattatctattttagtatgaattatcataatttaataagattttttttaataaaatacaatatcaaaattataaacattaatatatataaatataaatcaatacttaaaattactaaaaataaacatgacacatagagtgatataata

SEQ ID NO: 298900 - DNA, 2904 bp, Cannabis indica
tactatgtaatcagcctatataaaggctacattttcatcaataatatcagattagaaggattattcccaaattactacagttagaaatcggtctttgatgtcaccctgattcaagaaaagacctgtggcctgcacaaatctcatcctcgaaactaataaaatagaggacagtaagaactatcaacttaaaaaagtgctcaaaattgtttcgaaaggatgcacgatgtgatactggttcgttggaaattagcttggcggatttgaaaagaataccatctctgatgtaagaagtgattttcgaagggaaataagacagttttggaaaaagaagcaaccaaaattttcttgatactaaattcaaatgaatacaaaaagaagaaaaacttgcttcgttttaagcacacaactttgttccatttaacaatgtttcggtaaaggatggaatttatacattcaatcaaatgtccttgtttttctcaacaaaatggaagttataaactcagaaaaagttgttaccaatgcaaacaagccataccaagctatattctattttaaatattgagttacctgcgaatatcagacggatcctcgaaagccaacatactaaagttacagtagtcaacccaaacaccaacagaatatgttgccaattgcagagctctttcgaaaacttcaacaacctcgcctacatcacacaagcgggccttatgaccagcgtaccttctccagtatccgtggcacaaaggaaactcggacaagaaggaatcataaactaagcaaattttctcgatattatcctgcaatgatcacccatagcaaaccatacttccactcagggtaccaatctagaggcagcaaaatgcaataataagtaaagcaacaaccaagcttaagataatttacacatataatgagacattttctgaccaattgggtgttaagcttaccgttacttctctcaatcaacatttacccatctgttaacatccattactttctaaatgtaagacttttagtttggtttttcattaaaggatttattgttttattaaaatagaggttgaggaaaatagttatttcttgtctagtgttaataggtttagcatttgtgtgaagtctagcgttttttatgaacgattgtgtgaagtctagttgaagcagtcagattttcagaaggtcgagtccaactagaattttgttgctatgtcccctccctaactttagaaatacatattctctcatcataattgtatgttgttattgatatgatctaaaggaggaagacttagtaagtcaagtgtttttatgaacaactgtgtgaagtctagttgaagcaatgagatcttcggaaggccgagtccaattagaattttgttgctaggtcccctcctaactctagaaatacatattctctcatcattattgtatgttgttattgatatgatctaaaggaagaagacttggtaagtgagtattgtactaccaataactatgtcttcaatattgttcaactaagtgttctaaattatattagcatctaatgttttataaatttctaacagaagcagaggccattggagttagttagagtacaaacacaactattcaaaccctgttattcttctttttttttttcttaccaatgatgccatatgtttcactttcatataataaaatttaactaaactgatgccaaatgccaattcaagattacaattcaagattgtgaatttctgaacttacaggataaactctctcaatctttgtaataagtgaaatccactcctcaaagttcaatgagccttcgttaactatttcatgaaaattgagttcatcaaacccacctgaaaacaaattcattataacaccattagctatacaagtttcagtcatgccctaaattaaacaagtttggaaatttaagaaaccccagatgttagttcagctcaaaattgaaccttttttacaaaattgtttatatctcaaaaaacccagttaaataaaaaaaaattcagtgagcacctggagaatcggaatccatagtctgaggatgagtttctggttcggaaacattaatttgggcttccattatacataccaatgtgaaaaagttaaagaaaaatcagctaggaaatagagagaagagaggaaaagaagaaagagttgtttgttcttcattggacagtttccgccattgtttttgagctgttttgttgtcgtttagagcacaatgacatgtcgttttgggttaagcttcatcacatattctcataagcattctccatagagcaaattagattagccattttctatattattaattaaattaaaatgtgtgagatgtaattaaaatgattaattggattaattaagaattagattaatgaattggactcaaaatatgatgtttacttaacttgtaggatcagaatctaagtaataatcttgaaatcggaataaattaaattaagttgtaaaaatatttttgggaaattttataatgcacccccttaaaaggggtacattgatatatctttatctgttttcgtattcaaaataattttttagtcaaattttttctcatggtcatgtaaattatagttatttaagatatcctacaaaattttaagaaattcggaaaaatttaacatgccgaaaattacgttctaacagtgtgttgcacgcgtgactattttattttatactcgtgtaaaatagactgtttgaacattattttttatattgtaaattattccgaatctctcaaaattttgtaggatatcttaaatagctataacgtatatgaatatgaaaaaaattagactaaatttttttttctgaatgccgaaataagtagaaagtgcatcagtacatctcttttaaaagagtgcattgtagaatcac

SEQ ID NO: 298901 - DNA, 1599 bp, Cannabis indica
aatatattaagtaatttctataacaataataaatattagtagttttcaattatgacctaaatggaatgtgtatatatagaaaagaaaacccctaatatatagaaattgactatttctctacccacttattagttttcctctccaccaagaaagcctatctatagaggtgaagaagaagaaatacaatttttggatttcttcaatagaaatcaatgtctcttactatgaataagatatgttctcttaatttattatgtaattatcaaaatcattttgttcaaagatattgcctattatgattttacataaaattatattgtgatttgcataattataaatgaaaattacattagtttactatttcatttttaaatgaaaattcattccaatacaatatttaaaaaaaaaaataatcattttttatctatattaaaatttattctcattcttacttttatttttattttttaaagactaaaattgtagtgaaaataattattcgtagtaataaaagtttaatggaatgaaaactctcataaaatgcatagtgataacccaattaaaacaagtataaaactcgtataacagcacgtctaaataccctatttattattaataataataaaaataaacatcatcaaaaatagattaaaagtaaaaataaatttttatttatttatttatttatttttcacttaaaggtagttttgggttggaattcattaactcctccctagcctaccaattctcccaaatgacaaaacgaaaagaacaagttaagtgttcatttatagcctaaagctatactacgactcaacatcagtctttcacggcttggaaaatccacttttacaataatatcttcatttacaactcacaacacaacacaaacccccaactaaattcttaatttttcttaagccaaatgatttagcaagtttgctatcaagattttcatctttaatttatgttcattggacgattaatatagctgcatatagattagcagtacatgttattcgagtagataaacaacttatgtagttaaacgccttatgtggctgcacatgtatagtatggttatttatgatattttgctaagttttgaaaattttgcaatgtttataatacaataaatatagtttagagagtatatttcacacgcgcttaaagtaaaagaggtatgtgctttacgtccaaaatgtgattgttactagtagtagttgtagtatagatcgggccgtcaattccacatgaaggtgattatggacaaaaatattagtagaagaataaaaataaaaaattaataaagagtgacaataataaccaatgagtttgtgatttttatttttggtaataaatattaaaagaaagcaaataaaacgtgtaattaatggtaaagagagaaaggtttcaagagtcattcatatgcttgtttagctattttgtacatttgattcacaaagttgatacaaataatgtaatattaaagttcattatatttttgtgtttacaagttcttacaaataaaataaatgatttaatcttatgtagaacttagaaataacattataaatcaagcaataatgcaataaaaga

SEQ ID NO: 298902 - DNA, 3371 bp, Cannabis indica
ttttggttattgaaatatactgaagatgcatttagggatatttagaaacgcagttccagtttttaaagcttaaaactttattgctgttttgttctcttaaatttccaggttccagtttttttgctcttcatatttcaagttcatatattcttcatttattgttaatatcattgctattattatcatagtttgttgcaagatttgactaatgctattgacttgctgggctcattgacaaagtttttatctttagtttctctttaattaaagcttgattaaggatttgatttgaacatgaatagaggacagtagagacataattagacatgggttttcgtctttaccttttgcttttttctgaagctcaataattccagaaaatatcatgaatagtactactggggctggggccacacagataattcatgtgttgtgccattcttttatgatattaagacagagggccctttatactttaattattataacatattattagcttcttcttttttcaacctttaccaatttattttccaacattgtgcagcagcttatcatgatatatattatctttcttttaatgattatcataattaagtggtattgtaagcaaccaatgaaatatttcctttaaaaaaactgttcttgaagttgcaaaatcaggtccaactttggtccattaagtatggttcagcaataaagaattaaagatgctataacattattacctcaagtagataattatgacagagtactggaacagctatatacgtataatataagatttgcttcctgatctctatgattatgtacacaggagttggggaatactttctttgaccatagcctactgttggcagctttatactctgtgggttttagttcagctacatgaagctgttccaggaaagaggtacaacagatatgtagaactggctcaagctgcatttggtaagaacatttttccaatgcaaacactttaaataccatgttagagacagttttatagagctacttccacatgaataaataagagaactaaaacaaaaacacccttcttatagatatggttgagaagaaaattataccatatagttgtacgtaacatgttacatttaacacaaagaaaagatttttaccttgtgtttgtttttgcaggggaaagattaggtgtttggctagctcttttccccactgtttacttatcagctggtactgcaacggctttgattctaatcggaggagagaccatgaaactatttttccagatagtttgtggcccgctctgtacatcgaatcctttaaccacagtggagtggtatctggtgttcacttctctgtgcattgtcctgtcacagctcccaaaccttaactcaattgcagggctgtcacttgtaggggctgttacagccataacttactcaacaatggtttgggtgctctctgtgagccaacaaaggccacaaaaactttcttatgaacctttgtcaatgccatccttctctgcttcagttttttctgtcttaaacgctcttggaattgttgcatttgcattcagaggccacaatctagctttggagattcaggtatgtgttatgtaatgtattcattctcttataaacaacaaaaaagaaaattaacacttagcgctgttttgtttcaggcaacaatgccatcaacatttaagcatccagctcatgttcctatgtggagaggagctaaagttgcctatttcttcattgccttgtgtttatttcctgttgccattggaggcttctgggcctatgggaaccttgtaagttcaatattgacttgtttataagattaacacattgacaaatagactttcttatgagaatttgttactacagatgccttctggaggaatactgaacgctttgtatggtttccacagccatgacataccgagagggctacttgcaatgactttccttttagttgttttcaattgcttgagcagttttcaaatatactcaatgcctgtgtttgacagctttgaagctggttacaccagccgcaccaatcgcccctgttccatatgggttcgctctggttttcgagtgttttatggttttgtcaacttcttcattggggtggcactcccatttctctcaagcttggctggtctcttaggaggacttacacttccagtcacatttgcatacccttgtttcatgtgggttctgattaaaaagcctacaaagtacagcttcaactggtattttaattggattctaggttggttggggattgcattcagcttagcattttccattggaggtgtgtggagtatggttaacagtggactcaagttgaaattcttcaaacccagttgaaatttctactcaactcaatgctgccatgtgttgttgtaataggaactgaacaatatgtattcaattttgctgcaaatttattactgcgtgtacgttatttattatatataaattattatgtgtgtccatatatgtggcacatatattgaatgttgtgatactaaattcaatcctatgcctgtgctgctggcttttgtaacagtaatgtcacttccattaaatgaagaagacaagtatcagtactgttgttttgagtcataatatattttgccaaacaattttgcatgtcactagatcaagttcactattgtccatgtaaggtgtagcctcgagtattctagtgttatctatgtagctgagtcttttgatttgacacaaccaatcctgtgacatcatatttacaaaattttaggtgaaaacaatagggaaattatattgagcacctatttttccggggtatatagttttaattttaattttttgattttactgtaatgttttagttatctcagatattttctaaattatagaaaatttaaaataatttaatgcgctaaatataaatttcaaacagtttattgtaattgtgcgtttttattttacgcgtgtaaaataaataatttaaattttactttttgtattttaaattattatgagtttacattctcctataaaaaattttaagattaaaactatataaatcttaaaagtactaagctggtgcagcataaaagcatccaaaccaatatgcgtgtgggtttatataataagaaatatatgcattacactttttatttattttgacagaacttagtctaattattttttaatgatagtatacgttgtagctaattagaatcactagtaaatttttagaagattctcaataatttgtaatgtcaaaaataaaatttaaagaatcacttatcacgcatataaaaaaacaatcacgcataaaataaaatatttaaaccttattttcaacacgataaactattcaaaattttttaaaaa

SEQ ID NO: 298903 - DNA, 2892 bp, Cannabis indica
catcagaaggatggtgcgccatagagttggcgtgtgaaatttccgaagggacttggcttcagtggaagcgtgttctgtaggtgccgttgggtacggttggtttgcgaacccaccccgaggggtacaccatacttagtccttgtcaaaaggagtatgcattggacaattggcgggtgagcgactaacagaggatgtgttagcttcaaggtcagtgttgcaagggctacttggttgattggaaggacgttgtgattgactcggaggagttcatgttgggggaagtattctagtgcggaggcactactccatgggagattctgaatagtgacagtggcacaagttctatgatcgagtccaagagtgagcgagggagttcgccaccaagagggtggttctacggaggtagagggacaagtgcagaattaggattcgggtgaagcttggagtaagcttaagagtcgagatcaggtggatttgcctgcggtccgtcgatgagggcatcgacatgttaaagtgggggagaatgtaacgtgcatgccaagacggcacgttacaagataatctacaactgtacagtattgactctcgaaaatttggtttcgatggagagaaatgatctagatttattcaagacaaggagaaattaaaacatagctattttttggaaaagacaaaactttggatcgttttttggctcaagagagtataacattatttcattctccatttctgaattaataggggaatgggagtttttgttatagtttgtttataagctatttcggattctgttttggttttcaattatgttcgtaatcctgagaggttagatgttcgttgctcaagctttaggtttaggcatgctgcctaagccaatctactttgtttgtcacatatctatacaattcttaaaaaaatcagtctcatttgttataataataaaaaataatattaaattaatgaaaggcataaggaacgctataaactcacctttccatccataccctcaatacctttcgcggcatcatctaaggtagcatattttacaaaaccaaaaccctttgaatatccagatacacgatcagtcaccactctagctataaacagcaaaagattggtgattaatagttaataaaaataatattggggtaatagattcgaataaatgaaagaattatataccgtgcacaacttctccaaactgagaaaaggcttcctgcagtttttctgttgttgtgcgtttactgagtcctggatgaaagtagataataagttccaacattgaaaagacaacagcagcagaaaacatgtattgtcaacatattaaacaaagaaaaaacatatagtttacactctgcagaagaaacttatgaggtttacaactaaatttttatttaagtactgatttgattgtaatttgggctcagcaaaaggagagtaacaaaggaaaacttgaatgtgaaaaaaagtagcattaggctcaactcaacccaaccaaagaaagaacaacttaacactcatccagctattaaacatattattctagattaaataaacaataatttaaaagaaaattacataagaatgaatatctaacccaacatataagctggtgggacagaaagtaaatggtaagaaaaacctaacactttgtactatggacctacataaaataaaacaccatggtatgttattatgcagtgtacatgaaatggggttgtatgcgtcctaatcacagattgaatgagaaatatagcaaaagaaaaacaaaataccatctttatttatcttaatactatcaaaacacacagatagcccaaatcaacgaatcacaaaacaaagctttgagctatgtttatagaaatagaatattaaaataacaatgacccagataacaatgaacagcatcaagtgaaaggaaaacaaaaatagttaaaaggaacataccagagacgaagaggttggtgctgggctcagccttctcccgagcctgagcggcagcaggggacggcggaggaacgaaatgagaagttgaaatcgtggagaacaaccgtgatattccgcgaggtgccgccgctgccgccgatcttagagccatctattctgttgtacctgggtttaaccttaaaccctctcttctcttaccacctgattgtctagaagaagattttgtgttgtgtttggtctgggccttggccttagggccttccaatgagcggtggggagaaaatattaaattacagagttccctctctttaaaagattttagcataaatgtccctaattttcgtcttgtttggcagtttagtacctaaaaaataatttggtaaaattgctggagttccatatagcaattacgtcctttttgtttatttttctttctcgacgctagaggtaataaaatggaatagaatggaaatgaaataatcttcattccatttctttatttggttgcataaatattggaatgtcattctaatggaatagtttttacactatttttgtagaataactatttcattttgaaatgaaagaaaaaatcattccaatgcatgatgagaaaaaaaaattagtaattttatttgagttcattatattcctattctcattctcttttctatgttttccttcctctcaatcaaatgccacataaaatttagtttttcaaagatttttcaaagattttttttttttacttttctatacaatataggaaatctatgatacaaatactaaaagagatatctgtttcgacatccaattttttttttataatcatgtatgctttaattattacgatcacctgtaaatattttaaaaaattatgaatagtttatagtggtaaaaataaggttgaaacaattaatttccacacgtataagaaaaaatagt

SEQ ID NO: 298904 - DNA, 1509 bp, Cannabis indica
agaaactcaaaccgtatttttaaaaaaaaattaaaaaagagtatataagataatttttctatttttttagtgtaatttttagtattgcaattagagtaaaaataaattttaacattaaattcaataataataaaatactaaatttaatatataaattggagatactctcataactagagtatgaaattggtatgaatatgataaggctctttataataatctattcattattgttatactaaaatcaggttggagcaaatattttaacagcgagtgtagaacacgatacttattgattggtcgtgaaactaacgagcgctatagcgcgtgtaagttgtgacaagtaaactgtgaagtatcacttataaaaggtattagacaccactattctttaataataatactctgttattagactattagcgatattttataattattattatattagtatttatattactaagtatagttatgagacaccaaggtacttagcaactctatatataacttttataattagttagtgattttttataatctttaaattacaataaatgagatccatacaacagcgatattacacctcataagagtattagatactataggtaccctttattatttttcaatgtccttaggcattattagtggctaacactacttaaatgtaaactttgagattagttagcaatatttcattagagttattacgttaaattatatggagaaatgctaaagggcatttatggtgtctaggacccttgtgatgtgtagtattgttttagtgtaattcaatatcgggtaccatatattttacttttataaagattatagagaactgctaattaattataaagtgtaccttcatagtggtgctacgcaccttggtggtccataacaatactttatataagactcgatttttaaatacactaataataatatgacactttggagagtactagctattaggcaccattagtatcttttagtatttttcttaaattaaatcatgtcagattcgatgattaattctatcaataatgatgtgatacttcagtcggtgttaagcatcattaatggatgtcatttagcatttctctacataaattgtaaagtattgttgtataagtaatagtatgagcaaacgtaaatcacatacaaacttgatacaaatttatgtgacaagttatttttaataagtgatgttaaaaaaattaataatcccaatagacaaatttgtatataatataaaacactataatatatatataataattagatatgcgtacatgatttatctataacaattaccataatttaatggtgtaatactatcaactaagtctttctctctagatttctaaatcagaagcagttttatttatctgattatcaaaagtatacaattgtaataatattatatgtatttatagagttagggagactacatagtcaagataaatcaaattaagtgagtcactatgtcaaatagaacgagaagaa

SEQ ID NO: 298905 - DNA, 2155 bp, Cannabis indica
gagagagagagaggagagagagagagtgaaagagagggaaagacggaaagagagtgtgaataggaaaattaaatttgaggggtattttgggtacaaatgagtaatagtggaattaatttgtataaattagtggagggtatatattttgaaatggggtattttattagggtcaaaaattgaaatttccctttgataattatactaaaataagtaaaataacttctacaaaattaaataaattacatagacttaaatgtttttttttttatgataattacaccctcacataataaaaattttaagtctgttattggccacgtcacgcaagtgccacctctacgatggtaacacgtgtcctgccgaattgggggacaagaaagaggttaattaattgaagattttagatatcaaataataataaaaaaaatagtaatgataaaacaataagtaataataatgttaatgaaaataagaataatgaaagtggatattgtaaaataataatgatgattggatttggagattcaatctaatattcaaagtagtaataataacataataattataaaaaataaaaagctagctatgctacattgtaacttttaattgcggcctcttctaatttatttgttatatcttttcagtttgaccactctattaattaagcataaatttttacaccattttagcaaacaccaaaaatcagatcctcaattctatttatctaatgaattaaaccttaaaacacattaattagtctaatccattcacactaattgagagcttacaataaattggatgtaagtttagttgtgtggtccacgagagtgtacgttgtatagcttctcgcggttgttagaattggaggagaatggtcgcttatcctttacataaaaggtgtgtaaaagaggcagaataagttcatgtctaggaccctcgtcctactaggccccgaaaaagattcttttatttcaaatataacgtaataaataaataatagacatttatacttaactttctatatcaatttttattgtttaatataaaataaaaagtttcgacaacaagaattgaaccctaatctaatggtggaggtttaaaacttttaccattgtattaaattaattttatttaatattaaatgtaaaacgaggtttatataatattaagggtccataattttgtattgtcttaggcatagtcttatagcgaatgtacacccaacaacacaatctctacaaccattagttagtgatgtgcttgtgttcccgtaggtctcgctgcacgacatctagtaggaaattttcttcaaaagttaaagcctttgaaaaatttattcgaagcctaacaagtatatcgaaggccaaccttaaggttgcttttcgagtttgtcgtcccaagaaaactaaaacgacagtgaacttacctcccaggcttgttgtctcgagatggctaaaacgacaatgaacttacctctcgagtggataaaaatgacgactaactcattttccaagcatgtcatctcaagagggctaaaacgacaataaacttaactctcgagcagactaaaatgacacctaattcatcttccgagcacgtcgtctcaactctcaagagaactaaaacgacaatattttaaaactttacataataatgtaaattttcaaaataaacatattgtaacactataaattattttagtattttttttttggttttaaaaaagttggatgataatctaaataagatttcttttgtccataggatttactttacttttatttatttgttttaacttgtagacattaggtatgagtgagaaagtatttagtaggtgcttgcatcatcatcttcacaacttgatcatcaaaacaaaacaaaacccctttttctttttcattttaattatttatttttctatatgagaagtgagcacagaagagtacagagttagtagtagtagtagtagaagtagtagtacaataaatactgttcacaacagtactctctcttgttctattgaatcagcttttaaagctctttaaatggcttttagattcgcaagattttactcttttattaatttgttctctcttcttgtctttgtactttttttaattttaattttttctacaataatatatatataaatata

SEQ ID NO: 298906 - DNA, 5481 bp, Cannabis indica
tggtttatatgcttaattgatgattgaatgttaattaaattttttatgaaaaataattttatcttcattctgaaaataatgtatttgaattccttgtgcaaaattaatcaagtttagcttttacgaaacttgattccaattaaaaacaagtgagatatgagattttgaagattttggtgcattgagtgtcgtcactcgagcaccatgcgcacacaggcactcagacaaggtgactgtccgcccgtgtctaaagcccatatgtccccttgtgtgcgggctgcttgtccaaagattgaggctgcatgcagccttgggcactcggacaaggtgctttgtaccctaaattatcaatataaaatattatttttaatatttgaatctacatatcaaattttaaaattaataatatttaattattataataatttattattaatttttaaagtttaaattcaattattgattatttcatatttaaattatggttagattttaaaattttgttaatttcttaaaaatttacatattctctaataataagattatatattttaatattagatatattttaaattaaaagattgttttatatgataaattataaattatcttatgataaattaaataacaatacatttaaaattatcttacatattttcatagatatcctaatcataaagttttttttgaaattcataaattagttattgtatgatataatttactatttataaatgataagttaaaaaaaataatatttattataatattatatcattttatttattagaaatttataaataatactatatatatttaaataatttagatatttttgtgaaaatttaaaaaataattaaaatgagatattttagaatataatttcgaaaattattatttatttattgttttattttaatttaagacattattagaggaaattagagggaaaattaattatttacaaacaaagttatggtttacttaccggttaagggaaaaaagaaaaataaaaattagttgttataataaaagggatttagatgctaattgaaaaaaaataaaacatatattttattaaacttatatgaagatttaaatacataatctgtaaaacagattgtctttcagttgttcaagttgtccgtaattctataattatgatttttttatttggcaaagttgttagtgattgtaagaatctgttaaattctttgcgtaatgtttattttcattttgtaaaacgatcagcaaatgtagcggctgaatcctttgtgagggcctctatatctcagtctgatcgcctgtttaatttggacactgttccagttgagttgttgcttagtttgattacataaatttttgtttaattaaatgactttcgttttcaaaaaatacataatctgtaaagtcattagattgaaagtgatattatattggctaaaaaaatagaaatggcttgaagggacgttattgctgatgaagtagagagaagaagacatgttaaccatgcatgggtttaattaacatttgattatataccaatctccattacttcttttcatattttggtgcttttcttttctttcactttaaattcatgtatagtctcgaaactcgtatctagaacaaactatatattggactttagaaaatagaaataaacaaaaacaaaagaaaactgactgaatttaactctaagttgagtgacgcaaacgcagtactcctaactgtcgttttcttcagattctctctagtaaattgaacttgtattaatttaaagatagaggtcgtgataacgtactagagtagtgcactcgtattctagttaacaatattttataaataataattaaattaaattatataaaatttaatatataattactataataatataaaaaaatatttaattaaattatttctaagttttagtatttttcttaagggataagttgacacactattattgaaaaatactattagtctaaatccatcattgtctatatttatattgatgcttattagtaattattccactaaatgctaataattaaatattaaatttaatatcttttaactaatattgatactatatagtagctagtggtgctagatacttcgtaatattccagtatatcatactgttataaagaatcatataattattaatgcaaaattatatattggataactcatattttaatttagtaatattatataaaattattagtcacaaaattttaccaagtaacataatggtaatggggtggttagtaacaatgctcactaattaattaccttccaccaccgctaatcaaataagttatgaggtcaaagaaacagttaccttttcattaattttcctttacacatttccaatcaatttttctaaaatgctacactgaaaaccactaaatagttatggtatatagctatcatcagctacctacctacctagctagtttagctatctcagtcattaactcaagaactattatacatacaacattatataatacctataccatataatctgagcagagcagagaaaagaacaaatagaagtttaattaaaaacacgaccaaaataatggcttatttcttcgaatatctgagctttgtttatgtccacctctctttctgggacatagctattgcctttctggggctatttattttcacatgttttgttcagaaaatgaccaacaaaggtccaatgttatggcctgtcattgggataataccctctttagtcatcaacatcaacaacatctaccattggatcaccattgctttgatcaaagctaaaggcacttttccctataagggagtgtggatgggaagggcttatggaattgtcaccgttgatccatcaaagatcgaatacatactcaaaacaagaagcaaaaacttcccaaaaggcaagtattataaagaaaggtttcttgatttgcttggtgatggtatttttaatgcagatgacgagttatggcttcaccaaagaagagtcgctactatagagatgcattcgagtcgtttcgtgaaatactcacttaaggcaatgcaggatttggtacaaaacaaacttttgaaggtgattaaaggacataataatattattgaccttcaagaattgcttcttcgttttacctttgataatatatgtgctgctgctcttggagttgattcagggtgtttggctctagaattaccacaagtaccctttgccaaagcctttgaagaagctacagagtgtactctgttcagatttttggtaccatattttgtatggaagcctatgaagtttttgggacttggtttcgagaaaaggcttaaagaatcaaccaaattcgtccatgaatttgctgataagattgttatggatcgaaggaatgagctcgttgagcaaggaaacttggatggtcgttctgatctcttgtcaaggcttatgatcatggacaatatcatcaatactactaaacagaatgaacagagttttttctctaacaagcttttgagagacttttgtataagtttcatcttggccgggcgtgacacgagctcggtggggttggcttggttcttttggttactacataaaaacccgaaaatcgaaagcaaaatccttgtagaaatcaatgatattttgtcaaggcgcgagtccaaagaagaagagatagtttttacaatggaagaattgaagcaaatggtgtatcttcaagcagctttgacagagtccttaaggctataccctcctgtaccaattgatatcaaagaggttataaacgacgacgttttccctgatggaacagtgattaaaaagggcgctaaggttctttactccatattctcaatggctcgaatggagtggatatggggaaaagactgcatggagtttaagccagaaagatggatccaaaataatggtcagttggtgaacgagagccaattcaagtatgcagttttcaatggtggtccgaggttgtgtctaggaaaaacatttgcttacatgcagatgaaaatggtggccgctgctatactactgaggtaccaagttaaggttgtggaaggtcagaatgttgtcccaaaactcacaactactctttacatgagaaatggtttgttagtgagtttcaagcctaggttggccaactctgctgtgtgactcgttctgattcacactcctcaacttcgatctatatccatctatatatattgttatctcttataaatgttattgtggtattataataatcagcttgatggaccaaattaatacttgtttactatgttgagtagtatgaagcttctatagctagtgcatgtattcaaaccaattaagtttgtgattaacaaaaatgtttagtctatgagggaagattattatgtatatccatttggtttgaacaagtttaactttttgttggaccgtgtgatataaaccaagtcaccaaccaaactcttaagtcaacgcttttcacttgtatggttgaagaaatgcataagagcattttcaatggggttagtttattggagtggtcttgtaatatatgcattgtggtccaatttttaaaagtaattttatgtgaagtcttacacaatataaacaatggatatatgatatttttttttctttttctttgttttttttttcatttttttattaaaaaatttattttttacctaatgtgatatgcgtaactttttgagttgtgagtatttttttttttaaatgacaaattttatgtagatgaagaaaaaaataataaaaaaattaagattttaaaatgatatatgttgccctttattagagatgctctaaatggcattagtaatgtctatcttcatcacaagccgagaagggactaggaaggaacgggataggaccgatgaatgcatttcaacaaagggggagagtttgaatttttgggagttagagggagtcattttctctccttctcttctctccatcttaccaaataatagattccacctccaccttcaccttctactttcttctcccccaccactctccatctaggtattattagaaaaattaatcatcttaagatacaaaattgtctataatataaaacaaaataatatgtataataattagatatacgtacttgcttgatttatagtaattactacaatttgatagtacaatgctatcaactaagtcttcctctctagatctctaaattagaattaattttaatttctatctgattatcaaaagtatacaattgtgatgagccactatgtgaattagaaaggggacttagctatataatcttagttggactgagtctgtatcaaaagtttaaattaactaaaaaagtcaatacttctgtttcactaaaattttacacacacaatacccattaactattgattaccaagaatatgggctgacacattaaaaattatctaattaactcaaattttaataaaaccaataaaatttaatgtaag

SEQ ID NO: 298907 - DNA, 4720 bp, Cannabis indica
aaaaaaaaaataaaagaaacaattattagtttaacattcatattgccacccccagaaaaactaataacttttaagcaaaagggaaaaagtcaaaagaacaagtcagtggtgggaatgcaagatgttcattgtttaaagttaaaatgtttttcaagtaagaaaacagtgttcctttattgtgaatagtaaattaagctgcttaattagttttggtatgttcacagccatctccttgcacatttacaaatatttctaacatattgggtgatggaaacattgctgtactgaaaacagagtttttcaggctcccgaaataagaatgtacaaaagcaagtagatttgtacactattttacaactcgtttctccacattgtgcttcacaatcttggggtcaagtattaataaggaatgttttggtgtttggctgccttgagatagttgcaaattcaggttttactaataactattagcaataactgtgccacatacctatatcatgtaaagggggctatccgtataggtgggcctcctagctagtatggccttcaaagttttgatacttgaaaataaataaataaataaaattaaaatcaaaatcaaaatcgggtgtggtgtggtgtggtgtagtgtaggtcaaacaagaacttccaagatagtaattaaaaatcaatatctttgttttccctccattgtcatttctgtccaacaacttaatgacaaaacaaaaagttggaacgaagaaaagaatgaatgaaagaaagaaagaatatgaggttgagtttttctctctatatataaatggactttttggttgccatataagaaatggtaaataattctcatttctcttctgtctatgaaaaaccacaaccagaaaacattttcaatgaaatcccacttatgctttttatcaacatccactaaaaatggaagagaagagagaatatctaaaggtaaaaataataacaagatatatcccaccaaaaatcctcaacaaaagaggcaacatcttctccaaagccaaagcaactctttaaagacaaaacgacagaacatcacctatctatttattcctcttaaaaagctttccaaaagctaagttccacaccttcatttggactctcttccacaccattttccttcaactgagtcttttggcctctcccctgacatcccaccaaacccaactcccttatattagtcacaaaactctgccttcttggactttgtaccccagctgcggattctctattttcatttcatagtttgcatcatcagaatctatttgtagtcatttattattataattatttttattctaaaatgatttcttttcaaattatccacttcctatatatagcaatgcaatctaaatggcctccttagaaatcaatcaaacttttttatacactagtcagtcctattatacattgaccaagtttcttagtactctcctttttaccattcttcaaatggccacaaagaattgtagtgatggcacttctcatcattcctccattgcgttgctacaagagaggtttaggcaattgcagagagcaaaggagatgagggaagagaaagagcttctaagattgttgtctgaatcggagagaagtaatccgactacgacgaaacgttacgaggcagcagcagcagcagcagcagggttttctttccattctgagtctcttcttcctcatagtcatagtcatagaccaccttctcatcatcaaagctctatctaccaccttcaaccaaacttgcaaagcaagcatggtggtaatcttcaaaccagtactgataacaccacttcaatcattggaaacattacctccacaagtgcagccatcagcaataatagatcgtataatttggatggttcagatgtagacacctctcttcacctgtgaaattaaaaaaactatatatcaattttattaagatgtggtttgtgggcttgtatatttattctgtattagttatatatgtcattttgtttttaaaatgtattatctttcagggagagatatgagtaatgcagctaatatatattattataagtatatgtacttgtacttggagcatcatattgatacttaatgttcaccatagttcatatattctcacggactatgtgaaccactcaataaaatatatttgctacttttctaaaaaaaaagtaaaaattaattagaaaaatctattattttgagccaaaccattacaataaaagtaattagagatggttgagttttgtagaagcttcaaaaatattttagtaatatgattagctagcattgtctagaatattatagttggtttcttttagtagtataaataggaaccttgggtactcaagttatatatccaataacagtatttcaaagcgtgcccaaaagagtttgagtgtaaacaaagtgtctaattgagttatatacaagtgtattgtaaaagggtctagtagttaataaaagtgtgagggcttggtgtgtttgttaagataaagtgtttagggcttggcgtaattactttttcaataataaagtaattacgttttttccgtgttgtgttatcctacaagtagtattagagttgagtcggtttataccaagagtcatttgttaagtatcttagagtggtcgtgtgcggcttagtactacagtgcttgcatgaaggatgaccttcaagtggtcggtagaattatgaaacttaacaatcaaaattacaacacgtggtcgatgcacatggaggcatatctccaaggtaaagacttgtgggagatcgttggtggcaatgaagtcacacaactactttgaaaaaatggaagattaaagcgagcaaagtcatgttcgcgattcaaactacaattgaagatgaaatattcgagcacattacgtcgacgaagacattgaatgaagcgtggaatactttggcatcattgttgtgatggattttctagttcacaagtatacacatcgtttacatgtaatatactcacaagagtgaggtcatgtttggcatcattgttgttatggattttctaatttacaagtatacgtatcgtatacatgtaatagactcacaagagtgaggtcgtgtagttatttatcaaacagtgtaatttttaattctatttggtgataaaaataagaaaaaatgtttaaaatttattgacaaacaaaacaaataaattaaagtacaatttaacaatgattaaagattacggtgattaattttaattgaatctaatttatgtggtttagtataattcaattcctaaaatttaaatttggggatttactaaaaaaaaacttatattctggctagggcatatatatatatctcaacttatatgtaaattttccactctcgtgataaatttaacaaataggaggcattaagcatgaaaatcttaaatgctacataaactatataggtttttctcatgctatatcaaaatctgtgtctatttcacattacataatcaatactcacttcttagattccgtattgatatcagaaacagtaaattgatggacaggaaattaaaaaaaattaagaacgaatgaaatatatacacaaagaaaattagagaagaattcaatcacattaaacaaaaataaagtatcaaacaatctctattaaaaaccctaattcaaagtctagctactcctattcattgtaaataactaccaacaattgattaagaacataataaaacaaaggaaaagaaagaattcttcaaaaaataattgatgaaagtctccaaaaccgtttctttattccaattttcgtccttaataattgttactttgaaaagtgtaaaagtggttatttatataatttttcaatagagtttcaaccctaaaacttgtcaattaaagcagatgggccacgatattggatatacatgtcgcagcccgtatctttttacaagcctaagaaaattctagaaatattaggcgggtggcgacatgctcttgcagtgctgcagcccttgaagcttctttttcaacaaaggccaaccaaggattccatgtctctaacagtcatgacaccctttatggtcgacggtcatcccaacggtcatcattttacatattcttaattaatttagtccctgtattttttagccacgtgttgctaatcttgacacgtcatcgtcgttaaattttaaataaacatataccactattatacataacaaactaaaaaataaatatcatcaaagaataataatatactatacaataaaataaaaatatattgtacaacaaaatctatataccaacaacccgcaataactcataaaaaaatttaaaaaaaatcgacaataacttcaaataaaaaaaaatttaacaaaactaatatagacatactataatttttaacaaatctatgatttgggccatttatcatttcatctatattcaaattcaatacaaaaaaaaaaaaaaaaaaaaaaaaaaaaaaaaataaaaacataattgaccttaaattttatattagattttaaacttaattttttgaaaatcgagggttgattaatcttttttatttatttatttattttttggatcaaaagtatgattaggggactatttttttttttaccgtggatcacccatatactactttttcacatttattttttctctttttacgattttttattttggttttttatttttatttttttacgatttaagttgctctatt

SEQ ID NO: 298908 - DNA, 2478 bp, Cannabis indica
tctttattgaactggattttaaatcctgatattcaacttggaatcccctctacccttaaatttcagttcaatatatttgctacttgtctttactatgagatgtggatagcaagaaaaaaaaaaagcttttcatgagggtgttattcttacattggttggtgttaagactttggttcaaagttttgtgacacaaattcttcaaaccttggctacgaacatcagaaactcttatgtggactccaaatcaaaagtcttgttccacgaatactccactgataaaatttctatttttgtggatgttacttgtagagtttgtgggcggctggtgctatcattgctaaaaaccatgctagggtggtgttggaagcattaacagttaggtatgatatttcctcccctttccaagtcgagacagagaccatagtgcctctccatgcagtttctctttgttttttacgtggatggcattgcctggtgcttcactcagattgtaaggtgttgattgatggcatctcctttaagagagctcatatttggcaagataaatattgatttattcatctcttagagcaactagacactttggctgatgcaaaaattgtgtggatttgtaagaaccaaaacaatcatactcatgctcttgcagtttgggttgcctcatttgcatatcatttctacttaaaactttttctctagcgtggttttgtgctcttttaatgaaatttgtaattaagcaaaaacaaagattaaaaaataagagcatgtttggtattgttttctattttttatttttaaaaaaatgctttcagaatgagaataaaaaatagtttttgaattttcaaaacacaagtcgtgtttggttaatggtttctaaaaacaattttttatgtttatttattttttgaaaaatactaatacattgagacctaatatgaacaagacccgaccaggacacggaccctgacttagactcggacccgacctcggacctcagccccagccccgtctctggacttgaattttaaccccagcctcggactcagacccggaccttgataaaagagaaagtgaagagagagaaaataatatgagaaatgatgtgagataaaatgaagaaaaaatattgacaaaaagtgaattgtttttaaaacaaaaaataacattttgttgttataaaaattcttgttttttgcaagttattttattagagctatttttaaataataaggccgaacacacctaattgtttttttaaaaaactattttttatttttaaaaacagaaaaaagtattttagctatgatgcaaaatatgcactaattttagtaacgatttcctaaaataataataatgctaaaaatgaatcaaaattctttctactagacaaaagcaaataaagaaatgagaattttttatcccaataactctaataaagtttttaccttttctaaaataattgaaataaagcgttaacttagacctcgtggtcattattacaaaaaaggttcacatgtatggaagaaacatctacgcaaccatattgattgtgggtaaaagtccacttagccatattatgagctataaagttacaagttcttacaatactaaaaaataaacaccccacaaaaaggaagtagttattttacaataactagaatagttctcaatctcccatctagagtctactccattgagagagtttattatcaccttagagttacttttcacaattacaaacttgcatcccttttcagctatcgtctccgaagccaaaacacatgttgcggccaagccacaaagagctttagaaaagtctaatctcgttgttgtcattcaaaccatcgcaccaaaatgatctcgagcaacaacggtaatacacatgttctccatctccactctaacatcacagttaagcttaatctgatcatgagaaggaggacaccattcattcgaaggaatcaaagtaggagtaggaatgagagaaactcagtaatatgtataacagtaataaatagagtcaatatagtatttcatgttacccaaattattattatgtaccttattattttgagcccgccaaatagtgttcacaacaatagatgcataaagaaaaactctatttatgcctttgtcttttaagctccagctgaacttgacccagtcctcgaatgcatgtttctatgatggggaaaataccccacgtgatgacctctacaggtgatacgccaaattgcactggaggaataagtgctctattgattcttcctcagtcccacaaatagggcataaggggtcatcaatgtggaatcccttgtccagaatagaacgaattggaagctcgttggagaggatactccaccaaatgatcttgcgacactcaagaattttgttgttccagagacttgtctcattacaattgtatactttttgataatcagataaataaattgcttctgatttagagatctagggaggaag

SEQ ID NO: 298909 - DNA, 5436 bp, Cannabis indica
atagtgttcaaaaagtctgtaatgcccactttagaagttttttcttactcttatatttcaaatataataataaaatatgtatttgtaatttacattataattaagatataaaaattaaattatataattttaattataattatttataaaataaaaattaagtgaacaaaaatataaataaaatagagtaaggagagttaggcacgtgcattgcacgtgctaaccctcccctagtcctctaataaaacacacaaaggcttataaagaagaacatttttggtaacccaagatgagctatacaattagcatatttaggtctaaatctaatacctaaaaggcttataaagaagagcctttcacatatctcatcaactaataaattaaactttcttggttgacccataactaaagttaaaaggggacatatttttttttttttgggaggggacaaaaattaagttaaatattaaaaataaagatatttattaggatttaaatctttaatctctataacatgtatgaaatagtctacataatatgctaaaattattattttgtttatatttatcacaattacaaatatatgctttaattaatcaaaatatatatatttattttttttctaatttttccagaggagcgactgccccctctcgtctttatgtgggtccgtccaattttcactcatcccaatctcatgtcatacaaagctacaatctcatagtacaaactatatcctaaataccacagctccaatgagactacataacctctctttgatattatatatgtttccaatgagattttattttgcaccttaaatttttcgtttaactaccgtgcactacatatatatcgtgacactgtaataacgacatgcatcctttttatatatatttatattattatttgtatttataagaaaatctaatttattgtgtgtaaattaaaatatatcctatctatttcggtatttgaaagatttttttagtgtaatttttctttatgatcatgtacattataattatttaagacatcttataaaattttgataaattcaaaaaaaattaacatgccaaaaacaataaacaatgttcaaattatctattgtatgtataactcttttatttggaagcgtatattgtagaaacaccttttaatttattgtgtgtaaattaaaatgtgaatactataaattattattattattaattatggtttaagtgaaaaattattaaaaagaatattttattttattaaaaattaatgtaataataaaaaatattttttagtataattttaatattgtaattgaaataatttttatactttagaaatgtctttattaagagcattattgttgggtacactaccagtggtgcttagcatattctaaatagcacattttagatgtgtcgccttgcgattagctagcgatattccttaaaagttattatattaaactatatggaacttaatacttaacttaactaataatagctatattaacacgtaagaaaatactagacaccattaatgtattttagttttattaacttaacaagaagtaaagagaaaagcaaagttaataaatggagcattgctattaggcaccagtggtgcctagcaccttctcgacatgtcgcgttgcgatatactagcgatactccctaaaagctattattttaaacaatatgggacccaatatgtagttggaccaatatcaatactgacacataagagggtgctaggcaccagtggtgctctttagcattaaatgtattttgggaagctaaaatcacactgctacgatctcgaaccaccgcccgagtgttacaataaccaccaaccaaccaaatttactccgaccaggggcaaccttgaaaaacaatacatacgaaaaaacttcaaaatggaggattttagtgacaaactcatttttaaatagtgtgtgttaattagttggaaattatccacttataattaagagataattacataacatattattttttataaaaaaaattacatttttacgtctaaagaattttttttaatatttttacgattttttatacaaacaaccaaaaaactatataaaagtaacataaaaataacatttaaataacatcaaaacaacaataaaaaaacaacatacagataataaaaaatcaacaacaagagtacaatataaaaaactatattttttgtaaataaaatcaaaaaattgtaaaaatatttaaaattctatgaaattttatttttataattttttttattatttttatgtatttgtaaaataattcctataattaattggggttccatatactatatttctcactctctttaaatgcctaatgacattttcttttatccacctataattaggtggggtcccatatactatatttctcactctctttaaatgtctaatgacattttttttttaaaacatattcaagaaaaatagttagatggtgttttcttgtagtgttctttgatttgatttgaatttttaatttttttaaagcaaattagtaatgtcagttttttaaaatttaaaactctagaccatttaaatgcttaactcaaactaatccgcttaataggggattgttttggttcaaaattgcggtttataatttgtaaatattttaatacaatgttaaaataattattaatattatacttaagattattcttaaatattaatattcaataaaaaatcacattaattaaatagtatatattaagaattaggcaatttaatttgatttgaatcacagacgagaattttaaaatcgtgaccgaatcaaataattataaatagtctgaaatgagcaaaccattgacaccgatatagaaggagtgataaactcaaagagattaatgtggttggaactttggttggtcaaaaagatctctttgaatttctccataaatagtttccaatatcataacgtcccgtgatccagtggatgatggctttcgagatcgaggcaatgaaattctttttcctgcgaatcacagttgaggcgtggaagaatttggagttcttatccccctcccagagccaagtctcacgagacttttgacgccaaatagagtcttgttgagacgacaactcttccatttcaagaaggatgtcagctttcaattgcgcttttgtaatgactggatgattagaatatgaattagtagggaaattaatattaattgttgatattttatgattttacttaattatatttgttgtgggccctatttttaataaatatgcattcaagttataattttttaatttcgaagattttattaaactctaaatgtattatatatatatgctatatgtaaaatttataatttgtatgatttttgctcggtaacaatgaaaaatacgacggatggtcgttagagtcacatgggttagcttagaacatttgatctagtgtgacagttatatgtagtctttggaatatcgagagtatgtggggttatgattttagactattttacccctggacctataatttacttaagttggaagtaaatggcaaaagtagaattttgtattaagaagctttatttggtttaatgatttatatggtggaatagtttagattactttaaattcttagtaaataataaagagtattaaaaatctttaatgttattaggataagttttagaatttaaattaaaacaaaaattatcgaaactattttttttttctctctctctacatagtcggctaagaagaaccagaccaaaccaagagcttgcttcttcctttttctgtgattttggtgaattcttgttggattcaagtggtgtaaacccaaagtacaaccctagtgcttttcctttaagctttttgagaattttgggttgagtttgaccatgcaatcgggattttcggttctgtctgaaccctaagcttttaggagtctttttctgggttatatttgagttgaaattgatttagatgagctagttttgctggtttgagaagtggttgagcaagtttgactttgagaactctaatttggcttaacaatggtaccttttattttttgatatatttgctgctgttattgcttagatattgttgttaggtgtcattataggtattttggaaagtttggttgagtttggaaaaaaattgagcgaggttcaaagtttttagggttttctacagagaactggttaaccgtttatccacgcaggaccttaagaaccggtttaggcagtttctagagccttagttttttgtattttctcgatattaagagtattgccatgctatctaccgctaagaaaacttctaattttgagtttagattcccgagaaagttttaccaagttgcttacccgtttatgtaattgtgacatatggcctccgttcaacgcgtgattttccattcagatcgaccgacacacttaaatcaagaaacgaggtaagactagcatagaatatgtatataaatatatggctatgtatgtatattacatgttgtgtatgtgattcatatactaccaacactagtatggtagctgtattgagtgtattggtacagtatgtgttgttcaaagggtatgatccagtgttaccaatactggtacgattaagtacgtgtgcatgtggtacaacactaagtagtacttagggtacgatttagccctaccaacactagtatgggacgagtacttagtgcatgtggtagaaagatcgatcgtacttctattaagaacgttcttaatcatctattagccttatggataggtgtataagcgtctaaatacaagtcggtgtgcgacatgtttataacatgtattttgaacatgaatataaatttaaaaaataggatccggactctttgtatggacatatatagttataaaaacttaaagtttaaatttagcacgttttttgagaaattctctgattagcaaatgtgtgcacaataattaaaaatttactgtaacatatctaaacagtatagcgttacaacattatccgaagagagaagccattgttgaatctcgaggagaaatttgtcaagcaatgccagttttttcttatagaagccaataggttttgttccgaatcccaagttttttcttggtattattcaattatatatgttcatgttcttggagtgccctaccttcctgttagagatattattacaatggaagaaaatcaaaatattacaactctattgtaatacaatacaaggaccaacaaagaaattaaataaatgttacaacaacataatatacaatatatatacactatatatattatatataagaaatatagaagaagataagaacacatgcaatataaaatatgtatatataataagagaataatatatatatacactcactcacaaccttgagtgtagattagtggggatcaccatgact

SEQ ID NO: 298910 - DNA, 1603 bp, Cannabis indica
tgtttaatgatttattgtttattgagtttgatatttagacatttatttgattttgattatttgtttgtgtttcagtgagtgtagcccattttgggagttgaggtcgagcgtaggatttcaaatgcatgagactggagtccgatatctcaaacagtgtacgtagaaatttgtcatttggttgcttttcaaatttttagttcatttagtttagttattgtaatctggtgtgttatggtctagactggattgtttggtggtggtgcttttaagggacattccctatttactattggctaactgttttgtgagttgtgaataatttttttataacttaaaattgttaataatttattattatgaaatatgtattgttatctgacactaagatgtttaacactattatgatatcttataattagttttgtcaaagttcaagggcatgatttggtagatttcaaaatctagagagcatgatttagtacataaacaatcactcaaatagtaaaattgaatgaaagtaaacaagtacatgttaaagtttgggaataaaaatcctaattagtcatcaaataacaaaaacaattccattagaaaataactatttcataatttttcttcagttatagcagctaacaacaaagaagtatatcaccattaacccatattaaatatttaaattaaaaccaataatctattgttttcatatgatatttaattaagtttaagcttcaatactatgtgcaaaaaaacaaacactaaacaaatgcacatcttcattacacaatcatcttaaacaccattaacaaccataaaataacaataaataacttaaaaaaaaaactgtacaaacttaaaaagaataaaaaaaacacacacaatttaatgattgaagtagtaattgagatcagaaaacaggacaaccatctacaacaacaccaggagcagttggacacttagccaaaggacaatgatcatcagactccaaaccccaccaacttgggccaaaaacatcataggtttgaagtgaaaagtaaagaagtattcccataaaagcaaccccagcatcaagtgcagctgataagatatagttatgtcttgcccaccaacctttataccttttgtagatatagaaattgaagaaaatcccaacagctccccatgttatgtagtttgcagctcgggccggtggcatagaccccgttgccccgagtatgattggcatgttgatgagaagaatccacttcttgttcgggtattttctcgataagagccacactgggacgggcgctagtaatccaatgagaaaaaccaattcatttcggggtaaaccccttgtttggtgaacattcttaagggtcctacaacgccccaaatgattgaggcgctgtagaaaacatcatcaccgggacatgtccaaggactcccttcgggtaaaaaatttgtatcgcaaatgtgatcgacggttgagagtaaccaccatgccgtggcaaagtagacactcgagcctatcaccgtcccaactagctgaaaaagattgaaacttttagttcgtgtcataactaaacgcgaaaaataagtcaaaacttatacttatcttatactt

SEQ ID NO: 298911 - DNA, 1042 bp, Cannabis indica
taaaataatttccaacacatcgaccatgtaagaaagatcggctctggggttgggcagcttgaactcatatctgagtttcaaagacaagccaacgtattggtcccttatggcatggttgccatcgagggatgcctttagcttctcctgagaccttctaagttcagtatccaacctggagttgttagcagtgagaaaggtgttctcctgattcctagtgccgagcatgacctctaaacaagaactcttgttctggttttataagccaagagcctccatatcaaccaaagccttgcctttcgccaagagattagcctccaaggtctttacctgctcccaaagagcacccaaagacaccctagagtttccatgcaaaaagctaagcttcataaaggcctaaaaacaaatcaaggtcatcataagtgccagaagacaacgctaaccagccagcccctatacggtgcagccaagggcggccgacctctcaaagacactacccatggctggccagcttcctacatcagcccctatggtcgaccaccttacaataccacagaaaaattgatcgaagtaaaatgtgcaacttaccaaggccaactcgtaaagaccaacggtagaaagcctctttgactcaccattaccaagctcctgcagctcgcaatccacagtaggataggctctatctagatgcctacaagctacctccatggatttctaccccatggctgagccagctcccctactaggcttttgggtgcccctggttgaaagtcgttccctcctaactggagggtcatccatcatgggctgcccaaccgacgcactccatggaggaggaagagatgaccccacaacatctttagcatgggtggtctgagccaccttggccttcggacgacccaaaggctcttctaaagttccactagctagacctctgaacctagaatacatatctacaagaagaaagtaacaaagtcataatacaagttacaaatattcaatgcaagacaagaatataaaagatggtgtaatcaactatcaaata

SEQ ID NO: 298912 - DNA, 1065 bp, Cannabis indica
aaatatgccctttaaaatctataaacaaaaaataattacatgttctaacaataaaaattttgttaaattaaaatattctaattacctttcttatttatataaacaaaataatatgattctgtccgtacagtttagtaaacagcataataaaatattattttcgattattttctatgttaaaccaatttatttctctcattgattattctaattttagctacagtttagtaaacacgtcattagtttgccagtaaaaaaaacgtatgcattgctggcgttggttgagaaatcttttgccaatcttaggcatattatcagcgttattgtacgttagtaataaattaacttttgttgacgctaaataaagcgcaccaacaaaagttgcagttattatggaacctaaacttaaactctttacaaaatgaccagtaaaagtacataggtgcatggcaaatgactatttttataaaataacgcaaaaatgtgtcgcgacgtcggcaaaaagctctatttttgtatgtagacaacaatagtactcttttattatttctctttctcttttagtaagacaatagtacatctttattttttattctttttaattatttttcattaattatataagagaaataaaattaaaagatttatttaactaaaactatatttaaaaatattatactaaaagtgactaattaaaaattacttttaacgtactataaatataaatattccaggaaatatttggtcaaataaataaagtatacatactttagtacattattaaaaccatgaaagtataagttattatttaaacaaagcactaagatcatttttaatcgacgattaaaaaattgtattattacacgtaaaaataattttataatatatttacattaatttttaatattatattccaatacataattataaaacttagtgtaaaatataatataaataataaaatataaaatataaatataaaaaatttataatttaatatattactaaatataataataaaataattataaatgtaagtgtaaataaaaaaaatagctcatttgt

SEQ ID NO: 298913 - DNA, 2380 bp, Cannabis indica
ctgatttagagatctagggaggaagacttagttgatagtattgcactatcaaattgaagtaattgctatggatcaaattgaagtaattgctatagatcaatcaggtacgcatacctaattattatgtattattattgtgttctatgttatatacaaatagatcttgggtttattattaatttttctaacataattaagtaaaatgtcacgaaactatatatagaattacaaagactttttaaaatataatcaagaagtaatagttaaatatttgtgacactacttaggtggtgtttggttggagataatgaaatgaaatggaatagaaaaaaaatgattttcatttcattcttttgttcggttgcatttaaaattattggaataccaatccgatgaatgacctttccattattttcgtgaaatgactattccattttaaaatagaagaaaagatcatttcatagtaaaattaaaaaattaataataattttatcaattttttatatacattttaaaatttattccattcagtttttattccaattctcattcccatttctatttctatatttttattcctcctaaccaattgctatagcaactatttataagtaatttgtcgtaactagttagctagatacatatatattaaagaaaaaggagagagtaaattaaagtgccaaaccagtgttattactagctagttagcagctaacttattaattgacacgtaattaactttatagtacgacgttggtccggtaataattaattggtgtagtatataatttaaactttgatgacatatttaacaaaggaacatatttttcggaagtggggagaggaaattaaaaaaagagtaaagcaattaattaccaagtacttgatcttgatctatcctaaaagtgatgaatattgcaacttatatataaatgtatgtattgaatacatatatgatatatatatatatacatataatcaatatatattgttatatcatatataaattaatttggtgtatacatacttaagtttaactattggttgtaaatatctaaattacttgactattaagttttaagtaaattttacgtgataatttctaattagtttaaatttttaaatttttattttttttaaaaataatttaaatgtactaataagaaaataacacgtagataatgatttgaaatttaacaattatatctatcaaattttaaaattataatataagtattattaccgttaaaaattaaatttaaatatttattaacagttaaaaattaaatttaaatatttatagtaccatctctagttatattaggcgcgtacacctaatgtgcaatgtgcatgtatcccttaatcacttgaaagtcattattatataaatgacgtcaccttttttgaattttctcatccttccatatattttcttcctaatgtgatatcatgtttgattatcccactaaaaagaaaaaactttatctacataattgttgaattgtgaagaaaatatataatatacgaacaaagatcgataaaatatgtaaagcattcttcttctttttttctttcctaaatgtctgaaactagctactttaaacttccctttattaattccagacaattgtgacttctttctttctgcatggctattataataaccacgtaaacgagcgagtgatatatggaggaataattaattaatagtagtgataaagaataatttattatttaaggagttttacaaaagaaaaaaagaaccatgctatgttatatatgtaaagaaaaaggtacgtatatgtacacgcgtatattatagcagtgaaggtgttcgattgttttatatatatatatatatatatatatatatctctatatatatatatactccatggtaggatcgtttataatgatcaactttgagcatctctaaaaaaaaataagcacagaccaagaatcccgcaacatgttggcatatcctttatataaatgtatatatatatatatatatatatatactatatagctagttgcaccaatctctctcaaatgatcatgatccctatcctttcgtttctaaaattttaatcacatccatctcatcaagccaccaccaccatgtcccatatatagccccatcgaacacattattgctctctacattttctctatatattttctttcagtactcgatccattattaatgcatggtttaatcaaatattacatcacaaaatgggctataatgacgatattatatattgctacacagttctagttaattcaaagttgttgatcaactatttatatgcacacattcattgacgaactcagaatttttactttgtggaggtttatttattattcaaaaatattt

SEQ ID NO: 298914 - DNA, 2705 bp, Cannabis indica
ctctctctaactcccacacactctctctctaactctcaaacactataaacgtccctcagcaacctttcgaccccccactgtctgtcccatctcctctgttcgtccgtcctaaaaagctagaccctctaactgtcccatctccgatcccttaaaccctcgatgaaccccattccctattacaccgcccatctcgacctccggtactgtgaaacccacgacaaccatgcagaaggtcaaaaatcgagacccaaccgtcaactccaccacatttagaccgttgttgacatggaaaacaagcccaagcaacccattgccgattctcctcaaattttcgtatgtatttggatttttatgttattttcaattgattcgattcggtaaatggatttttagatttattttttgtttatgcttaagtttaagggaatttagttaagtttacatttgatttttgttgttgtctattcgagttatttgtttttctgcaattattgattgttacaatatcgttaacaatgtctaacgatatcaacaacaacagaataggcagtggtgtctttgcaatatctagcaatgttgcaaacatgtcgctaaatattgtaaagagaccactgcccattctattgttgttgatattgttagacgtcgctaacgatatcacaacagtatattccattttgggttttaatgtcttctctttttgttttcttaaaatttttgtagatggatcctaaacttaaacttctagtttctcaacataggtcgtcttacctatcggggttcagatagattgaaagatattaaggaaaagtttgaagcgtattagttgattgagagagttaaggctagccctttcggaacattctgggaaactagagattgactttcttttgcgttggtccacaacctactattgtggaagatgaaatttaaaaaacaattcaaagattagatatggtttcttgtgggtaaaactgacatgagattcagacaaattgattttggactgaataccggcttacgtatgtgccttaaagaggaagagaagccaagtccagtgaccgtttagtgaggacttattttgaaaggaggagtggtgtgcatttagatacattgttgctccaactgcatagatgcaagataaaagatggtgtctacaagcttggattacgcacttttgttaatgatgtatttgtttcgaaagatggtaatgtccaagtttggccagacatgttgaaatttgctgatgaccttgaattcttcttcaagtatcttcagggtgagcgtactttttgtacgttgatgtggtatatgagtaaagacatgcactattacaaggataacgttgagaaaaagaagggaaggaaggttgctcaagaggcgaagtataccgtacatggctacgttcctgccaaacagtattggacatatgaggtcatagaaaaagtaggaaagaagtatgatgaatgcggcgggactaggttccctaggatgataaactgaaaaaccaaggagggccatcaaaaacaagacgtgaaagcgagtgacattgcacaacagttcaacacaagagtaagttcttatattttcttcatgttgatattttaatttattcttatcttgttatcctgtttataggtttaacaatatgtttgcgacatacatcaattattttcgtaatgtatatgcaggtgaaattaagtactgctaaacaattagttagcgacataagccaattatttttgcaatgaatatgtaggtgaacttaattattgttgcactattagttagtgacattttggcaacatatactgatatattttgtgatatatttgtggaggaactacataaaacatagctttaagttaattagcgaattgtttgcgacatagtctgatcggttaagcgacatatatgtgaatgaaatgtagatctatgttagttagcgatatattggcaaaattttgtaatatgattcagatatatttttgtgacatttaacaatttttaatcattttatttacagttggtcataaataagtgcttgtgctcccgacctagtgaagaggagtatttcaagtccatcaatgagggtaaatcccctctttgttttgagatggacattaatgtgatagtgaacatcgatggtacatagaatttagtgtttgaaacgcaagtcaagaccattgttgaagttgtgcataaggcaaatatagttccaccaccattgacttcgaaatcagccaagtcgtcaacttcgaccgctctaaccgctgcagctaatacatctgacaataaagcactagtgaagaggttggatagacttgaggtcgagcaagctgccattatacttttgcaaacagagttattgaatagacaaactaatatgaggcactccctttctgataatcagaaagagatgaatgagatttaaatggctcagttggccaatgtgatagcgtttttgaaggaatggagggggcaccacagccatcccagccaacagatgaccgacctcttgagagtgatcatgaagatgtgtacctaaaatattggaaaaaagatgatgatattgatgttgatgatgaattttctactccaacagatgccattatcatgaccattggtgatacacaatcacaggatgatgtcctactcctgcctggacccccactaggggtaccatttgtgagaaagaggaagaa

SEQ ID NO: 298915 - DNA, 9841 bp, Cannabis indica
tcttcatcttttgattactaaaaaaccttattcacaaatgctaaagtactttgatttcaaaaatggaaaaatggatgaagatttacgaagtcattactacataagttccataagcaataacatagtatataaatttgtttgatattgtatatattaactttattttttgtgtgactcgatgaacatgtacaataaagctaaaggatgatgcaatattgttctcatcacatatatgattcttgtatgtccataaaccagatgatgtacaacgtagatactacattatgaagttaattgaagattacatgaccgaaccatatatatatttaattaaataatttgtttcataatttcttatatatatttttgactaagttagctaaatatatatttggataattattaaattagtttcttaatattaggagtacttttgtattccatattgttagattaattattgtagttatgtatattaaattgtaaaaatctagaaattaatgccagggaaaaaatacaattttttcctatcctacaacataacattggaaaataattgacgctattcaagagaataggcattagtgtatagtagtcagctacctatagccagttatagttctaaatattacccataattttcaacaatcgggaaaactattacctgactattttgaactaatgccatatccaccaagttttgcgtcagtatcgtaggcatcacttttaagacttgacgacaaaaatgtacccaactgttttacacggtcgagaattctctcttttatagtagtgatggaattcactcatacaacaaaagctacatagccagtttaggcatagctccttattatgagggcttatatggtagaccatatagatcgtcatgatgccgagtggaaccagatgagcatgtcactatgagacctctaattatcactaatagcactaagaagattcaggagatacaagagagacttaaggttgttcaaagtcatcagaaaagctatgccaatctccatcgatgagaagtatgatgttggtgtttatgtcatcttgaaagtaactcctatgtgtggtgtaacgatatgtggagtgaaggggtaggtagcactgaggtatgtttgaccattcaaggttatcgagagggttggggaggtcgcctatcgattaaacttacaaattctgttggggcatgttcataatatgttttatatgttgatgctaaggaaagtatactctagttctatcgcatgtgattgagtatgaggctattcctatacaagaagatataacttataaagaacaagttgttagaatcttggtgagagagtcaaaggtgttaaggagcacagtgattctggtagtgaaggtcttatggtagacccatagagaagacgatgatgcttgggaattagagtccgatatgtatatgaagtatcctcactagtttaattttcaatttgagtttgtactttaaaatttttggacaaaatttctttaacgagagaagaatgtaaaatctcgatgaaaccaaaagaaaggtaaaaaaaaaattatataaatgttatgggatccacacttttatttaattttggcgtcttttcccctccctctctcatgcatggcactttctctcttctctctctccttctttctttcttttctagaaagaacccacaaataccaccactaatggagctccaacaaccactttatggtcaccgcctaaccttacacaatgcaccattcaaatctttgactatcaaggttctcaattcccaagcagtgctgccttatttgtcgtcattggcccaggattacgagtcaaagtcttgaggttcaaactttgaacgtatattttgctcacaacaagctatcttcaccattagactcaactcgtcaaggataaaaatctccactaagttattattcccagattcgtactttttctggtgacgtttttgtggctccgctcctttctagtgaatttttcagtgataccatgtgttgtttcgataaatgtttagcatggttgtgatttactcattaacgtgatcatttggatacccctttttttagtgatttttttggtacattgatttctacggctattgatcgtcattgtgcacctctaatgtgaggttttagaacgtcaaacttcaagtacagtcaagatatatataattggactcagttttgaatgtagaatacaatgatgataattattttcccattaaatagtcatatgagaaagtgatatataggattggactaaatagttggagctcaagacttgagagcttaagatcatccttatggacaatgtttaatgccttggaagaggtatggactcaacatgattattagacttgatttattgtgatgaatagcatttgtcatattccttattgatttataaaatatttgaaacattgaaaacttaatctgcatatttttctatactattctcgagacactgagtgccaaatatatttttgtacaattttatatatgcaggttataatttttagattttatcaaattacaattgttatactaccaaattttctaaaataaagagaatatgtacttttgctattcttgttgcatgtattttatttttgaacaagaaggatactttttattcaaaacaaacacagagttacaaaaataacactgctacaattagtaacaacacgctgttgcagcagtagccccaccccacaccagctaccattcactaattacattaataagataatgatcaaaactatttttacaactatagcgaatgcccatgattctatacttgacaaccttttcaatttccaaactaacgatagcatgagctttacaaacatgattgaagacacaaccatttctattcatccaatcaaaatagacaatagtatttataatcgagttcataattttatattgcaaccctttgtgaggatttgagcaccatccacttatgtcctcaggccaatcaacattaccagcccatctagtgatctcaaccataacctgctttgtgaaagtactgtccacaaaaaaagtggtgttctgtctctctagcatcttaacaaatcaaacaaacatctatcgtaattgggaggattctactaagatggtcttttatcaagagttgattgcttgccaagcaatgaatctatgcttcagaatggcaatcttatgccacacattatctgcataattcaccttataaacttgaataaaggaaatataaaatattttagttttgaatttaccttttaatctagcttcagcatctaattgcttgtccacaatatctctaagcctcaaaagtttcttgaagcaccaactcccatcatgtttgaaagtaacgaaccagaaatcttgattctttaagtaaatggcatggatccatcaaacccacaagttttcttgcttgctcaatagggcccaaatgtatttagccatcaaagtaatattccatttccttccctcacgaaagcctataccgctaaactttttaggaagacacactttttccaaggacgagagatgaactttgctccgatgaccatttgttccccaaagaaaattcctatagcatgtatcaatggttgcagtaatcttttggtggagaatgaataagctcatccaatagtttcttaaacctgaaagcaccgagtgaaaaatttgtgctctacctgcaaaagacaagttccttccggcccagttgttaagattcttttagactttgtcaagaatgataccacaattagaggcacaccattttgtaggtctgagttggacccccaagaaattcagaggaaagccacactcttccattagcaacatgttcgagatgctatttttgcaattagcactaactccattgaaataaactaaggatttggttttattagccatcaatcatgtacattcattaaaggttttaaaaccctcatgaataagcctaacataattttcattacccttgtagaaaatgattagtaatccgcaaaagaaaggttacacaagcttaagagacttacaaagtggatgaaatccgaagctcttcacctcgattttttggatcaaaaatctagtcaaatattccatgatgaacacaaagaggaggggggacattaggtccccttggcgaagacctttttcacctttaaacgagccttgaaactgaccattcatcaaaagggtataggaggcaccatgaaggcaacttagaatccaagtaatgaattggtaggaaagcaaagccctttaacaaatctgcaacaaaagtccaatcaacagtatcataagccttgcttatgtcaaccttcataatacatatagcagaagtgttctttctattacaccctttaagcaagtctttggtctaatccagactctctcttgcattccattctgaaagcccgctattttaaaaactcggattttcttcttgctccaaatggttacaattcttcttttacttgaaaaagcctcctctggggccgccaactcctcaagcgtggtcttgtctggatgataggtactggcaatagcatccctttaattatctgtcccaaattggatacttggcatctcctatcctatcattcttcatcccatcgacccctctcttttttttgtttctttttttattaaattctgataacacttggaatgtttctcgattaaaacattacctccctgtatataaggtggataagattctccaaatcccccttcactatacccctgctgataccctcatttggggctttcatcactctagcatccttacagttaattccgcttaccatctagcttctgctactgccaatatacactccctttcttcttccaatccaaatccttttgaaaaatggtggaaatctctctggacccttccaatccctccaaaaatcaaacacttctcgtggaaagctttcaatcatattttgccgtgtgctttaaatctgtttcacaagaaagttcttcctcaaccttcttgtcaattttgtggtaataacattgaatttgtttctcattctcttattgattgtaccagagctcgccacacattgaagcactcaaaatttaaaaatttccaaaatgatcaccgaagctatgatattaaagactattatcttcaggctctgtagttaattttcaaagaagagcttcctctttttgttagcataatctggcatatatggaataccaggaattcaattttatttagaaattcctctgaacctaacaatgtggaagagtttgttcttaactatttgcaggattatagggaggctcaacaactacattctcaagacatttctcactcagcctctaattagcatcatctctcatcttgtcctgctaatgtcgaaatcatccaggaggacaccgcggccttgtatgttaatgccgctttagatcatgaccactgtattacaggacttggctgtgttttcaaggttggccctcatcgcattattgcttctgaaaaaaaacctgaagccaggagcctcctcccccatctttgtagaagcccaagctctgctccatggcatctcttggtgtctttcttcctagctgaagccgagtttcatcttcacggattgtctaaatttagtttcaaaggttaacggaaattggcaggataattcagctctttcaagccttgttgctcagatcaggcactccttctccgatttccctggtgtttcctttcagtacttacagcgccaactcaacacaagcgctcatttccttgccaaggaagccatcaggttccgagaggatgaccatgaggattcgtattagtttcctatgttttgctgcgttttatgctttgtttgtttctttcagtagattaagctccttggttgtcatgaattattgtttcattaatctcattaggcataacccctgttaaaagaaccccagcactgcttgataagtatcctggccaatatcatcctagagacctttaaaaaaactagccccacacccatttggacccgggctcttagaagtgtgaatgtcagacatagctttctttacatattccttcttgaaagggctggttaaatgaagttattgctcctgactaagtttgctaccgtattccaaacaatctaactcaatcttcctaatagcagagctctttttccccataaagttgcaaaaataaagaagaaagtgctccactacgttgggataatcttcaataatagtgccatcaatatagtaggatagaatccaattctctattttccatttcttcatgatgccatggaagtagctggtattctcatccccaaaacacaaccaagaaatttttgaattctgatgaagatagctggcatactgtttttgagcagcaaggaagtcaagatgtaatctcttctcgactaaaatataatcaatacaaataggattgctggtaaggttttccatgggctctagtaaaagagtctttagcctccttgtaatggctcttaatatccatttttttagagacaaaatgttttttcaaaacatgtttgactctgaaaagcatcttggcaatactcttcaaatcacaaactctagctcccttccagaagtttagaaccacatcttcataatcattcatgaacatccaatgattactaaatttaaaaggtctaatacccaaattctcaaccttaacatgtttgaggcgataacaatgataaaaaaagtcccccatctaaaactagcctcagtattagggaactcatctaaccaactattgttaataaaaactctatcaagtttagagtagattctgatcccgttctcatgtttgttagtccaagtaaactgagatcccgtacagcaaaactcatcaatttggcccaaaacaagccaattttgagcatcttcaatttctgtcactttaacttgccttccaccacatctatcattataatcaatcatcacattgaaatcaccaaggatgatccacaacttattcaagggaccaaatccagcaagcttgctccaaagatctttcctctcattcaaattgttgctaccataaacagcagttaggtaaaaatttccgttataaccagccattttgctgttgcaatggacaaactgcctatcctccaacgaaaccttcaccttgagaaatttgtcaatccatatcaacattattctaaatgaagtaataggacttgaataaaagttctagttaggaaaattattcgtaatcaaactatatactttcccataaaaactttggtttcaaagagggcaccaaaaccaactttattctccttatatttctcttacaactcaattttcttctccttcttatttaatcctctcacattccaattcaaaatgttacagctatttgtgacttgaatttgaagtatatatcaaaatcctccaaaatctcaaatgcttccttcaaaacatcataaccatttctcatcttagttccatcctgaaaaattcacagtattttttgagccccttcttcgaagagtgatccaaccccctaatgtaatatctttacagctggtctgaacctccccctcattatgacatttttgctgctctggtttaaaattgtctaaaactagcaccatattcctctactatcgaacaacatcagaattctcagttatttgcctagatttcactttagtagttaattttttatctgcaccagaattagttggttctacttggtttttattctcatcactcttactattttgactgcatgttgtttcttcttccatataaatggtctacctttattgcaggtggctactgtgtgtccaagaagagcacaagcaacacacttagacgagaaccattcatactccacttgttgctcaatgagctgtttcctttcattgacattgtcaataaatttcgggggactttcgaaaatttcaacatcgactaagactcttgaaaatttaatcatagttctttaaagagtaaccttgtccaccattttttgtttgcctatggttctcaccggagcacttaagttcttcttcccctaatactggagacctaacccatgtagcctaatctaaaatggtaccgatttcaccatttgagtagtatccatatcctttgaccaaggtctaagcaccattggcttcttatcaaaatgtatgactcttgttacaagtatcacgttcttggtcacttcatctttaaagataaccaaggtgaatctataatttattcttacaatttttcaattcccaagttttccacattgaatgggggattcacccctaacactatgcaaactatcaatgatctccagtaggaagcttcaattttaatttcttctaaatctagtttagcaaccatttgatcacctattttcattggctctgtaaaatcaagctgagaggaaggagtccttacttgatttagactgaatcttttccacgtatcagtagccacaacactaaagtccattttctccatttcatctgcccagcttgcagatttagggttcaattttttgagtaaaaactccatcatcgggttcttttgaatccgtgtccaggtcttcataagtatctaggaaaatctccacattagcctcttcttggatcaaaggcagcttaccttgttttgtttcaacaatgatttcctctacaacaggcttcaattttactagcttcggtgctccttgtccattcttcctctttgccatgggagcaaggagagagcatcacacattgctatcaaccagcataaatattttgttgcatgtgttttgttttactaatgagagccatctttatcatttgttgtgcgtattgttgtttcacgatccagtctctatgtcatcatagatagatcaagtgtacactcacatgtaggtgtaagacctagaatctgtacaagaattgaattaaatctgagtcgcgatattatggtagttatcaggcccgactaactagtttatgatttcatctctatgattggtgtattgagagatagggatctagtggatagtgtaatcactattataaaacatgctttttccattggcctacaactaatgacattactttttctatcggttctcaaaattgacagctatgtgggcataacaaatttaggcgacgtagtcgtcaattatggatcgacaaaaatgaagttttgttgtcagttatgtactaacatatacgggaaaaagaaaatcaaaaaatatataccaaaactacatgagctcccatcagattgattttaaactaatttttctattattctgactttgttttcattatcactttttctttcatctgaaatatataaattttggcaatatataatatattacagtattaattacttacaagattaacattgtaaactattggattttgtgccctatataaaaataaattcaatataattagatttactaattaataaaagatcagaaatcattctatgttgcatggttcacatgatttatttcatgattatgtttaatatataaattctattaagtctagaacatatataaatatgtatatatttattcatgatatagtgtcgtcagcacagtgaaatataatcacgattacatgttcaaaaggttaattcccatgatttgtaagttcactggatttagactgacatgataatcgatgataaggtatacttacaccttggataagtgttatgtcctttccaaagaattggtaaagcttaccagtattggatgtatagagtatacattagaagggactaatattgatctcagataagatatcataaacttatcgttatatctttctaagtcaatatcaatggt

SEQ ID NO: 298916 - DNA, 1460 bp, Cannabis indica
tttactacagagcacttgcatctacacatggagacaacatttagatatgagtatttatataatattaataaaacttacagaccaaaacaatattaataattaggatatgagtattctagacaacaatatataataataagaaaaaaaaaaatcaaaagtttgataaagtaataagaaaatgagttgtgtatatatgattggtgcgtgtccaacaccacttagaaagtgatgccttacaaatattgatttagaggtttttttagtaatatttattaatttgatactttatcataaacaatttgatggaagacaaagaaaacatttcatgaggtttaagtaaatcaatactttcatgaataattacatataatttcattaaaaaaacataattaattacttgagagatttcattttaagggtactgaagctgttacattacaagccattcatttcattttattattccaagcaaatttagcaatttgatgagttacaactctagaaaagttctgatatatatgctatattgaaaaagaaaccttcaaagcctgtaattcttgaatcatatccttcatgtgagctggaaaactgcatttagcattttgattgcagtatcacagtcagaaaaaatgcttaacccaattttaattaatttacaatgacacaaattaatatattactttttcgttgacaagtactttattccaacaataatataattaaaatattttaactgaatgaaacatttttttttcttttgaaaataagagtttataactataaataaagttaacctcataattatatagtatttatttgatttttgcttttaaaaaaagtatttttgattttttgacaaaaacataaaagttaagcataagattcaggtccaaattttaaattattagttccgttaaaatattaaaaataaattaacatttaattattaatacccaacattttttaatatattatactaacatatatataatattagattaataaatttagagcatctccaactatattttttaaacacactttttaactaaattaagaagtgcgacttaaaaattaacatccaataaagtgactctttataatagagaaagtatagagagttcactattattttttattattttataaaattatttttataaatgaaaaatacaaattatagtaaagagcatgattagtgcaacaaaataaaaaaaccctttattttaatttttttttagctatttcaccatataaaaaataaagatcatatatgtatatatttttagggatatgattttgtcttattattgtactttcacggattttaatccgtgatgtacgacagccgtcagatgagggagttatttgatctgacggctgagattgatttagctgtaattagggttaaaaagtagaaacgtaccctaacactcatttatgttagagagtcccacatt

SEQ ID NO: 298917 - DNA, 4369 bp, Cannabis indica
cccctaaatgtcaaagcaaacaagtttcagtccctatccttgatgccgctgctactggcaccggactgcttcccagtgtacttctgccgacaaccaagatgagaacgtgtaaaaatatgatactaagatggtgaacaacatgacctcagtaagcaatatcaataaactccacaaataaaaacaatactaaactaaaccccaaaaaagtcgttgttatgcattagatatgaaattgacggtgaatggataccatatcacccagaaagagaagcactaacctgctttccaaagctgaatgggatatatttatacttaatcatgtgcatgatttggcgcttcatcgtgaggacaaacagaacaatccagtaacaaagaagtataggccagaaaacagggacatcaaacacagaaaagaaagtcatcagaaaggctacacagaaagcctttgtaatagcatacctgaaaacacaaaaataagagatctcatagtaacacaaacatgtaaattctacgttggaggatgagccaagaagcgacaaagggcaacatcctcattctcaagaagaatttctcgaaattgctaatgaaaggtttaacacgtaatgatcaaagattatggcaaatcgagctagtccctcaatatatttaatccaataaagaatgcaaaatgattagtgtaacaaattataataagaagtttcagattaccaaaacttgaactcaggcagacggcgaatgaatggcttaaactcgtctgaacctttggttggcaatgaagcgccatccaaaacctctagctcaggatcaacctttggtgacaagaaaccaatcaatagattcagtatatagattcctaggccgtaggatactatgtaaaatccttgaaggtagtagactcgaagcatataaatcgctgctacagcaagagtccccagccacctatgtacaggatgaggtgtagatcgatccaaatagtattgaaatgccctcgaaaaatcgtttctccacttggcaagaggcaccgaatcagaggcagcattgccctccactccttccatgaaatgtcctctaaactatatgtactgcactaaaattatataagattaatagtgtagctgaattattttaaaacaccggtttaatagatattacgcgctgtttgtttcccgagaaaatagtaacgcaaaaattagaaaaacattctcgataaaactaccagttttgcaaccgacacatcagagcaggccacggagtttttttagggcttaattgactaaaattaaacattaaaaaccttacaatttatttcaagattaaacacatacaagtttgatcaaactatgtttaagtatgcctctagaaaatttcacaccacaccatgattataaaataaataaataaaaaaggagtagaaacctagggtttcgtcaatagatctgaatcattacatgctcaggtaaagaatacacagtcaaacaaatttaaagaaattgagaactcaccttgagaatatacagaaaattagggtcagcgaacaaagttttcgaagtcgaaattgattctaggtcgaagaacgaggtttttattgtaacgattatttaatttgtgactattttgaaaatttcccagttcccaatcaactttccgagaaaatatcaaaacttcgctggtaaggtagtcattttcatttggaatagcaaaacgcaccgtttattacccaatttgtcaaagtgatgttgtttctattaaagactgaaaacccgaaattgccctctccaggggtttggtttgggatttccaaacaaaacactgaactgtgagttggtgaaaaaagaaatgccactgaacttgaactgtgagatcttaattgaatttccaaaaaccccaatagatcctacttctttctgggtatgtgaaggagcaagaaattttgtggtgaaggaagaagaagaagaagatgggaaccctagggagagcaatatacactattggattttggataacagagactggccagccaattgatcgccttggttcactctatctctttaacccaagatccccttccaatttgtggtgttttatgttttatttattgaatcaacgtatgaaacaaaatgttaattgtatttgtggactcatttcctttagtgataatgtccataaattttcattagttcgagtttcaattgaaggattaaatttgagtcggaagccaaattttcattgatgaagtgattgtttaatttttcttcgagttaagcattttttttctctcttttcttggggggaggttgtattgttttatagttagatatagcttattctttcaatgttttctgttagcaacagtgggttcttttcgagcaaaaacccacgcttgaactttatgatttaccggcgcatttttagtttcttgtcaactgtaatgtgactccagcatttctttcatactcgtctttgtttaacttttgtgcagtgaggccgaaattttgttctttactatcttcactctcagagtctgggcactgttctttgtgatttactggcatttgcttgttttttccttgccgcactactaatttttactatcttcactcgcagtgtttaggtgccggactttgatgaatgtgtttgataaagctcaggggtcgatagaggcatttgttgcaccaagtgccccaatcattgggtgggaagagagtagtctatttggtatggatgtgtctgagagttaataacatctattagaatttaggataagatatatgaatttcatcttaaaactaattgactatgagaggagtaagctctacttctacacattaacaatatgtgactgactctaatacactttcctcacgcttgaacctaaaaatgtgggtataacaaacgacctttaagagttcacataaccaaacatgatatttgaaagaatcccacaataccaaatcgggaagtatgtaggtgtacactgtcaagaaatttgtggatttttgaaataggtcaaagatcctactattgacaattgacacacattggccgaaaagtctcaaataaagattaaaggggagataatgaaagttttttatttgactctaataccgtattaaaattataaaatacatgatgctcaatctcaaaattaattaactttgagaaagtagttcattcatcttatatgatattttatttgtgtactaactctaatatctaatatgacattacattctttagaattaatttctcgacctttatgttttcttaaggatgtccagatcatcccgcctttaatgttcttcccctctcttttgtaattgtttcaaaatcagcaatcttttgagttttcttcctcaaactccgtccaggaactatttcatttcttttttggtttttaactttgatctagatggataggctagatgagccttaattttatttgtgcaattcttcaaagaatatgtttttaatgttactagtcttaaacacctaattgctattggttctgcttaggtatatgtgagctgggtaggtcatagtgttgtcttacacaactgcactattgaggatgaggcttaatggagttgttgtggagaagaatggcatggtcggttcctccagaagctctagtcagacaaaatacaaggatccctgcaagagaggtatgtttgtctatctaattttacaacgttgatgcctaacctaatatgaataactaaactaatactcgtgatagttctaaagggttaattttcatttgatgaaaacactaatccatgtcatgtcatgtcaggtatggggaggtaatccagcaaagttcattttcccagtcagccaccaattatactaaccttgtacaagtccatgcagctgagaatgccaaaccttttaagaagattgagtttgagaaggttctctgcaagaagtttgctggtcgagtcgagatgaggaccgtgatgtgattcaattctaggtgaaacatccctagaattggttctcccagataatatcctactagaaaaagcaccaaaaattttttaacatgagtttcatgtctcttttttatttgatttttctttagtttaaattttgacatgaagggatatttcatctcatgttcaaatacatggaaaggggattactttcttttccaataatcctgacaaattttcagggaggatcggattctacaatccaaccatattttcttactgctatgttacaaagaattggattgtgcctaaaattttatttccatttttatgttaaaaatttgaaataaaatttaattttacaaaaatctaatttcaaattttttaatcatttataaaatttaaaaaaaaaatggtttataaaatagctgcataaa

SEQ ID NO: 298918 - DNA, 2864 bp, Cannabis indica
ttagagactttattaagtctaattaataaatatattaaatcgtaattttatttgataattaattttaattattaaataaataatttttacatttaagtggttgatcaattagaaaatatgacatttgtgaaagaaaaggataaatagttgaaaaaaatggcaaaattgtaaatggtaggcccacatcctaatggccggccacttaaggtctttttaccatttatttatcaattttttaatgccaaataattcaaacataaacctagaatgattcctataaatagatagtgatagactcaaaattgacagttgatgcaacttaagccttcacagtgaaatttgagccttctctctgtctctgtctctctctctttctcttcaaatttttgtcccttatgctgatagaatacatgtccacacatagcaagtaagtacttaatcatagtatgtaagactatgaagaatccaacacttgaaggagaatcagacccgaatcttaataatactctgtgacagaaaggaacaagagttagagatctgagtggaaggagtcatttaatttcgctgcaaccaatgtaaggttgcttgaactttatatgtgtttaaattctattgttttagaaattcatatttaggatgttaaataacatacatagtaataaatttagatcttggaaaaacgattcccaacaagaatacactagaataatatttggaaagggtagatagtgagttactcaaagagctcgtagctcattgactcacatacttgtgagacgttgaaaggataaagacaacactttcagcttggttcacatcgcaattgtcagatagtaataagtttcttgctcatacctcactcaacatattagtagaatagtgcgagacgtactacaacaatacacttagacattgttccataataatatttaagaaaagtattgaccgaattactagaaccatgaagcatagttagcttaatcgcctatagataaggacaaatagcaattataggggttacttacaattatcccatgtgatataaatatgaaacgtgggggatgtccacgtttcatgaacagttacaagtgataagatctcaagggaataactgtcatcctaaattcctataaatagggacaaaatctaagaaacaagggacactcattttttgggaaaaaagagagaatattgtatcttttttattattctgtaaacactcgattatattctgtatacactttatcatccagaataagatggactcgtggactatgaacatttaacttcaaaaccatgtaaaaactttcttatcatttattgctcttattactattgttattattattatttaattaatactagagattatttattatagaatagacttatttattagttaatgaaaatctacgtttacaacttccggacaagtggtgaatttttagaaatcaaatgtgttttggcaagtgtgtgggtgaagatacgagggtggccttggctgactttatggggtgaaaattatggaacaccatgggaaatatttggggttattgtcactagttgggaaaaataaaaaacaagtgtttgatgttgttaaaaattgagtttggaacaagctaaggggctggaagtgttctttgttttcaaccgttgggaaagaagtattgatcaagctaattattcaagctatcccaaattacatgataagttgatttcgtcttcctaaagataccattaacaatctccatagattggcagcaggattttggcggggatcatctttgcagaagaaaaaaaactcattggtgtaaatggctatatctttgcaaatcgaaagaagatggggggttaggattccgtaacttggagttgttcaatcaagttttattggcaaaacaaacatggcagtatattcgtaattccaatgcactttacaacaaggttttgaaggcaagctactttcctaatggtgatatcattggggtaaaatgtggttctcatgcttcatttgtttggagaagtttggtgtggggtaaaaaattcattgtaaagggggtatcgatggagaattgagaatggaaatagtattcacatcattgaagatccttggctagcaagaccaagtttctcagaacaactgtttgtaatagatttaaagttggccaatagaaaataggatgaagagttcataagggataattttgatgttgatgatgcgaagattattatgagcttacttagcagaggttgggagatgggaagtatacagtgaaaagtggatacaagagacaactaaaatgcaaaaagaggtgacccaatccatatcatgagtggtggagaagtctttggaagatgaaacttcctcccaagataaaatattttaatggaagattgatcattcttaaattccgacaaatttagcattagcaaaaaggggaatgaaaattaatccgcattgccatagatgtaactctagagttaaagagagttttttcatgcactatgacattgcaagtcaacttaggcagcatggaaatttggaagatttattggtgcacttaaaagagaagggcatgaggatgcgattaaggaagatgtggcatagagatgtgtttgatttcttcctggtgccatcttggcatatgtggtttgtaaggtataacacagtacatggtggaaagaatcttaatgcaactactatattactaaatatagagacaaaaatgtggggaagaagagggttttgtatgaaagatctgtattaggatttataaaacactccaaaaatatatatcacaaagctaaacatatttctaaaagtactttaaatcataaatctatagaacttttgctaaattaaa

SEQ ID NO: 298919 - DNA, 4455 bp, Cannabis indica
tttatgtttgtcaaatctttttccactagtttagaaaacaagaaacaaattttgaaaatgaggagagcttaatgtgataagcattgctacgatttacatatcatgtcgttttataattggttagcgattttctataatattataaatggaactcgatagcatttctctaatgtgatgagaaaacagtgaacagagacctaaatagttgaattgcccgactcacaattccatgaagaattagggggtgggtttttgggaatgagaatgtaaaaaggaagttatgttttgtgtgatttaagcagaatatttataattgtgtagttcttatttttaaatttattttttggtttttgggaatgagaatgtaaaaagaacttatatcttgtgttattttagcagaatatttaaacataattgactttgagatttcctcaaacaatttcttggtataaaatataaaattaattcatgattaatttactataatttgagagagtcttggtgaaaaataattacatatacagttctctagcaataaaattctgaccttatatttataattctagagttaatgttttaatgattaagattattatattgaattacagctaacttaaattagttaaataaactatcctactgtaattaataattatggcgtgacttgtggccacaacactaaattatctcaaaaaatgcattctaatggaaagtttgtaattattttcataattcattgaaaactttttgaaaaaaataataatttagaatacttatcatgtcataattaaaaattatatttattatatgaattttagttacaatttacctcaattttttacaaaaactataaaaataaaaacaaaaacatataaataataattaaataaaaattataaataataataattaagtgaaaaaccctaacctaaaagtagcagcttcagtcattttcaaaaatgaaataaaataaaataactccccgcgacactttcgacattttctctctcggcaacggcaacggcaacggcgacgacaatcagagcccgcagacaacgcagataagcttgtcctttcctcccaacgccgcaaggcgacggcgatagaagtccagcttagcccagcaaaaaaagaagaatgcttagaagaagactctgttcaatactttcgagctcaatcttaagctcctcttcagtccgtacccaatccattccaataccccctacagttggattccagcaaatcgtagaacagtgctcccacccttgttttaagaggagtaatgaagggtttggtggtttcggaggtctaagagcgtacagtctcttgagcctgaacgatctgaggggaaatgtcccgaggaagcagaagactcgaaaggggcgtgggattgggtctggtaaggggaagactgctgggagaggtcataaaggtcagaaggctagagggtctggtaagttagggtttgaaggaggtcagacacctttacgacgtcgtttgcccaaacgtggttttacaaacccctttagccttacttttcaggtacttcgattgattgaaattattcaacttttttgtaagcctttgtatgaaagaatgaacatttggaacatttggaattttagtgataatctaagacttggggttgaattttagtaacaaatttgaataatttgatgatggtgttgtgttcttgtgaattaaattattcaactttttgtaagaacatttgtgaactagtgacccgaggaaggtgtggaattttagtgataatctaagaattggggttcaattttagtaacaagaagttatttttttaggacaatgtgatttattgattgattgattgaaattttgaacttttttgtaagcctttgtatgaaagaaagaacaattggaattttagtgataattaagggggttgaattttggtaacaattgtgaacgatttggtgatggtgttgtggtcttgtgaattaaattatttaacttcttgtaagaagagcaaatcctaattggggagatttgattcattccaaattatttaattcggaatgaaaggatgtactttgattaagagagtagggtaaaccgttccttgattgtgcactagtgtcctgaggaaggtgtgggattttattgataatctaagagttgggttgaatttaagtaacaattatgaacaatttgatgatggtgttgtgttcttgtgaattaaattattcaacgttttgtaagaagaataagtgtgaactagtgtcacggggaaggtgtggaattttagtgaatgaagattaaaccaccttattatatataggatatcaaatttatgacttagtgataatctaagacttgggttaacctgttttcatgcttttttttctttttgaaactactgcagttttgtcattgaaatcaccttaaaaattgtttataattcactgttgtatgatttgaatgagatgaagcatattttgatggtttggattccaagtttcttttttttttttctgttttacaacctgtgtgaaaggactttgttctgaattctttctgcatataatttttctttttgttcattttattaaaaaaaaaatagatacttttggagaaaatagatacatttgtagccttatgtatcagacttctttctattttatctatatcatctatatgtctcatttatgtgatgagtaaatatcttttggctaatcttctgataattttaccatacgattgttgatgacagcctgtagggttaggaaagattgcgaaacttatcaatgaagggaagattgattctcacgagttgattacaatgaaaactcttaaggtctagtaaattccttctgtagcttgtgacattggagcatttttccttattcagcattagcttattctggtaatcattgttaatgtaggatacaggggcaatagggaaacaaatacaagatggagtaagattgatgggtcgcgggtctgaccagatcaagtggcctattcatctcgaggtaaatactgttatttcttttatcttgtgaatcaccatttgtatattttgtcacctccttattgtttcttgaatggaattatttgctgttctttgtatctcatatgaatagattactgacttttgaaacctccataacattaagtctaactcagtacgagtctgggattttattgttttccttcgttcgtgtttctaaggttttatatcaaagccaattccaagtttattgttacaaaattataacaagtatttaagttatattttatgaaaacaaagttgggacttactaaggaagtatacaggtatcaagggtcactgttagggcaaaggaagctgtggaagctgcaggtggaactgttagaagagtttactacaacaagttaggtttccgagcattgcttaagcccgagtggtttgaaaagaaaggcaggctattaccaaaagcagctagacctcctccaaaacagaaggataaagtggatagcattggccgcctacccgctcctaccaaacctattccattttcggttgaagtggaagagggaacccctggtgaaatattgaccacctaatgaactaggcaaaaataagtttgtttgtgttcagaatttttgtatttctaatatgcagctcatgggtcccatgtgattttgcatagactattattttgcttggctggagaacaaagagggattttatatcatgaggaatattagttaaaaaggatggaagttttcttaacaatgcttttggaattaggatcaacttcatttctggcctttgttgatcttaatcaacctcattactgttttatttattcatttaatttcaatagtttggtattggaataatcttaaatctcagtatctttagaattaaacccttgtaaacaaatttacttgtttaataaaatatgcggttgtaaactacttgccttctattacctttgatctttttagggatatttgtggtacaagtaccaaagttattttgagtttgtaaaattataatttttgtccaatttcttactgttagtattttaaatttaaaacctaattttgtaaatttgttggaagtaaatttgtaagtaattactactaaatgtttttgtcaagatttaatgacttaaaagttgaattttacatgtgtagtgtttaagatactatgagtttgtgaaaatgaaattagataaaaattataattttattaatactgaatactatactgctaaaaaaaattattgagtttatactaattataaactcaattttgagtacttatatcgcaactcataaatatcccttttattacaagaatttcaaaatatggaatcatctgggatttggagttcttgtgtggacccctcgaaagcatttttgtcacaatttgcgagcattgttatagggcactaaggtgtctagtactactatgagataatattt

SEQ ID NO: 298920 - DNA, 5415 bp, Cannabis indica
tttgagagagctgactcgacggagctgtggatctcattgaaaggctcgagctgattagtgaaggtaccgtgagcgcacctcctatagcgagatgaatgccttgattagttgtttggatttactcgactgttatacttagtttgtataatgtgtattatacgctaagtttcttaacagtcatcatgtctcgtctatgtctcttcatgcgtagcgaggttgatgcctcgccttgcactactagtgtcgtatggtttctcgttaatgcacgaggcaatagtttgtatatttttatctcgcgtaagaccttacagtcagcaagttgtaaacatactctgtcaattctgcatttaatgagttattccattttcaaatataaatatcattatatttgttggttcgtattctctcagtttgacatgtgtcctcctctgaagtgctagccgaattttaggtataaccggttgcattttagacttttagtaacaatatgagctctacaaggttaaatgcatattgactttgagcaaattgtttacaaaataaagttcatactaataaggtcactacaataaataagggtttcaagtgtgacactatgaggaataataaaatttcatttctagtagtgatggtattaggtaaggctgaacatttagacccgcaaactcgaccacccgcctcgacccgctgccaaaaaaactaaaaacttgaaaacccgtgtggtcaggtcgggttcaacccgaaaataccccacacgggtttcagattcgggtattaaaaattggttttttgttggtcgggttctaacccgtaacccgaaaaaacattaaaataaattaatttttttattatattaaaaatttaataatattaatttatattttattacatttttcacttttcactattcattcactgtcactatacactattcgaaccaaccagaccaagagtccaagacaagacacaagacccaaaaatccttagaacttcttcttctctagaggcggcgactgcttctcttctccggcggagtcgcatctcagtggccacctcaatccggcaagcctcgtccctactattcaaagtcaaaaaagccttcttcgcccgtgactaccgagtttcgaggtggcgactggcaaggtatgtttcagtattgtcgttggtcgctggcgttgctttgtttgttcttgtagttgtatagtactgtttaataattaatgtgcgaaatcttaattaacaataaattatgagaaatcttaaaatttgtaatcgttcaaaatttataatctagaatataacatcattaatcgatatttttacattatatatgcaaattttcttttgaacgagatagagaatgtgcatattttaataaattatatatatatatatatattattatatgcatatttattgtttattatattattataactacatggggtcctttcagaattgttgtgggggctatctttatataatgtgtatgttaaatataaaaaaagcttacaaaatgtaaaaataaaagaaatagtatttttaaaaattaaatttcatttaagcccataaataaaatattcgggctcagtccaataacacccgaatccgactacgcccaacccgcaatacccaacctgaaaccctccatacccgaacacctgaaaattggatttagttttgcatttctaagacttgaaatctgaaaacccgaacctgaccgtccaaaaatccgacgtgtgtgcagtcctagtatcggcacgacttatcgaagtcctttcggataaaatttattttattttaaaaatatactttatttggtgtgaaattttctttcctaattttttttaccgtatatagagcttagagttagagttagaagtctcaaaagagagaaaaagagtaagcttagagttagaaggctcagcatcttgttttccctttgctttttgctgattttctctttgcatttcatagtctttctttgttgatttttcgctgcctactgtgattggatgtgttcctatgattttgcagaacacatccattgccagcctcgccggtgcagccgttgcctccgccaacaaagctagttctatttggtcttacgttttacctctcctaggcattctctcaagccttgtcatctccttgagaatcaaagctacaccactcatctctctcaacctcagtctcaagatgaaaactcccaaaaaggtcaataacttattctaattgttattgtttccgattataatgaaattgactgatttaattcaatttttatcctattttgaataccaattttgtgctcttgagttcttcgaattaactctaatgaaggtacttggttttattttgcttgtcacatttgttgttggactttgattaagctttattttcgaatgattgtgtatgatattccaatttgtttttggttttactttatttttatgatgttggtttgagacgtgataatgttgaaattcttagtgattcttattattgttcgaatcgttggtttgttctctcgatgatcgaaaaaacatatttctcatgacatttccatactccatataagctgttcgattgaatatagtctaggtgtttcagagttgtatcattggtttaagtctaagcttacttagatattcatctgactgtttttggttgacacttcatagtgttattacactcgaccatacttaatatagtttaaactccgttctactacttaatctagtttgagctctgtatacttcttttttctgttctttgaaattgagctgaaaaaagaccattttctttatgaatcttgctttaattacttttagtatggtgtttggtcttcttttgttcagtagggagcggcataagtggtcctcgctgccaaattaatgaattatttcccattatatctcttgttgccaaaaatatttaatccatgatccacccatccatatagagcactgactggtcgcctaaggcttttatcatcatcatttacctctcttcctatatttctatatattaatagttttctgtacgcacctttctctctttaaaattatcattctttttctctcttcaagtttcagacagctatactcaggtgagtttggggtttttcttttgggtccaattttctattttttttcctagtctattctttatgtgtgctgttttttttagtatatgtaatctggtccatccacaaataaggatgatgtgggggaatggagattttgaactttgaaagtctttgtgcattcaaaacatacacgagtatgtataattagttcttttgtttatataggactcagaagtgaaacagtgagaattaagttaattccatacgcatgtagtgttgtctacagttgtgtgagatttcataaataggaatcgattggagacttcagatttcatatcttgactcgtaatctgtaatagcatttgttgtaagtatatattaatcttattttattagaagggttttttcgtttgacaaatatttcatatatatatatatatatattatgtatattaaccagaattaatgtgattttttttgtcttttcaactataactattacttgattgttttcccaaattaatttaagctaaattattacaactatcaaatttttctaagaataactcgccaattaattaataataattcagaacttttgggtgtgaaatagttacttatcaatttctatattgctatgtcaattcttatgtatagagacagtaacacgatttagtagtgacaatataatacataccgtaggatcttgctttccggtatagatcaacggtgttctgataaaaatccatgtacacaaacttggctcctgggaattgactgtagaaacggttgaccagtcttataatctccgtgttgaaaatttgtatagccttattgatatcgtcattacatcggctgttgttaccattgaatctagctaactcatatgctatgcaaccaatctggcccactgatgtaacaatcatctttcgagcccccaatcgatacaattgctatacgtaagacacattattataataaaattaattaatgaaaagaaaatggtgagttattaattaattaaaattaaaattaatactagtacttacagtgagttgacgtgtgtagtcttgaataagtgctgaagcataagctcttggtgtgtattttgagcttgttgagtagtaatcagtcattaaataatttgttgtacgttttaattgttttctttgatacatgattaatttgtggtcctcagactagaagtgtactaatcaatcttttttatgaaaaggctatagaattgaaagaaacttaaaatatttataattatatgatcacaatatgtatactattacatacattacaatccaataaactactattagatacctgtcaaaatttcaaaacaggagaaagaactacggagagagtctcaatcttccaatgatcttaattttattcactgaagtgtctagctttcttccaaaagacctgtgggatgtggccatcaatattgttgcaacagttttaagtacaaattattttctacacactattttccctttttgctgtaatacatataaataaagctattacaccaaaactgttacagagagaactgtgtttattctgtgtattattatttatttacacaactgtgtttctttgcctactaactcattgtctcttgattttcatttttcagacacaaccaacacaaatatgtttcatgtcctttgtggatctgtacactcattactcattccaagtaataaattctttttagtttatttgtgtactttgatagtaaaaaagaagagttaaagtttgtgtattttgttactcactataattttttagtttcttgagactctctagctgtagaaaatcactcagaacaagattcctagtactaatacctaccaatgtctgtaaatttttagacttaattgaccttaagaattttcgaaattctactgcatcaccaaatgaaaataaaaagtatatatgcttcaactgttccaacttgctcattaaatttggtattattatgtccctcttagagcatttctaagagtatcactaagctcattcacagcaatgtaattattaggaagatttgagtaccaaaactcatcattttcatgaaaagaaacataaacttcaagcacagctctataagaattctgaggaattttaaactctttcaactcagtattcatagaattcttgatttcaaaccataacccatcattcaatagagaatttctgcaatgttaaagcataaaattatccctttgtatttaattgtattactttcttgcttttattatatggtgacatgtgtccctcaataggtctcctctattataaatacaatt

SEQ ID NO: 298921 - DNA, 1414 bp, Cannabis indica
tcaccccattggaataaacaactcaaaaattctcatttactttctctttctctcttcatctttttcttctttcttctcatctattttatattatttcataacagttatggtggtaaccggatatttgaaaatggatttgttagattttttaaattatcactcccaaatgatcccattcgtgcaatatcaaaaaattccaaaaaaatagtgtgtctatgtgcagatagtagccaagctggaatgaatagtcccaaacaaagaaaagaattcacgtgggtatatataactgaattattccaatcattgatatatttttcaaattattattatactctgtacaactattcttgcaagagccaagagggacattcacgtaatgaatgtatagagtatatactactactactattcaatgattcaaaatcaaaaagattcttaaattattttcatcaatgattattgtaaattatatagaataaacctcagtgaattcttatgggtatatagtttttgtaataactaactgcagtatcaaatcaaaaatgtatattttctcttataaatgagtagtttatctagccagtcacttttatatcaaattatcacactcaattcacaaatctaatttgagactcaataaactatttaaatgtaaataatgaattttgcttgattcaattacatggttatagtaacaatgagtggaaagatttaaaactttgcaaatgtattttaaagtgctcaaattcataccaataacaacaaatagacatgctatctacattaactgaaatataatccataacatggacttaccaatctataaaataaactcacagtatatggtgggtgtggatttaagaaatggatgactatatttgagaaacaacccaattattaaagtgaaatataaacaaactgtgtagaacaagtgaaacctattgtccttgttgtgaattccagataatttgcagtccagagatgttgaaacattgatgaatattttaacaaaatatattagtgttctagtgtgtgtaaaatggaaagagttccgcatgggatatgaacccttatttacaagggtatatagagtgcaactttagcgtttgggtttgggccccaagaggtaccaaatttttggtgaatgggtgaggactcacaaacttgacccaccacacacgagcgcgccgtccgtctgatccgcgccaggttggattggttggtgtggtgtgacactctattatttttacagaaaaattatttaatgaaataattattttttattattttcaatttaattaagaaacgtgtttaattggaactgattacttagtcgtatcagagttaatgggacacgttcaaccaaccaactcaccccacgattcaaaaaaattataatttttcaatccattcg

SEQ ID NO: 298922 - DNA, 3708 bp, Cannabis indica
ataaatcagagattatattgcacaaatcgatatttacaacatattagcaccctcaatcgggcctaatcaatctatacacaatcaatctttctatacattactcttctataggttgttaaaccaatctctatctatgtctttgatctttttaggcaaaaataaagcaattctcatctttacacacccctttaattatttcctcaatcattctgctggtattaatgacattagtttgccccagtatagcatttctaagtctccaatatgttgtacaccaaggctacaataacagcaacatacacaagctttcgaaactatttgtgattttggccctctcgatccatctgatcagctagggcaagattggttgttgttgttgtccatcttagccatcgtttgatctccatcaagttttgccgagctaccctgcattcaaaaaataaatgcaagttggtttcgttttgttcatcacacaaacaacacctttcactcacttgcaactcaaatttcaccaatctgtctttggtttttaacctgtttagcatcgccatccatagtatcacactatgctttcgggtatttaatctagccattacttcttggcaccagaacattttacaagaagggggtaaaaagagcttatagccagctgctatggtgtatttttgcccctaaaattctgcaatgtctttgagttgttctttaagagctaccaacttcttgtaaaatgttattatagtaattttattatagtaattaatgtttaaaattgatagtaattacacctagtttttatagggttatgaaatgggataatgtattaataattttatggatgaagagaggtaaaaaccttaataacccaaagggtcaaagtaagtaataactattttcaacggtgcaaatatataaccacttgagtctagttcaagtagttataggagggtgtgtgtgttaagggtcctgagtttgaatctcaaattatgtattgtaatatatgaacgcttaaattaaaaaaacggtgcaaatatatgcaccctcaatccgtagcataaggcatctcagacaatttattgtaagatttattgtataattatttgactatataaaatttagtaattattctgcatcacatctaattctaattatatggtagttttctagatacattcttatgtccctatatatatgttggagaatctcatattgctaatattgctaatgtatcgaaaatatatcaaagaaaggatgaggaatgagctaatttggcaaggaaatgagcctaattgggtacatctaactgccaaaatcaaagaaaatgtaaaacaaagaataatccttgtatggcctaagaaagttagtcaaaaagatgagatttggttcaacaatttgtaaattttatgtatagagacagatttatcaaggccttagcaaactttgttaaggtgcttttagattgtataaacattgttgtgagcaataaaatttgattcatcaaaaaaaaaatatatcgaaaatataatatataagatacatgagtacgttactctttttattgtcaattaattttaagataaaacttcatgcattttaccacacacaattttttttacattttcaatcatacacttccacaaattataacataagtatcatagcctaaaaaaattctaacaagtatccaattcaaatctaataacagtcaaaaagataaaccaaaagagcctcttataattcagagatagtgagtcaaaaatgttgccggtaaaaaaaacaagcaaaaaaaaaagccgcttgtaatttagtaagccaaaaatgctgcttgagatttgttatgacaattcattagttacatgttgagtttgttagagtagttagtagttagttagagttaatttgtaactagctaaagcttatatatataaatcaactcttgttgattaattcattcaataaaaactaaattttagatccattttttcctctttgtcttttactttcttttcttaatgtccaaacatttcaacatgctatcagagcgggaacttccaccattgacaacgaacgtggctcagattagagctcaagttaatggtcaatgtcttccaattacgaacagaaccactagagatactcaggctactagccaaggtcttctaactacaaacagagccatcatagacgattccgcatcgatctcccttaatcatagtttgtcgatccatctcaataatcacaactatctactttggaaacaacaagttctggcagccataagagaaacaaattgcagagattcattttcgatcctcttccgccttgaatgatgaagattgcattcttcgcaatgtcagtcttgcgttcaacgattaggaagttcagggtcaccttctggggtctttacttatttcctcaatgacaaaaagtcttctcagacgcatggttagttgcgaaataactcgtcataactcagtcaatattgatcttattgacacgactccacttgtgtttgaaagctcgtttcaagatctttcaagtcatattttatacttatattacaattctgaatattttaagtcaaaattttgtcctcaagtcaagtgcgattttttctacagataacccaaaaatgatccaacggacacgacttgagctccaaaaattaacaattttcattggtagtcaaatttagccattagatcatcatcaatggtcaagatcaagccagagtgattttttcatatttttttgtattattttagtggattttcttgcctataaagtgagagctccattagcttatttttcacattcaaaaaagtccctacaaggtcaaggcatctctctctagaaatctgagctcttgccttagttaattttcttgtaattctcttgagaaataaaaactcaaagtagacgtagttctatgactgtcgtgacacaataaggagtgaactactataaatcttgtgtgtctctcttatttacttacttaactcttatctcatctcgtatctagcaagcgagtgttgaccagtttttttacaacaacaatcactgctgagattgcttggctacactctctgttttcaaaattacacattcacaataaagactccctaccatatggtgtgacaacttaagcacatttttgttaactgtcaatccaacgttgcaaaccaaacatagtactttatcaaagaaaaggttcaacaagggtttatcgaggtgagacatgtccctgatcaacttgcagaaagtttaagcaaagccatcactagtgcacaatttgctaattttagaactaaactcaaaattaaagatgtgtcaattataagtttgagggttggtgtagctcattagttagctattaagtttgttaaagtagttagttagttagttagaactggtttgtaactagctgaagcttgtatataaatcaactcttgtattaatcattcaatgaaaactactctttcatattcattttctttctctcagactttcactttcttttctcaatgtccaaacatttcaacatagctgtctaaaattgatatgcagaaaataaccactatcttgaaaggatattagagagcctcatattattaatgtatagaaactaaatactaagatcaataaattactcctcttattaccaaatagtttttgtaacgccctaatgctaaggcacgctatagtgctttt

SEQ ID NO: 298923 - DNA, 2592 bp, Cannabis indica
ttagttttcttctccttcagatattaattaatgtccactagcaaccaaagcttaaatataaaaataaatataaattagtaataaaaaagatatgttcaacatcatcattgttataaatttaaacaagatagaaatattagcattaaaaaaaaaagaactaaaatcctcatcaacaagtagcttgtttactggctaaaataattaagagaaaaataaaaacaagttcatcaagaaaagtaaggcctccctctacatatttcctcaaatcacagtttttgcagttacacatttttgcttcaatcaaaattatcgtagttcctaaaggcgtcaatggtacaaacataaaggactcattcatttacatatttttattcatgaattaaaaaaaaaatagaaaagagtcaagttggagggtgaaagggctaatagaaagttagaaaccacgtttctacatctaaagtcaaatctcaactaggtaagttaaaattcaatctttcctaaataaataaaataaaataagctaatccaagatcccaaaactcatacgaagatggcctaaagccagaatctcttacaccccaaaactgtaagagtaaccaaaacccccaatgttatcccaatccatgtagaactaaagtacagataagactaccatattcttcaggcaaaaaaatcaatataaagaaaaaaaaacaagaaaaaagaaaaatcaaaccagcaaaaacaaagagaaaggtctaaatccaaaccaggaacatgtattcatttcatcacaaaacaataataatatagctattagaatccataatagtcgtacacaacaaaaaaaaacacttaacaaattcaaagaacaattattaaaagaaaagaaaaaaaaactttttttttctatttgaaacaaaccagattgaagactaatcagatgctcttgtctccagtgagttggtttctggtccataatttgagaaataaagataaagaaacgaggaatggaaaaggtaaatgcagcccaaatgccaccccatatatatatacataacatatcatgtatgtgtattttgcggtgtgccccgatgtgtgggtgggaccatccatttaaggtcaaccctctccatcagaccgttcaatttttattttttggttggttcagttctttgtgattgtgttagtaaaaaagtctatcagtctcttttagttggtcttctatgtgggaccccttttttgtgatcagccctctttccgtgtcccttctcctgaacgacgaatgcatagagagagaaaacctaccaatcataaattgtaaaatcaccacacgcttttacattcatatcataatctttattcgttttgggtaatttgtgccaaaattctctcttccgtagacagattttttggtaaaagcgtttctgtgatattattaaaatggtaaatcttcatgggtttaggttatcacgtttaaatctactgcgaattttgagcttacattcataagtatgaaaaaataggatcttaaaaatttctcccaactaaccagtgggacacttaaacagtactacacttctcgtcaagaaaagtctccttctaggaaaaaaaataagaaaataataataaaaaaaattaaattaatatttactaatacttttttaattaatttttatttttataattaaaaaaataaaaatattttttaaaaacaaagtctataaaagtatttttactttttaatattttaattgatagtcaaaattttaaaaaagagtgagatgtaaaataatcttcaatttgaaattaagttagtaaatgtattttgttattaaaaaaaataaacaaaataatcatatataataaattaattaataaaaattataaaataaattttaattattttaaaatatatataataattaaattaagttatataaattttttagtattgtattttgtttacacggattgtcgtcaactaatctaagaagatcgtaaaaaataagaggaatgcgatgaattaatttggctaaataaaactacaataaataaaaaggacattagggatttatagtagttcaccccatgtcatgatagtaatgggactatgtctactttgtttttattaattagatccgatacactagagttatgtcctcaagagtgtgaataataatacaaaaatagatttctaggcaaaataaatatccaaacttatgggtaaaaagctcatgggagactcaataccataaacctaataataatggtggtgataatgttcttgggaataatacaccaatgggagcaagaaaagagaatggtctcttgttctttgtaactgtgtacatcaatagtattttagtaatggtggcttggtatcgacaaaatgtgaaggacttaggaaaaagatgaaggaaggaaatctcaagagttgaagtgttcttcgcagagaagcaagtgatcgatataaccagcctatcatttatctttatatgggcttagagtttgtttgtaatccccacatgctggggtgtctcactttcacatcctgtatctatttgtgaataatgaataaaaaagtaggaaaataagtatctataaaaatat

SEQ ID NO: 298924 - DNA, 4478 bp, Cannabis indica
gatgttaatgaaacatacttgttagtaaatctagatcctggtaaaatatatatccaacagttacttcttcccagctaatgaagctattgtgttccctgaagctcaggaagagcatggttagaaaggtatctactataatgatatttgagaaagactcaagtttatctgggttcctaactattttgtctaccctatcaagataatccttcattggatacctacgcagatccaagtttaggaagtaattgtcaaatccccttggtctctcagtgacattcgagacaggctaagggtgcaaattacgcggaagggcatttcacctctttcagaagtacatgcttcgaaagcatttttgtccaggtatgctagaaaaaaccttgcttgtacctcttcctccttagtaaaggggtctagatgatgacttgcccacgtagtcacgagaagttccttatcttttgctgccttattaatcaaaatagacatgtccaaagtaatttgttctttaaaatccactataaaaagtcttactttttgtcacaacaaaacttgtgactaaaagtgaaaagttatgactaattataaatcatcatttctatgttgtgactaaaaggtccgtggctaaaagtattaatcacaaaaattacaatttgttgtgactaaatgtagttttagtgacaatacttgttgtgactaaaactaaattagtgacaatttgtatctaatactatgttttagtcacaagtaatattttattatgactaaaagttacatttagtcacaaaaaaattatgttgtgactaaaaagttgtcaccaaaagtagcagttttttgtaatgatcgttggggatctggggttgacctctacggctaacgccatggatgctttggaaatttgtaatcaatccatgttggtgcaatagcccagtggtcaccaaatcctccactttcagctcctcctctaaaaaagcctcatagaaggttatttgttgtttcaattcgcctgttagcgtagacatggggacgaattctataagaaacaaatcaaagtcatgtatagagatgggactgcatttttaacttttagaaaaaagttacaaaaagatgagtctcgtacctggaatttttaagtccagtgaaagacatcggactcgtttcaaagggaaacatgtcgtgaagaaccagtactcacgtagatctaggcagtgtgaggaggtgcttgttggataatgagtgcgcttgtacttcaagaagcgataaaacccaacctttgtagggtgacccgcatggggagcaatttcagctcataaaaatacagtatctctttcagggttggggcagcctggccctgggatttgcagaatacaaaccatccgaagagcagcttatatgaaacaaaaagaagttggaaggcatagttccttccttaatgcaaaattgaggaaaaaatgttctaagtggaaggtgggctccgcatgaaatatgcgaccaactccatgccccaaaaccttccacactctgggatggagatttcccgatgacagacatcctatgccacatagttcgagaatgttttggatgctaccatcattggaatacgccttcagtaagccgtaattactcagctgattgggtcattgacccatctcccaaatagaggtgttaagtgccaaaggagatagagaggtagctttggatttacctttgcccttgtccttttctttacttttttcctagaggtcttcagaaggcccctttcccagagctgggtcttcaggacccaaacacgcaggggtgcattcgctgaagacactctagggacctcttcaaggctcatgatttccaaatgaaagtcaccatttttactagacactgaaaaataggaagaaaagaaaacccaagtagttaataccccatatccaaatgaaaaataaagcattgaggaaggactccctaaactgcttggagaggtccctgccagactcgtcacatgaaaggccaccctcgtagagcaatctattatggtgacgaatcaggaatctaagaatacaacaaatataaaaagtctaggtttttctttcaaaaacaaagagaggaaagaggattgtcctggaaactaacctaaaccaagaaaaggttaacctaaatgtcagaactagaaaactttattcacatagacgctcgcatcgacctaatcaaaaggaaaaaaccacgacagaaccctagttccagaggtattattccaagtattgtgcgcacccattttacacacagtaaccctaatattcagacataaatcctacgcatgcaaaatagtgtatttctacaaactcgagaccacattttagaatcaaagtaggaaataacggtccaaaaagaggaaatacttacttgtagaagggttgaggaagaatcactagtggagtgtggttgtccaaagtcctatgagccacttgagggtctggttgtgactcaccataacaaagaactcgtcgcctgtatgagctttgatcattgccaaaatctggcaacaaggttgggaaagaagatgaggtttctggttcagagaagtgtttaagagtgagtgtacttctgggaaaatgttgtgggttaaaacttgcagattaaagtaagaaaggggaaaatgaacttcttcgccaagtttttcatttatatgggtggcaacagattggtatgttttgaaatgggcggtctagatcgtacctatcaagagttgctccatcaaaaggctggggactcgaggaatttgcatttaatgcaccttgggagagagaatgggccattcattacttatcatttcacggtagcaagaccattgcaacacgaaccaatcgtcttttcatttcctgccactactcgttgtccagaagaaacgcgcctaggcctggcgcgtaagccttacggcttcacaaaatgtaacaaaatgatagttgtatcacaacaaggggtatatcaactcttccgctgtccaaagttacacaaaagatcgcttccacatttcaagatattattggcgtattataataataaattaagcatctggaaagaagctgcaagctctcatcactcaggagtccgggaacttggggtaaatattattcgtattcctgaatgcctgatatgtggccatcacagaagggtgccactctagaccatccatgatcagtatatgctttccacttaatgacactaaggagactatattctggaagctaatcaaaggtcctcaatgttagcgagtacagataggactcctactatccatccgcaattagggagaatcaaagttactcgaagcttcaagtattccagaaagttagtaggtcagtgtgatccgagaaggctttgagtttttgacactggagcttattcaacagtaccctatccagaatccgaagtgacagttacccatcctctgacaccgaatcagatattgttccctgcatcagaccatagtagcgtgtacgtgcctctaaagtcctcttttttgtccaacaacttgtctaggtagtaactttttaaggtaaaacctttgagtggcacgtgcccttgttcacatgaatccttcactgcagtcgtacaccacacgatggggaagttttctacctaataatggtcagatcgtcatgttgtagtgccagcccttgcttacattaagcctataaatactcttattttttatgtacaaaggatgaacaattttatattagccgaacctctacgaaaattcttacaagctttcttcttcatcaagagaaacaagaggagtggagagctaggattcatactgtaaacacttgtattattaaaatacttgcccaaagggccaatacagctgactcgtggactacgaattattaacgtctgaactacataaaaattgtttgcctattatttgctattttatttatttcttatgctctgatttattagtttccgaaaatctcgataaacaaaacctaatactaaaatacaccaataacgatttatcatctttaaattttataatacctgttagtattattcatagtaatagtaaaataaggatctaaatattgtattaaaaaggatcaaatatactttacatatttgtttgcagtaaaaagtaatgttaattttattgaattttagaaagccaatattatattattatttttttcctcttgcattcttctccctttaaaaagttaataaatagaaaagaaaattctgactttatgtctaattagatcatgaaatttagttatgacataaaatatttcataggttttatgttattttggcaatttaatatgtgatacatactttgaattataggttttctctttttttggggggagggggaggggggaaggagagaaattttttattaaattatgaaaaaaattaggtcacgttaatatttttttatttaagaaattaaaagaataaaaatattttttaaaacatattctataaaa

SEQ ID NO: 298925 - DNA, 3412 bp, Cannabis indica
tatatatatatattaaaataagtttattgttaatggttcctttgtagagtttttttttaataaatgcacatagctcaccaattagtctcattaaaattcatactttgtattagcacttccaacttcacacagaggttattatctctgtcctatatgaattataacataataactaataaacattgttttatataatcccaaatgttggatatcatcatatcattagctttaattaggaaaagagtggtgatctaaaataaaatttagggactaattggaatattccatgttcaagctagtgaagggtccatatatatatataaatattatcgagtattaattacattgtcaagccatgcaaaaagttgctcgtatatgttaataatggtttgtacatatatgtactagctagagtctagacatgactagagagatgaataaatgtaagccacaagttacattagctttatcattattccacttaaactaataattaaagaaatttctgcttaaataaaagttaaaactgacatatatgttaacaaagtcaattaagaaaaagcagatattctacatatatatatatatattaaaatattagggtagccccgctgactttccataaccaaacaactatgttttaaagtgggatacagtacatgtcacaaactttattacagtgaccactctcataaggttattagaagaatttagcttcatttttgtgattatgtgcatcactatgaaatcagaagaagaagaagactacaataaataagcaatagcaatccccatacataacttctgcttagctcataggatcctaagtacccttagttaggtactaagtttaattatgattccatggctggttatcaagactcattgctttaccattaattagtgggtttcaactaaacataaaatatttttttaaagctttttacagtaattaaatattcttctctcagatccaagtaaaaggcctagtcatcagtcacactttttttatattaaaaaatataaaactactctcattagaagaatttttgtcctattgtcctacaagagacaccaattcatgcaaccaattaaatattattccaaagtcttgctcacacagctctataaatagttgaagccatttgagccacaagaagcacattaagggcattcttcttccctcaacatatctttctccaaattacttcaaacaaaaggaagtgatcattataatctgaagaaagtactcatttgagctatagccatggagtcagtaattcctcaacaaaagtctggattttttgccaggcttaaggccttgccttgtaaggtcaagcacaatattatcatggttggaaagaatataaaaaagcttggaaaagatgacccaagaagagttattcactcactgaaagtgggattagctctcacattagtgtccttgttttactatttgaaacctctttatgatggttttggtatgtcaggaatatgggctgttctaactgtggttgtagtctttgagttcagtgtaggtaagagacaacaaacttagctattagagtgattattaattaacatatatagtactttggcttcttattaatgaataataataataacaatataatgtatatgtaggtgcaacccttggaaaaggtataaatagagcttgtgcaacattaacagctggtgctctaggtgttggagctctacacttatcaagtctttttccaaaggaagagcagcccattattcttgggtcccttgtctttgtactaggtaattattttatagtactgtgtagtgctcctataagttctatgtatctatctatatgtggggttatatataattgatcaatattgagtaataatataattttctgttatgattgttgtttcagctgcagcaactacattcacacgattcttccccaagatcaaagcaagatatgattatggactcatcatattcatcttgacattcagtatgatttccatctctggatatcgagttgacaagctacttcagatggcacatcaaagactttccacaatcttaattggtggagcgacctgtattatcgtctccatatgtgtttgtccagtttgggctggtcaagatcttcataacttgactgcctctaacattgacaagcttgcaaactatttagaaggtatagttttgttagggtcttatggaccaatattaaaaaccataaaaagactgggagagacctattaattattggttaagatatactttggtttcactgtttacaggttttggagatacatattttcaaactgccccagaagacaaagattgtgtcaacgacatcaaaaacgacaagtcatttctccaaggatataaaagtgtcctcaattcaaaagccaatgaagaatctctggtgagtaaacacacacaaaaaaaaaatgcatattctcttaactcacacccttatatatattgacaagaaatgctaaaggtactagtgattcaattaagtatcggatcccatataacaatcgtaacgctacataaaggtgatagacaccactggtacctaatagcaatgctcttattgaccttgtgtttaattttctttcctttatattcaggcaaattttgctaggtgggaaccaggacatggtcgttttctgtttcgtcatccatggaaacaatatttagaagattgcaagctcttgctcgccaatgtgcttatctgatatgaaagctctacaaatatccaatgttcttctgatatacaggtatatatatatatatatatatacatacataccattatgttcatccaatccatatatagtcaaaagggtatagagcctttcacttaacttcctctgtttattattaattttgacattgcaggcacaacaagatttcacaagtctaattcaagaatcatgcattaaaatgagctcagaaacaggaaagaccttgaaatcattagcaacatcaatcaaagcaatgaaacatccaaactctgccactgaacatgtggagaactcgaaaacagccgctaaggacttgaagagtgcacttgaggccgcagcaatagaagatttagacctattggctatcatatcagctgcaacagttgcttctacattggttgaaatcgtagagtgtgttgagaaaatctcaaactcagtccatgagctctcccaaatggctcatttcaagaaagttgaggccactgtctcccccgaaaaggcgccacagatgttgcttcaccggggaactgtgaagccggtattgttggatggtgacactgatgaccatgttgtcatcacagttcatgatgatatagcttctgattcaccagacaaacagaatgttaagaccccaaagacaagagtggcgccagcagtattgtaaatat

SEQ ID NO: 298926 - DNA, 2388 bp, Cannabis indica
ccatcgatagtatgccacatagttgtagataatcctccacttaacattctagacaggttcgctaggagaatatagaaagacttggttaataaagtaggtatgattgcttgagggatcttcatcattcaatttcagaatatggagaaaagacatagagtcttacatggaggatatgtattctttgatcgaaaaccaatggtcatgaaaccatggaattcgagagacgatttcaccaagacagagattacaactgtatctacttggtttcagttgaagggcctagatatcaaatatttgggggggaaatctttattcaagattgttgagaagataggcaatccacttcaagttgatgagatataacttactgtaccctcgaattctcattgaggtaagtttggctcaagacttttctgacaaaatctcatttattgatgaatatgataatggcatagaattagatgtgaaatatgaatggttgcctcttgtttgctataattgcttaggaataggggccatgaaaccaaaatgtgtaggaagaaggagccatcgaaagaactagagaagaacatatgggctccaaagaagaagcctagtaaagaacctgccattgatgagcaaggttttcaacaggtggtgaaggggaaaaaagcggtatcaaatgagccactcatagaaataaaagtgaataatatgtttgatgctcttgatgatgagcaaggagaagatagagacagagaagttaacataggtagggggagatccctcaacctttaatatataaaattctttgttggaatgtaaggggaattaacaaccaataaaaatataatgattaattaaataaagagattgatttattctaagaaggttggcgtggttagtctccttgaaactaaggtgaagaataaaaatatgggggcagttcatacaagtttatttttgggttggtgctttacgaataacaatccatggcttgacaaggggagaatagtgattgcttggcaaccaaatatgtactctattgacattagagtgtgtactagccaactcagtcactgtttttcatagtcaagacatcaacaaggtgagttctatatcacctttctgtatggatttaacgaagaaaaaaaaagaagttagctgtggcatgaattgaaggatatctctactcaagtggaaattggatagtcctatgtgatttaaatgatatcttaaattctaatgaaaggggtggggaagcactcaaataaacaaccatctctatcttttagagagtgtattgagagatgttatcttgaagacttgaaatttttaggatcatttttgacctagaataataagcagaagccagaagacaaggtattcttaaacattagtagagcattagtcaatgagaaatggacttgttattttcagcactctgaagcaactttcttatctgatggtttgtttgatcattggtatcttttcaccaaaatgtggcctgtgggaaaaagccacttaggtactgcatcatgtggaaaagtgctcatggctttgatcaaaaagtgaaacaaagttgagaagaaaaagtttgtgacacaccaatgtttaaaatggtgacaaagcttaagagattgaaagatgtgtttaaagacatcaataaagaaggcttcaatgatattcataaagaaaaaatctaagccaaaagtgttttgatagaaactcaagagaatcttagtaaggatcctttgaattctggtttaatgcttgaagaacagaatgtaagggagaattacatggccattcacaaagcatacacctccttcttaactcaaaaagccacggttacttgggccaagaatggagatgaaaacacagtgatcttccacgcgtctttaagagctaggagagttcaaaacagaatttattctacagagaataattatggaatctggtgtgatgatccaaccactgttcaagatgcttttttacagtattatcaaagcttgttgggaactgatatggatggaagacttcatgtgaatgcaaaattatggatgtttgacccaagctctcacaatcacatctcaatattttacaagctgaatacacaactaaggaagttaaagaggctatctttttcattccaggtatcaagtcacctggacctgatggatatggaagtagtttttatcaagataattagcacttggtgggatccgagacacaagctattgtactatcttttttaaactcatggaaactgctcaaggagatacatgctacttgtaacgtccccgcgtcaagcctctattggtcccttacacccatagaataatggtttttatacatgagtacgtcactttggctgcttcaaggattgatgactgaccctacagacca

SEQ ID NO: 298927 - DNA, 5297 bp, Cannabis indica
tagttcatgggaaagtttttaaccatcttaaaagttcagggagcatgatttggtacatgtcaaagtttggggaaaaaaatcctaattagtctaaatatatttataaattaaaataaattaaatttagtgtaataaaaaataatacaattattgttgtgagacctatattaatttatataataaaattatatattcttaatcgggctaaattaagtaattgcagtcctgtacttaattgttttatttgaagttgcaattatttctaaaaaaaatgcttatctctttcctgtttatcaatcacatccaagatcgaattattttaaaattaattcaatacgatggtatgggtagggtaggggccaaatcagaagaatttacaggacactacactgctagctaggctgacaaacttcaacaaaattgaaatatgaaccattcattattttcttaccgattaagataaaaactactaattataacacacagaaatatatagaaatgattcactgataaatcatactctgctgcaattgcaaagttaaagaaacttagcaaactcaagtgctatagatagtgaatcaattaccatggagttgctgagttttgtccgttatctagatacgactatagtaggattattcattgccgtagttgggttttccttgttagtactaatccagcaaaggaataataattcaagaatcaacataaataaaccaccggaagccggcggcggatggccattgataggccatattcttcatcttcaaagaggatcacagcttccccacataactctggccaattgggctgacaaatatggacccgttttcaccatccgtatcggacttcatccagctcttgtaataagtagcagggacatagctaaggagtgtttcaccacaaacgatgctgttttttccactcgtcctaaactaatcaggtccgaaatcttgggatggaactacgctagtttcggcttcgcaccttacgggccttattggcgcaaactacgcaagatagcaacctcggagttactctcgaataccaagttggaacaactcagacatgttcgagaatcagaagtgcagagcttcttgaaagacatttacaacaagtgcagatctaataacgaaggctgtgtgtcagttgagatgaagaagttgatagcagacataaatctgaacgtgagtcttcgaatggtggctgggaaacggtattttggtggtgactcgagagagaagaaagagactgagcgatgccagaaagctatgagagaatttttccgtttgactggactttttttagtgggagatgctattccttttcttaggtggttcgactttggtggacatgagaaagctatgaaggcaacgctcaaggaattggatagtcttgctgaggaatggttagaagaacatcatcaacgaactagtcttgacacagatttcattgatgtcttgacaccgatactccaatcatcttctgatcttgcaggtcatgatgcttttactgttaacaaagctacggtcatggtacgtacaaaactaattatatatgttatattttaattaataatgttttttatatatgttttgtttgtgggcgtagaatcttatttctggggcaactgatacaactacagtaacgatagtttgggctctgtcgctggttttaaaccacagtagcgtgttgaagaagattcaggaagagctggactttcatgttggtaaggaaagattagttaatgaatgtgatataggaagtttggtgtatcttcaagccgtggtgaaagagacactaaggttataccctgctgcaccactctctgggcctagagaatccacccaagactgcaccgtaggtggctatcatattccgaaaggcacacgcctaattaccaacgtttggaagatccaagtggaccctttaatatggtcagacccaatggatttcaaaccagagagattcttgacggaagcacacaaggatgtagatgtgaaaggaaagcattacgagcttatcccttttgggtgtggtcgaaggtcttgtcctgggataagttatggccttcaaatgactcacttggtgttagcttcgtttcttcaagcttttgaggtgtcctcctgtacctgtacggatgaggcagtgctggacttgacacccacttttggtctaacaaatgcaaaagcaactccccttcaaattctactcaaacctcgattgtctcatccttctctagctttcagttcctttgataattaggacgtctttttgagttttttactctttctgttttcataaaccaaataatctctgttctgatctgtgttaccatcaacaccctttttctcgatgttttcataagagcatttttcttgaataaatatagctaaaactatgaaacacttttaattctatatgtgtaagtgtaactatcgatattccatttccctatgaaaatacttttagtatatctttttctctgtttgccaggtagcatttgtagtatctttgctttggctatattttttcctttgtcggcatagctttaggtttttttttttagttagatgaaaatgcatattatattaaataaagagttcataatacaataagcatttaggggtggaggtatagcctccaaccaattaatacaaatagagttcaccaaaagagcatactttgctagtaaatgagcagcagtattagcaaatctaaatatatgaaaaatctgcactccaggaaaattagacactaagagagaaatattcgttaacacactatgaaaatcagaaacagaagcgtgagaagacgacaatcctttaaccactatagagaatcagtctcaatataatgaatagtaattgaagatctttaagccatggcaaaccatacattaaagccatagcttccattatttctggtttaaagttacctgggaaaggcagcgacatagcagcgataatatcaccaccacagttacgaagaaccgcaccaaaattgaggaattagtcatgttgttaaccagtatcagtgttcaatttcaacctaccagaaggagaattcatccaaggtgaattgttgttggcagcatgtgatgatgaggaagtagcagtagaggttgttttcgtgaggtgcatggccgtttgaaattcatcaaggtaagtaatagcaaagtataagagaatatcatgtgattttggtttcttgctattcttttctttattcctttcactccaaatactccaaaggattattgcaaattgctccaactgtaagtgattccatgttgcagaaacttgtaacaacaactcattaagcgtcatttgcccagtaagatgattactaagagaaaatgatgaagcttaatttccaaactcgcttaggacaagtacaaaagaatagagcatgttggatcgtttctttatcaacgtgggacaatgaacatacaggagaatcaacaacgtgtcttatatgcaaaatatcagccacaagcaagcagtcatggatggctctccatagaaaaattcggacctttgatggaatagttagcacccaaaaaattttctactattgttgagtttgcaaaccactaaccgtaggttattgttcctccaaatgtgtagccaaatagtatagcttgatttaaccgcataagcgccatttgattcgtagtgccaaatttgttgatcatgttaggatgttaatgctagaggaatactttgaattttttgaacatccgaaacaaaaaatatggtcttcaagattggtaaattccattgacgggttttggaaattaagctagagaccctcatattatgatcaacacctttgaaaattaatggtctaaaattggatatcccaggcaaccaaggatccgagccacatatgatgctatgaccatctcttactctccatcttaagcccttagctagcaactccttaccccaaacaatcccttgccaagttagggacggataagatcgaggtcccatatctaagaaagaaatgtttttgaaatatcatggcttaagtatacaactcattagagatgtaggatttgaggaaatacgccaagcttgtttggccaataaggcctcattaaagtgaacaaaactctaaaaacccaatccaccttcgactttagagtggcaaagtatagtctaagttttccaattaatacctgagcccgaagagtataaaccccaccaaaacttgttcatcataacttcaatttcgttgataagggatttagagagacggaagaacctcattgcataagttggaatagattgggcaacaactttaagaagaatttccttgccaccaactgaaaacaattgctcttgcgaggcagaaaattgattccaaagtttttgttttatctccccaaataaaacttttttgtcctttcctgagtaagatggaagattcaggtatcgctcatggcatggctgaattggcatgagaagtatttgttgcaaattagcttgaattaagggaagcgtatttggtgagaaggacagtacagacttctccacattcaacttttgtcccgaagcacgacaataataatcaagagagttttttatgacagtggctgaacgtgaattaacacgacaaaggatcaaactatcatctatgtaaaataaatgagatactgacgaagtgcctcttgaaacctttaaaccatgaagattaccacttgattcttcatattaaaaaattctagaaataccttcagcacaaatgataaaaagataaggcaagagaggatccccttgtcgaatcctacgactaagaataacttgtcctttgacggatcccttgatcaagaaagaatatacaacattttgaatccagcgtaaaataagagccaccacaaaaggatcaaacccccttgctaacatcatactttgtataaaatgccattccactctatcaaacaccttactaatatcaagtttaatggtagcataaccttccctccatctatttaagtgctttaaagaatgtagcaattcaaaatcaactaacacattatccgtaatgagtcgagatggaagaaacacactttgcgaatcggaaatacccagaccaagatattgttggaaattattttaccaggatctagatttactaccaagtatgcttcattaacatcctaatatgaattctaaaacaatgaaataaacatataagagtttaagaaaatcttacattcggtgcagcggaatataatgactccttccattcagatctctagcccttggttcctttttgtagcagagcat

SEQ ID NO: 298928 - DNA, 1420 bp, Cannabis indica
taattcaattttactatttcagtgattgtttatgtactaaaccatgctccctagattttgatatctaccaaatcatgcacctcgaactttgacatgtactaaatcatgctctctgaactttcccatgttagacttttttttacaaaaattggacaaaagtccttaaatctaacaatctcaatagttcatggggtatttttaacaaccttaaaagttcagggagctgatttagtacatgtcaaagtttgagggaggtgggaaatcctaattagcctagtaactataaagaaatgaactttagtagtgacactgttattgtagtttttttgacaaggcagcagtggagactgcatcagatgtgaaaaaagagtcagcaatgaacacatggagattatgcactgtaacacaagttgaggagctcaagtccatactaaggttgctccccatatgggcaacaagtataattttctatgctgcctatagccaaatgggaaccttagttgttctacaaggaaacaccatggaccttcatgtgaccaactccttccaaatttcatcagcctctctctccctctttgacaccataagtgtcatcttttgggtcccagtttacgaccgtttaatcgtgccattcgctagaaaattcaccggtcacaacaatggcttcactcagctacaacgaatggcgattggccttgtgatctccacattttccatgtttgttgcaggtaaggaaatagtagaaaattctgtccccaaattacatatttcttccaatgtaagtaaattttgagtggtgaattttaatctgtggctgtagggacactagagtttgtgagactaagggaggtgaaaaaacacaattactatgagctaaaacacattcccatgtcaattttttggcaagttcctcagtatttcattttaggttgtgctgaggtctttaccatcattgggcagctggagttcttctatgagcaagctccagacactatgaggagtctttgttcagctcttgcactcacaaccaatgccttgggaagctatttgagtacttttctagtcactgtagtaactgacttgagtactagaaatgggaagcttggatggataccagacaacttgaactatggtcatgttgattatttcttctggcttttggctctgttgagtttgcttaattttcttgtgtttcttttggtggccaagtggtatacttacaaaaagccactgtaattggctgattgaaaagttattgagttattctatactctgcaagtttatgcaatatttaattccttattatatatatctattctatataaagtatacctatataactgaaattcttggtttttgagaattttatgagtgacttttaattttatttaataaaataataaaatattatttatctata

SEQ ID NO: 298929 - DNA, 2036 bp, Cannabis indica
ttttatttttagtcacaaattttgttgtgactaaaagtgagatttttttagtactcttagttcatttttatctttttaaaagaaaatctttacagtagaaggactaatttgttatttctttcaagtaaaatattagtatagatcgttcgtaaatgtaactcgttattcaaacaactattctgaattcctagagccccatgtaaggcttgttggaaaacttgttgctcaacttggttaatcgctatttattgttcaaaataaatagttttatttctgtaattttttagttgttccaaagtctaagaagttgatttaatcaaatttgcatatgacttcattacgttcgttaattagtgtgtgtagtgtgtgtgtaatatataggtaggaagtgaggtgcactatacaatcgtacttaaagaaacctaattagaatgagaatgacagttacgttcattatcaatgtagataatgtattatttagaaaaattaaaactagcaattatatataactcaaatttatcatatgtagtatttaaagtactatttctccaacctgaactagcaggatctgccacacagaaatcttgaagaggacttggctcgaaagcaatggccaaagcaaacgtggtggccacaaaaatcaacagcaggactcggtttgccatgaatatgatcttgaatatatataatgtaaagaattaatacctagttataatatacctatatatatatgtattgcacaaaatcaatttgagttgttgtgaattaaatgtagtggaataaagctttatatagaagatgctcgtgaagaaagaaatagcttggttacaccagaaaattaaagttgccgtctctcaacactaaaacaagtcttatattaattaattacaatctgcattctgcaactcaagccagttcaactctttctgtccatgcattcaatccaaaattaatgttcaatatataaatgtatatttatatataccgtatgtatgtacttattaataatgacttagcagatatggatatacgttaactgttaaacaacatgttcttccaagaatctcatgccaaattggacggttcatttaggctcgaagaataatgaaaattagtatcgcttaattactatgtcaatatatagtttcgattaattctgagacaaatcgaattctcgtaatctgatgctaacattgcctatattgatctaaactgaaaaaaataatgttttcttttacatgataaaaaaaaaaaccggccaagactggactgacatggtcaaattatattatagtttcatatatatcaccttaattatatagaagtcatattaataatctcatattcagatttaaaaaaagttcaaatatagaagaatcatcatgtttctcattgaatgaagaagtgtagaggctgtttccaagaccagttcctaatcttttattacattctaaggaatacagagtaactaattctactagaaagccagaaactctaccaattaatctttatttaacactcttcgaaagatatggactgtgtataactatacattgtaaagtcccaagcatattgcttatcaaaaattagaaatgaaataagtgataaggtcttgatgatgaatttgtaagtgagttgattgtgtttatccctgtctcttcttatgagctactatatgttaagagttaattaggaacttcctttttctgtaagatagttagtcattagagttagttaaacacaattgttaatgctgttatttaattgttgagttattttatactgctatttaagtgtatttatacctataaactatctcattaatcaatatacataattcattaatccgcaacatcatttcttaacatggtgttagagtaatgttgtgtctctattattttccatttatgtttttgaagctatttgttcttctcgatccatctcttgttttcttggtttgtcattaagtcctcttcgactccatcaacggttaggcatggcaaattgaagctttttcgcggatcgggtcggggccc

SEQ ID NO: 298930 - DNA, 4529 bp, Cannabis indica
aaagagccaccaaaaatctaaaaaactgattaaaaaagtagagccaaagtcaaaagagtcacttatgatccggggatagtgagcaaaaaagaatcacacatctgtttatgcttagtgattgtgatatgttgtcattatcatagtgttgctgattatgttcacacacaatggggtaccgtgtgaaatcaagttttttgcgtaatagatttatgtagaacaacagacttttgtcatccttgatttgtagtggttggcattcttctttcagatgatatttcagttgtatttgtgttgtatcaggattgcattgtagtttgtccatcattattttcactagttattgatcaaaagtgaaatctcttgatagtaattctccacttgattcgtaatcaacatagtttttattgtcatcccaatgaccattgctctgtactaaaatttacagaggttccatgtcttgaaatttgtgtattcgttatattatttagtactaatagttgtaaataaatattttaatctaataaaaaaacttataaacaactatttttttcaataaacattagataacatctaattcaactatatttgtatttattttttttttttaaaaaaaactaacttatatattttttcaaattttgttcatagttctaaacaactaattttatctatcaaaataaaccgtaaatgagatttaattcaacaatagttgttcatttgtaaacaaacaaacattataatcctcaaaaacaacatatttacaactatttcctcatgaaaaacagttgattatatttgtatgtattagtatttttttcagttataatctaatctcatttgtttattaacatcaactaattttctatatcattaattctttatctgatttccacaatctaaaaaatatttataattataaccatgaagaaaactttttaaataacttaattaagaagaaaatcatttgaaatttatgtaacttgaatttgttctctgattcgtttccgagtaagcttcgaagtttatacgatctccttttattcaaattctctggccaattcgatttgaattttcgattttaggttgtttctgcatttttttcttatcgatggagatccaaatctttgtgttctttttttttcctttcatttttccttttgtatttgaattttttgggatttgattatttttttggttgagatctacattttgttgcagcttaaattttttatttttgaataaaaatggtggagatttgagatgagtgtggttcaaatgggtcacaaagaaggaggaactgcatgcctctgtgttttttgttgaaaccatatttttgaaaataaaaagttttcttttctattgttatttattttctttttttagagtaaaaatgtaaattggtgtcattaattacttattatagaaaaaaaaaaaaactcatttttaaaattccttataaaagaagaaatatccacaagagaaaaactagcaacaaacaaaaaaaattcatattccaaaagacatttactccacaatctagggagtagtttgttaaacaatgggacatagtctacacaaaacaataaacttctcataataattattaatttgttttgatttatggattttgacattttaataaacttttaatttttttttatttggctattttagatttttactctcgaattatgatatatacattattgtgcctttgaatttttctgcccgttcaaaatagtttttgaactattcacagtattgtaaattgatcattctgtgaaattttattacatttggcaaataaaatgatgacataactgcttagctaattgtcacatcagtaccatatcaacgccatgtataattaatttgaaaaagataatttattttttttttaatttagttttacgtaattttcttaatcatgaattgatttttaatttaataatttttttaaaatacttaatttttattttttaatattaaattatacatgtggtattgatgtgatgattaactatacatgttattattttatttaacacgtgtgacaaaacttgacaaaaaaacctatttaataatacataaattataactcgcgacacaaaaatcctaaataaccattttttttttttccaatgattataaattatagtaagcaatataataactcatgaattttttattctctctcaattgaattgtagacaattttgatttagaaagaaataataattcgatgaaatttttataagatttgtgcaatatcaataacataaaaataattaagcattataaagtagtttctaatataggattaacaattataagttgtataatttataatagctaacaatatgaaactcgaaagaactcatcatctgaaaccaaatcaacctttagtaaaggctctctgagctgtgatgttgttgtaccccaaacactaaaactatttagttgcacaattatttcttcaaacttattacttatataattctttccttctataaccatcatcttcaaatattgacccaccttccaaggtatactgcacataataaatacacatatactaaattagtaaatcagtaaaaaaaaattaataatagctaaacaataaaattttcataattaaagagttttttgccgcaaaaccctctcaactattattttacggtaaaatcctccaaattactaaactgtttacaaatttaaggtgacattcattttccacaattaactgtcaacatagactgtttatgtgtacactcttatacatgtggcatgtttatattataatattattatttaaaaattatttcaaattttatactatttttttattatatttaattttaagatgaattttaataataattttaaaataatttgagcttagatagttaaatacaagtaaaaaaacagttaaagagttcagccgtcaaaaactcataattaaataaatattaggtttagtatgatttgctcaccgcattctatcaaaagaaaatgcaccgtcgactatatcctcaagaatcacaagaccgcgttgatagaatctaatataatcaactccttcaaatgatttgggatacaatggcttgtatgtctctccatttttcttgaagagcataacacttacaacaactccatcttcacaaacatcgtcgtacaacagatctccgaaatcacagggttgaatttcaactatcttaggattttgtctagattttgattctattttcacttgaagagtataatcagaacaatcattgtaaatccttaccgtttgttcgaacatattaatcttccttcccatttttaatgatcgatcaatagtgaataatgatcttaattatatgttctgtttggctatatataatataattaataattaagtaatcctagttggaaacgaattagtaataatgatacttttgatttgttaaatataataaaagatatttaaaaatatttacgtgtataatttaataaatcagaaagaaaagaaattcaactaattaattgtgataaccataaaattatttaaatttgaatcccactcataatcttctttaataaaatgaaaaatatttcttgcaaaaaaaaaaaagtaaaatagaaaaataaaaaagataataataataaagtgattttaattacaaatatcaatcccactaacgagaatggaatatcatttgcaacaattttatagttaaaagagaattttcgcaaaaaataaaataagggttcaaaactatatcagaatcttaatttgagggaataaattctatttattctaattatataagagtaatataaaagtagtatataaattaaacacgcatccactgtgaaatctttataaggcctagttaattttgttgcacaagtcacgtgtttatttgttttgagggccacaccacatcacaaattcaatcctctctattaagagctaagcaccaatcattttttgacacttagatcgtgagcttaattcagcccgaataaaagagcattgatattagacaccaatagaatctagcaccttctcgacatgtcgcgttgtgattggctagcgatactccttaaaagcaattatattaaattatataagacccaataattagttggactaataacgatattaacacataagagatgtgttaggcactacttgtatccattagtatttttacaaaaaaaaaatgggagccaagaatatatatgggtaaatatggtatatatttttttacataataattaattattatcgttaatttaattcaaaagttacataggatcttcccacttaaaagaaaaaaaaaaaaaaaaaaaaacgttaacgtgtattggtacccgtcgaaatagcattctttctatgtttgttgagtcaaataagtcatctctagtacaaatactattgtaaagtagataataccactgtttagttggtaagtacttccctaacctacaataatatataaataataaacaaatagtgaattattgtagacccggaaacc

SEQ ID NO: 298931 - DNA, 1539 bp, Cannabis indica
ccacaaatgaccaatctcttactcaactcctgcctccacctgaaccccacatacaagacctacccctacctcttttcagcaaactcaacttaatgaagctgcaactgatttaaacaccaatttctctaacaaaactcatgggatgagaacaagaagccaaagtggtattctcaaacctaaagcttatctggccactaaattccctctcccagaagctcttatcctatcggaaccaaaatccacctccactgccattaaacaacctcagtggtttaaatctatgcaacatgagttcgctgcattataaagggttggaacctggtctctggtgccttacacccctggcatgacagtaattggtaacaagtggcttcataaagtgaaactaaatactgatggcagtttggacaaacttaaatctacacttgtggctaaaggttacttgcagacacctggaatagactatgaagagactttctctccagtggtaaaacctgtaactataaggattatcctcactctagctgtgtctttgaattggataattaaacagttggacataagcaatgctttcttgaatggaacattgaatgagagagtgtttatggttcaaccaaaaggatttgttgacccttccaaacctaatcatgtgtgtctattacataaggctctatatggccttaaataagcttttagggcctggaataaaactctcaaagacactctcactcaatgaggattctctccatccaaatctgataattctctttttacctatggatcaggcagtcagctaatcatcctgctagtttatgtggataacttccttgtcataggcccagatgtaactttcattaacaaattcatctcaaacctaagccaatccttctccctaaaagatcttggtaatgttcactacgtcttgggagttaagatattcagagatgccactagaatgtatttgtcataaacaaaatacatcactgacctgcttgtcaaattaaaaatggatggagctaaaccttgcccgaatcccacaagtgtcagcacaaaattgtctcttacagatggtgaccctcttaaagacaaaatactatacagaagtacacttggagcgttgcagtatctcactctcaccaaacctgatgttgcatacatatcattaacaaacttagccagttcattcatgctcccacttctacacactgggaagcttgtaaaagactgatgagatacctcaaagggacaatcctgcatggccttcatctcgctcctgctacctcattttcaattcaagggtattctaatgcagattgggcatcatgtgttgatgataggtgttgacttttcttttagccaacgacaatgagtcttttaataagcgataaacgatatgtcgtaataagaatacgtaataaagcaaataatgataataagaagacatagaaattttatagaggttcagccccgagcagttcggtaatagcctaatcctcgttaattgtattgacttaagaataagaaagaagattccttttc

SEQ ID NO: 298932 - DNA, 1004 bp, Cannabis indica
ttttttttttttttttgaattgagaaaaactttattaagcaacactaggcttatttgctttagaagaagcagcagcacaaagaggaattacatcagtccatatagcagacttttgagccaacctactccaatgagcaaggttattagctactttattacagtctctattaacaaatgagaatcgtaaatactgaaaagaagctctaaattggttaatatcctgcaccaattgcccccaatccgtgggatagcaagcattgttctgtaatgtagtgatagcagcttggcaatctgaagcgattatagcatgagagaatgaccttcgacgagctaattgaatgccaagccgaatagcagtcacttcagccaacagaactgaaagacagccagggaggaactcggcttcagcttcaatcagtgaccctttcgagtctctaatgatcgcacttataccacagccagctttgccaaaaaccagagaagcatctgtattaaccatgacaaaatcctttggagggaattgccacttttgattaccattaactctgctggtttgttgaacctgctggtgtgtccccaaatgtgtgtcgagaaggtcaagagcccatttactccaataatgatcatttggaactttatgctggaaaataaatgcatttcttctttgccaaaccagccaagagcacccaatgaatctaattaaatcgtccttggagagatgatcatgagaccaccaaagagcatcagctgctatattaatatacgggggaatgagtttagagaatcccaagtacttccatatcttttgagtcttcgggcaatgccacaaagcgtgacaaatattttcttcctgcatttgacaccagtcacaacaagtatcaagagccatacctcttttttgaagttccaccttagttggaagccaatgattgaacaccctccaagtgaaatttttcattttcggtgtaagattagaccccacacaaatttccaccatgctttga

SEQ ID NO: 298933 - DNA, 1727 bp, Cannabis indica
taataaattaatttcattatttttcctttctcgggtcaaaattactaaaatgctcctagctcgccaatagggtcttaacacgtcataaatcatataaattcacatatattaaattatataatgatataattccttaataatacataaatatctaattaaggtttcgctaatccattacataatcatagggtattacaatagtggtttgttgctaattttttttttgtcccactgtatccacacaccatactgcctcttcaagcttaatgaatccatctcctcgattgagaaattttgccatcgaccccgcaattaatcttttggtatcctgccacatttctcatagaggcttaatgccccccagtattgcgactgatcttccttccttagttagccccttaaccttcattgctttaattatgaacatgctaatgtaggcccttaaaggttctcctggaatttttttcacttctactaggtcttttaggtgtgagggatgcgacgagaggaagaaaaaagtgcatggaattcagatgaaaaggaaatccatgaattatactttcctagatgtaatttaaaatactattgcttggcggcctctactagtgtggctggaaaaattatgcacagtacattgcctcttacccctgtatatccatttacatctcaaagtatatcaaaggagatagcaaatcttcttttccaatgtatatcttccttatagccattttgaactttgggggtaggtcaatagcattgatttaaagtgagaagggcgatcctcttacctctcgagttttgagatttgtgtgttttgggctagtcagacattgtactaggctcttaagttaatctatttatggttgcacaagtggatcaacttggccagcccgtagaccaacttgtgtcaccttaggatctctttgaactggatcatgggcatagttatttggctggatggctggtggaatgttttgcctatccagtccccttttataattcaagtcattcttgaggtcatgtacggtaccttatcaatcgaacaccaaagtacaaagaggtctttgggtctgaccaacctggttgagaggttgtcttgatacctctgtctgaatatacttgtttagctgagtacctcctcctatggggcagtctagcaagatctgactgtctatcatttagcccacaagtagaatcagtcactagttgctgacaggtaacttggtaagcccttctgatcagcacaatggcctgcctagaattgttgtcaatggctgcctgttgagcccttccatttcttgatccctctattcgatgaattgacatctttgctcattaaaggcaaggttgatagccattcagagatcattctaatcatggtgcaataggttattatggccttggataagtccaatcacagctcgtaggttttgaagtttagtatcttccccaatcggcctttgagtgttattggtagatggaatcttggtgccaggagtagtttggtcagttgccatactagtattcccagtttcttgtatgcttggtgtgaatgcggccagaggggaagtcaatcgatggcccaccattggtggttgtgtattaacttgtccgaggttcgttcctagtcgatctcttgtgtttcctggagtccccactttttgatctgtaaagaccgcttagtttaatttggaaattacagttaatcacgtttaattatgaaatta

SEQ ID NO: 298934 - DNA, 2617 bp, Cannabis indica
accactcaggtttgttaaattagtgaaacttacatgtcatgcaaaaagcttcttgtgttaagatttctagttcaactacacaactggccattctgctgggatataaagagaacatttttactcttatctaggtggtccttaactggctgctagcccaagacaacgtagtgccaatcccgggagccaaaaatgcagaacaggctgcagaatttgccggtgcacttggatggaagttgaccgatgacgaagtaagcgagctgaggtctttagcttcagaaatccaacctgttattggtttcccagttgagaaattatagagatcgatctccataaaataatttatcactgcacacattcttctccatacatgatttaaaacatcagtacagaatgaaggagctattcttacaataaaaaaagaaaatgcacatttgtaattatttttttcattcttttgtttccaaactgaccataaaaaatatatactcttgtattatgaaaatggaagtagaagttttggtgaaaatatgttagtgagaaaatcaaaataaatcattaacaagataaaatgaacaagggacaggctttttgttaggatgcatgaataagaagtggtggggtttctgctatgggacaccccaaccaactctgttcttcgtttttttttttttctttttgactcagtcacagctaactccaaaacgataagcataatttctattctatttaattgtaaatcagcatcatttcttaagcaatagatgttatatatatatatatatatatatatttatatatatatatcatatgtaactcttggaataagtttttaactacttatactgattgaagataaacacataaaagtaagactccattcagcatgtttactctagctaaaaagtaatctagtgttatattttagcatttttaataaaattagtgattctccaatggagtactaaattttgtattaaatttaatcagtgttaaaagttgtattaaatttggcttaagatataatattatgttatataaatttaacccacaataaatatagttttttttaattacatttttgtcattgattattaatgctaatctttgattaatacatatttttagtagtgaggttattgttgtaaattagatacaaaataatatacatggacttgcattaatggattgtgtaaagttataatatattttcaatacactcaaccccaacaccaactatgggtccgggtctgggtacgggtccgactctggggtccgggtctgagtccgggttcgggtcccggtcccggtctgggtctagggttcgggtcccaatctgggtccgggtttgagtttggggttcgggtccaggttcgggtccaggtttcgtgttcgggtccgggtttgggttcaggtccgggtctgggtcccgagtccgggttcaagttcgggtttaggttcaggtccaggttcaggtccgggtttgggttcgggtccgagtccaagtccaagtttgggtccaagtacgggtacgggttcgagtctagggtcctagtccgggtctaggtccgggtcccgggtccaagtctgggtccaggtcccggtccaggttcgggtccgggtttgggtcaaagattggtattgaccccaaattttttgtaaatattataatacaagctaatacggaccatttgttcgtaatatttaatacaatatattactttattcaaacatagtattatttattatttaatacaatacgactcttatacaactaatcaaacgagcccttatgtgcaacgtaatactattaactcaacttaactcggtaatggctaactattcaaaaagtagtgaactaaactacaaaaggaaaaaaataatcaaaaggtgatttgcatgaagaggtcggtaaccaagtatccttgtcaaatatttaagtgtactttctaaattatgttcaaagtttgcatactgtcattggttttggcttgacattcaaaaaggaaagaaagaaaaaaaaacagctgccagcatttaaaatttattgattgattatttcaagagaagagagtagaccaaatttattgtaagaaaagaaaacagctacaatataaaactatatatttatatccaccaaaattaagatttttatttttcaatcccaatccattgaggcaaagtcagaagcagagtccttttgttaactattgtgtttgtcttaattaggtgaacactcgacaacccatcttcttatataggcaataggcccccctttctttctttctttctttccttcatttctttttttattaaatcatatgattaatataatgctaaacaacacctagtgttaactaagtggtttcttcaaagagatacacctacaataaattgaatttttttattgaaaaaaataaaatgtgtttttggacctctatatgaggacatgcaaaatacttgaataattgacataaatgttgattacacatgcaaatcattagatgtctattgagaaatcactgagtggtgtttaacactatgataaaaaatcaagttctcctgtacaagtttgatatcctatagtatgtctaaccaatataattatgccgcatcattt

SEQ ID NO: 298935 - DNA, 4114 bp, Cannabis indica
attaaagataaaaaaaataaaattaaaatgatccaacaatctcttaaacattttcccttatatctctataagcacatagatttattgcatgttattattgaccatactaacatcaataatatgatgtcattgatgtgagagattcagttttcaagcatacaaaaatattatatatttacagaaaatatattttaaaaatacactaatgagcatacaaaattaggccattaattctttacattatattttcaactttaaagtttaaacatacatttcaagttcattttacgaaaacgactttttattaatatattttacatattattcaacaaacaagtttaatttggatgtttatatgaaagtttgcttccaattatactttctaaaatttacattgtagcaactactcaaattaattctcaattttcattattgtaaatatatatcaatagaatatagtgtttacattattgtagcatatttctcaaatataaaattatctttaatcatactccctagaccactccttagttaaaataaaggaggagtcttaaaaaaatgaacccctacacacaaaaataattttatattagaggatgaattctcaaaatgtggacaatttcctactttttcgataattttttaataatattttaataaaagtattgctattttttattattttattaaattaatatatatttaaaaaaattcaaattatataaatattattaaaataattaattttacttttaaaaaataaaaaacaagattgaagtaataacataaaaaaaaaatgactattttaatattttacctattttagataaaagttgactaaaaactaaagatgcacttatatttgttctaatttaatataaaattcatcaaaatatatagtttataaaacattataccgaagaacaagcttcgtttcctagaattaaatgctatggtaaaattaaatgaaactatttagattaaaaaaatatatatcaattaacagctaactatatctaaaattagcctaacaaaaaaataattgtaagtatatccctaaaaaaaattgtaaatatatacgatggtgtctccaaaagtggcggaatctacacgggaaacactttaagacgcttcaaagaagactcttcagcttcaattttaacttcggccgtatatgattcattgcttgatgaagatttgcaaggacgtttgttcacctcacctaaatttgacaagtgtgttagtagcttttacaaacaaagcttggggttattttcaccatgttaactctcatcataaacaaaaaaagcattgttcttagacaaatcaccattatatgaggtgacaacttatgtatgcttagtgatttttcttatattaaattaaaatacaaagaataataccgttactgggagagggttgcatatcttcatgaataacgagcttcgaagctttttccaccccatttgacttgtaaagagcaatattagaatttgcacgttcggaagagtccataaaatcattttctatgcattcataccttcaagaaaagtatatacactagttattaagttatgctatatctcataataacgtgatagttcaagataataaacttacagttctttgcataacttatcaacaactctggttagattgataatatgcgcttttctaagcgagatttcatcttgtggaaaatattcgaaagggtcttctatcatcgatgaaagcttctcaacatttagctcaagttgttgttgttggtcctcaaacaagttttgctttctttttctctcttccttgttggtgatgcaattttcaaatggttcatcaccaaacatgtaatatgcaaaagcgtaagagtaggaaagaattcgccttgacctgaagagtctgtcgattccattgctcacccaactataatttgttactattgcatcactttctatcaaacataatatcttttcttcaccggttttcttaagcttactttcaagctttaaagaatctagatgagctttataacggttaaggtagtgagtataacgcaataggtaattctgtgtaataagaccaaattcctctttcttttcagatttttctacatatcttccacatttgtgttccttgtttaatgggtcaccacaatgccaactgcaattcaagcacaatcgaaaccaattaacatatattctcatttagaatatttaagagcaatgggtcatggaaaaaatgatgacaaattaaaaaacactcaccaaaatgatttaccacaaacacatcctacatgattgcaacctccattcttttcaactggtttgtgacagtttgggcagggctttgtatgaactgtaagccagttagcattctctgaatcaagtagactttttttactccacatttcccagattggacatggacaaggtgagtgtgcttcagataggcaattaaagcaaaattgttgaccacatgcacattcaatttcaagtatttcttcaatatcatcgccaatacgaatggcatttccacaatggggagcacttggacaccacttaaccttactattatcctcaatgtatgattctagaagaaaacgatcaaatttctcagcaaggttaggatcccttgagttcactagatttcttactttctcttcatcacacactgagtaacacttgtgttccatacatccaatccgcctactctgcccttcacttatctttactataaagtgctctgtccaacctaaacacaatcataaccccccccaaaaaaaaacacagcattgaagttagttggatttaggtgtaatttaagataatcatttaatttgacatatttatcagacataaaagtgagaatttatacatacttattccttgacatccaaacatattatataatattactactctagaaattacattatttactaatattttaggggctttaggaattacattatctagtaattataaaactaattccaaatacgaggcctaaatatgacttcttcaaatgggaaatcgtgtgttaatggtcacatatatctagttaagtttgtagcgttgaaatataagggtagaatgatactcacaagagttgcaaaagtagtgaccacagtccatggttgtgatctcacatggaggaacatcctcataacaaatagtgcacaaaaccatagatgaaattgacaacttcgatgagtcagcagcagcagaattatcgtcctgttccaatgaggtcacaccagccttactgtataactcatccttccctttctccacaagaatggtgagcaacttttccatatcccaacgacagtgaatgagtaaggtccgtgcatggtgctctttcaatgataaaatttccatcaccttccccaaatcctccctctggatattaatttcaattaaaatccaaaattctagcccagcgcaacaattaaagcacataacaaaaggataatcaaaatgttctaaataataattatatacatatattcgtgtaattgtatacctgtgcagccaagagagacccttttgtaattacctacaatgccaaaaactcattatttgaaaagtgaaactgagaaactaattaaaagttgtaattgtaatatatacactttttttacaacatgacacagatattataaatatacacttgtttctttaattcaagaaatcctccaatcgaacccatcccattctttaccttaacggaactagctttttcaatatttgagactgaaggagtgtcttcgaataattggaggtcataattagattcatcggaatcatcaccaccatcgtcatcgtcatagaggtaaaaattagcaccatcatcgttatagtctcccatggtgaatccactcaaacgtaatattaaacctaaagaattaattttaggaaatcacactacagatctcttgaaccaacaaaaaagaaaaaaatcaatattataggagataacttattttcaaaataatttgtttaattaaatatatttttaatttattataaatgcacttatctttttttttaataattaacaattactaaaatatattgcaatccaatattcaaaaacaaaaaacaactagtactat

SEQ ID NO: 298936 - DNA, 1796 bp, Cannabis indica
cgatttggttgtgtggccgatctatggttggtggtgatctatggacttcgagaaatggagaagaatagtagatgctaggagcgaagtcagaaataaaattaaagtggggtgatttatttaggtggcgtttagtaacacttttgtttttaaattttttaatcacaaagataaaagtaaagtttttattttaaaaattttatttttgaaaaacaaagatgtgttctataaccacttttctttttcaattttaaaaaataaaaaataaaaatatgctttgtaaatattatttttattttcatttgttaattttattttagtcgggtccaaggaggtcaggattgggggtgggtccaagtctggggccgagtctaggttcggtttctaagatctcatggagtcgaagtctaaaatatgattaaaaaaactgtttaaaaaatttgtaaagtatttttttttttaaatttagatttttgattgaaaaattgaaaattaaaaacagttttatagaacatgattttagaaaatatttttacttttctaattttaaaaacataaaactgattaaaaaatattaccaaacgcacccttaattttataatgaaatgtaaaagggtatctttgttgcctagtaccctcatattgttattcataatatttaatatcaaatctcatttattttattttttaataaataattataaaaattaatgtgtgtcataattattttattccttaaaacattgcacatattattttaattagataaatactatatttgatattagttaaatctaataataataataataataataataataataataataataataatttcataaattgtgaatttttggtttaacttaggtagttactcatgtcaagaagaagagaaatcaataggagaaatcattaatctttgtaccatctccagctcctgcttaataccattcatgcccttaccaaaaaaaaaaaaaaaaaaaaaaaagcttaaaatcatttattattatacatatatcttataaatattttacgtattaaaatgttatatcattattgctatatataattattaatcattaatcaattgcaaaaatacaaaattttatgcataaataataaattcccttttatatactgtgaacttaatatattccatcttgacaaataaattttatatttttattagattcatttcaaactattttcgatatgcttgacatatgtatttgctttcttttgaagcaaaacttgaaccaccttctcagaagatttgcacttacaaaagacactatatatacataagtaaaatcgaacttactaacctctatacaataatgacattcttttataatattcaataatgataaacaaaagagatgatctaatcctaaatattgtcaatatgagtatttactatttataatcatactcatacaaggcaccacatgaattcttcaatttgacttgatttccaaattttgtagctacagaatcgtaaactatatggttagaatcatcagttgatgtagaaaccaaaacttccctattataatctgaacatgcaatacaactcaaatatatacaaagcaagaaaattggttgggaataaatttgattttatcatattaaacacacaatattttttgtcaaactttccaactataaaaaaatttgtaacatatatagatacgcgaatttaattagaaaatataaatatttttatcaaataaaatatgccaaaaattaataaaattaacaagagccttcaaaaataaacttaggaaactctc

SEQ ID NO: 298937 - DNA, 972 bp, Cannabis indica
atattgaggagttgatattatttcgcttattgcaattcggtcaatgctttgttatttttctgttgctttgtagatatctttttgttattctatagttgttttcatgttgtttgttaagttgttatagggctaattttttagttgtcttagttatttttgagttgtctttttttattttattgacacacagtatttttgtaattttaaaattttaacacagtatttttgtaaacttagtacaataaaaatataaaaatctccatgtcccattattttttgtatgctttcccctatattacagtattttcgtaagttccccttttatattgatattgggtcagttaggtgaagcccagtttgttaggtaactgtcatccgtatgggatagtaccagttgatggtgacaggtgagcatgtaagacatgtaagacatgtaagacaatacctggacacctcttcaattgaatgttctggattaccctgtgagggtatctggatacgttccactgagtctttccttctctgggcgagtttccctttcgagaccaaagcattcatgactttatagagattagatctagcctgtcgtttgatccagagccgtgattagactctgtcgtgggctaagccacaatcttaattgggcctataaatgggttcaccttagttgattttaaaatcctaaaagtacatgtgtcacctatctggaaacataaataatatttatcctccaatcctttaggacttgagagtcacggaggcttgcagcttccctccaggttcattgtgatgcgctgaaccataaacaacttaggcccttcaaagttctatgaaaataggtcatgaatgtttgcagacctttcagttttcatgagttgagtattgttgacgcgatttttttcaacttaatctaagaagattattaattcaagaaaataagagacaaaataataaatgaacactagatatttt

SEQ ID NO: 298938 - DNA, 5399 bp, Cannabis indica
gtaagtacccatggctcttatcttatgtttatgatctgccttattcccatgagaaaaagaagttatggtcagacattgtggagatggtaagcaatttggtggtgcctggatgattctgggcgatgtcaattttataattaattcctcggatcgagttggctcaattgggagggatcaatttaggcctttcatctctgacctcttaaactaaaatagtttgattgacatgctcattaaaggaataatttaacctaggataatcattaagagggtttggtgcacatcaaatctgcacttgaccaatccattgtgaatgatagatggatccagttgttctcgaaagtcgttgtccaatctttacaaaaaagaaactcggatcatagacctttatgtgtgtattttggaggcctggaaaccaaattcaagtgtcagtttaagttcgaagcttgctggacacgggatcctagaagttctttggtagtaaatcatgcttggggttccactaatcatagttgggcgcctgcaagagttttcaaaagagttagtgccactagggttgctcttaggcattggaactgggaccgattcagaagacttgacaccgtgattagatcacttgaagctcaacttcaaaggatccaatctttgctagctggctctagggagtggtcctaggagttagaggttcgcgaggccctgaataagaatcttaaacgtaaagtgttatattggcaacaaagggcccaggtaaactagattaaagatcgggataaatgctccaagtttttcttcatctcggccaccattaggaaccaaaggaatgccattgtcagtatcctggatatgaatgattgttgggttacttccagataggaaattgggagagtgtttacagagtacttgggtgagattttctctaacccgcctattggcccccctagaaagtctggagccttttattcaagatcacctctctcctctcgagcaagatgagttgagcaaaatcccagatcgtgaagtgatccgtcaaacgctctttactatgagtgtagcttaaaagctccaggccttgatggaatgtcagtgctcttctttaagcactactgggacattgtaggagtgggtttctgtgaggcggtgttggacttctttagaactagaaccatggacaagggcattaatgtgaccagtgtagctttaattccaaaggtccccaatccaaagaaggcttcccaattctggccgattttcctttgcaatgtggtttataaggtgatctttaaagtcattacaaataggattagacccatcctaccgagattgatttacccaactcaagcgacttttgtcccaggtcagaatatacatgataataatgttctagttcaaagataatccactcttttaaaaataagaaaggaagagaaggccttttcacgttaaagattgatcttgttaaggcgtatgataaggtaagttggcaatttattgaccatgtccttcaaagttttaagttgttggattgccttaagctatgggtttaaatgtatctccataacttcccttaatggtggaccactgaggaaaatcactccccaatgtggtattaaggcaaggggaccccctttccccttatcttttcatctgggtggcagatttattctcttgacttttggagaaggtcttagagaatggaagcattaattgtattaatcttagtaggaatggccccgactttcacacctcctttttgttgatgatatcattctcatagggagagcgactgttgatgaggccaagggtttttgggattgccttgataaattttgtgattagtctggtcaaaaagtgaataaactcaaaacctcaatcttctttagtaataacactagtgaggggatgcagagaggaattaaagtagctttaggattagaaggtgtggtgggaaacatcaattatttaggtctgcctctgttcagatctagacaaaaagatgtgcatttcaactttgtgatggacaatcttgagttaaaatttcagggttggaaaattaagactctctctaaagggggaagagtcacgctgatcaagtcagttgggcttgcgttcccagtgtactcaatgcaaatgactaaactttctaatcgtatggcatctaaagtggatggtatggctagggatttttggcggggatgtgagaagggtaatggaggggtctatttgaaagcgtgggataaactctatctccccaagtctcgtggtggtctagggtttcgtaagacattggaaatgaatcaggcgttcctgcgaaatggggttggttgatgcttatcgaaaaccaatctctatgttgtaaagttcttaaagctaagtatctgaaagataaaccttttatgcaatgttcttataaggatttagactcttagttttggaaaagtgtggtcaaagtaagagtatagttggaaaagggggtttgtaagatgatttctgatggtaaggataccaagatttgggatgattcgtggattattcagggtaagaagtttgtgcctactccagtgtctaatagtatagtgatacagtctgggttgcagaccttcttctggattctggtgagtgggtaagctaaggagcctgcttgactcagagacgatcaatactattttgcaagggagaaaacctaggtcttggcaaagataagtggatttggacaaaagaaaactctagaaggttctctacgaagtcagcttacttagttcaagcgaccgtgctcctccttgtgagatggccccttccatgtggaacaagctttggaattgtaaatcctggaacatcacaaagtcttatagtggagtattttgtccaatgccctcccgacatgcgttgttattgccaagagattacaagttagtgaaatttgatgtcctatctgtgggatgggtgaggaaattatggaatacctctttttgtattgtagctttgcctccacctttggagggcttccccttgggaccttattttggtaattgagtctggtgctcgaatgtgggactgggtgcgattcatttggggtctcaattctaagttgtggaagaagtgtttctttttgcttctattgtgatggacaccatttggcaagctcgtaatgacaaggtacgcaataatagtctgaataacatcaaatattatattgattctatcactcactgttatgcagattatggatcatctttatttctgccttctcctgatgatgtctcacccctttggtcccctcctcttgatgattggatgaagattaattgtgatgtgaaagtggagagtgggtcgatgtgtgtcgtagcgttggctcgagaccatacaagatctgtttagtggattgcttccaagtcttttacctattttgacttcctgattggcgaagtggaggcctgtgtcatagcgcttatgacgacaactaagtggaagcactgttttcttattgtcgagagtgactccaaaattgttatcaaagctttgattggggatcttcctttaactggcgtgttgataactttgttcttatttgtaatagactatcacgtagttttttaggttgtaactttgctttttatttttttgaaactttgtaattttgctgctcacaatgttgctagatgggttgtttctagaaatcttacaggtatgattaatgtgtcaactatccctgaaaatattatttataataattatgagttctaatttttgtttatttaatcaacatccttctttaaaaagaaagattaatattaatgtacaatagtatttatttaatagcaactattaactagaaaactatattttgttttaatatattaatgtacaatattttatttaatcgttgcatttgtttaagagttggatctcattcgatcatgcgtaagcgtaacactaaattaattaattttttatttttatggggaactaaagtaattaattataacttatacaattcagcaaaagtttttgtacgtaataaagtgtttaaaaattaatataaagtgtttactttgtatagatagtatacacgtacgtaattatatgttatatatgaattaaattaaatatacacaaaagccaaaaagttgtacgtttttttaaagaaaaaatttaactgctattataaatcacaaatagataccacaagagagaaaatgagaggtagaattttccctatctaacaagtatttctattcaactctagtgcatattttgccaattcataggcaacataattagtatttctcttaacataaaaaatagcaatactagagaaagaaaataaaagacaacaaacatctatataatcaaatttgagaaacaaaataaatcataaaatgtagtattcaagggttatgagacacttgagtgattaacaaaattagttgggcagcaccattgagaccatgaaagagggtctttacttaatctaaagtattcttggactggcttagacaaagagcaatcatcacttgacctttatgactccgaacaatcacacctcccaaaaccttcgtgatcgtgtcaaccacaacatcgacattaactttaaggccatggagatcaggtagttttcatgggataccatccttcggtctagtagttgagattggagttgaattttgtgcaacaagaggttgagagagactctaattagctttaatataattatccataaggattgagtattttgttttgttcaatccaaatcacccacataatgcaaattattaacttcatctttgcctgagtttgtaaagtagagagataaaataaataatcatcgttgcacatttcttgagctttctcataatcaataggaaaataaaagtgtttccaaaccgacttgacatgtcgacaactaaatagagtgtgcccaatcaattcccaaacatgtgaacacctgaagcaaataactgaatcaataattttcttctaacataaacttgtagctactggaagggctaggataactaatttctatgcaaaaattttgatcttgggaggtgtagctttacactatgtttggtaggagggagagatgagtggatggagaggggtggagggagagtgatggaaggagagactaaatcacttgtttggcaagagggagagaaagatggagaggagagatagacactactacaatgttagcctttagaggcagttttttcaaccccatttataaaaagggaagctaaagggtgtgaaaatacccggtatgttcgaaattgacatttagaggcggttttttgataaaaaccgtaggtataaaattgcattataccatttagaggcggttggaaattaattttttttttttttcttgaaataccctgaaggaaccgacggcatagggt

SEQ ID NO: 298939 - DNA, 716 bp, Cannabis indica
aactaacttgccaaaaaaagactttacagaaggggtcaactttcattgataaaataggatagttctagttacacattacaaatttggaatattatcattccaaatcctctttatatatatctctaatgtaaactcagcaacgtaatgaatccagtattgctggtaagggaattgcacaaccagccattatattgcatcttgaatcataaattacacttcccaatccaactttgggtgccttgagatctattgcagcatccacattcaacttgtatttcacttctacaggtagcttccaagcattttcctttggagaaacttttcctctttcttgtattccatttccatacctcttcactcctgcctcttgatattcctgcacataagaaataacccagccaacagcttcttcaacagaattagaaaactttagaaacaatgaagcattcctcaaattccatattacccatataatacccaagaaaaacgaaagttagttttgttatagtttcaaaaccttttagaataaactctctaatatcattgtgcttgtaatatttatgaaagagactaaaaggtaaatttttcgaagctttctttgcccgaaatcaatctaagaaagcatgagtcattgtttgttttaaaactctacatctggtgcagactggatttagactaacttgcctagtgttgagaatcatggggttccatctcaa

SEQ ID NO: 298940 - DNA, 2415 bp, Cannabis indica
atggagctggtgcagatttacttgactatacttaatttacatttattgaaatatcactctcttttttttagtagtaataatagtaatactattggtaattaatgaagtttgaaaagtagtaaaaaaagaggatgaaataaatttaaaaaagaaagggcatatcacatggggttatgagactgtattgcactaagaggaagggagaagacaaagacaggaccagcaaagcaccgaaaggcattgtgtccacacgtttatcagttataacatttagccttcaatatatgttctctagtctctactctacacatatatatgtaatgtagatattatcattactaatattgttttttctgctatatatatatgcattaattctaatttcccaaataaatgaatcgttttaataatctataatatatactatcgtacaaataaatgaaaagatatagtgactctgatatcaaacaccaactatatatagttatgaactattcagcaaaaagaaaaaaaaaagttctttaataattacattccggttcataaaaaaaaaataacagctctttcacaattagattaattttttttgactaaaaattaatatttagtggcaaaatatatatcactatataatatacttttagttcataatctaatatatataacaatcaaatttgttaggactaaacatatttattataaacaaatattattttgagcagataagttattttctttccttgatggggtatctttattcttattaatattattttaatttgagcaaataagtggttattccttgatgataatgtttttattcttattattttgagcagacaattaagttatgttcttgatcgtgtttttaattatttttattatataaatagattcttgtttttctttttatatatatatttccttacaaatgtatattttttatttatttgctatcaaaatacttttgccttatagagcttttaaaggaattaagtcaaacaaattttcaagcacattttgttttactataataatcataattttatcactagactaaattagtagattgctattgccatgagagatacttattctaagatcattgttagaggttataacaagtttgttttcattttttaagagtttttctaatctgcattattcatagatattgattgtgcatgcatgctcttagtgtgaatagactttgtttaattagttagaagatattcttattatttctggaatattttttatgacattgtgattattttattgtcattaattgctttcaaaaaaaaatgttaggactaaaatacatttttttgtactaatttcaatcacaagaaaatacaatttttgtgactaattttagagctttcagtgattaacataaatataatgattttgtgttagtcctaaatggagatcttttttttattattatttaatataagatagtccttatgatataatttagaaaattgtaataagatcttttcatagttcttttggtcacttggtatagttaatacagtggttagtcgcctgggttgagtaaaagttaataaacgtaattaataaatcctttgtttttgaactttgagctgacatagattttttttttttcactggttttaattattaatatttatttgcagcattaacaataaaacaaatcgtatttatttgttaattaatattatataaagcaaacataccattgccaatgccataacattccctctaatctatatcacttattggagccttaattttagttttattttcttggggcttctctcataatatttattctctatttttggctacttagcttcaaattcaatcaaactagcttaattaattaattaatgcacgtgaaattatatggtactctgcctcattattgtactttactacttcctataatatatgtcaataatatatataagtccttaatcacattctactttagaaattattgtttatgtttgtgcaaatatgtactgcaaatcattcaacccttaattgaccacctacaactactgtaacagactttttatttatgataattttggataagaaattcaacttcgtgtttgggtattttggctcaagtacttttacatagggaaatttcattaattgaccctaataaaataccccatttcaaaatttataccctccactaatttatacaaattaattccattattttccaaaactacccaaaatacccttttattttaattttccctccctaactcttactcttctcactctctctcttcgtccttctctcttcttcctctctgtcaaccgacccacccccacaccacaccaatatctcaaccgacccaccccaccgactaaacccacgacgccgacgacgacgacccacccacagac

SEQ ID NO: 298941 - DNA, 7228 bp, Cannabis indica
atatatatatatatatgtgtgttttataactagatttttttcttgtgctagacatgaatgaacaaaagaaagatgtaattcaagcacaaaactagtaagaccttgaaagttcaaaccaataaaataatttggtccccctgcttacaccctaaacacaatatcccacataagccaacaaaagtcaattacacaagtctaccaatcttaaaaatataagctagtatccataagaagctccgtcacaaaattattagaacacaaaatataatctccacttccagaaacatgcaatttgaagtttacataaactgaaaagcatgcagactggaaatctgggaggggtaccttcacttccagtcttggtactcgtactttagggaccacttccaatcctagtactctcgtgaaacggacctatcagtacgctgataatcgcggtctgcatcacgagatttctctctttcatgtgactcagatgcagctcgttcatactcctccactcgaccatatcggtcatgatcatgatcaggatattgctcataacgatcgtgttccccctggacatccatccggtcatacggcccacggttattatcataatgatcatactgctcaggatcacggtcacgtgatcggtcacgatcacgacttgagagcctactgccatgctctggttgttcataccagcccccatcttcatctggtgctgtggtgtcatagtccctatctttttcaccatgtcgatctctgtcatgctttgactcgacgcgatcatattcaggctccctatcacgagaatgaccacggtcatggtcagggtccacaacttcgtaatccctctccctttctcggggacgatcgcgttctctatcacgatcacgctcgtagtcacggccacggtctcgtcctctttcacgatcacgggttcgatcacgatcgcgaccacgttctctttctttatctctatccttgtccctattcctatcacggtctctgtgatgtctatcctctctgtgatcacgatccctagatctttcatgagcacgttcaggggagcggtcacgggacttctcccgttctctctctttatcccttaccctttcacgagatttttctctatccctggaataatattgttaaaagattctgtaaaaaagcacaagatttctgggagcttgatgttacatatgaactatgagcaaatgataaagctcaaggataattatagaagaaaaaaaaacctgcgaaaatgtacttaccggtctccatggcgatcttctctaaccctaggctcctcagacctaggtcgtcctcctcctggttgaccttgctctctgtgcaatataaaattttataagtggcaaacataacaggttctctgagcaatatattataagtgggaaatataacagggtctatgtgaaaatatattaaaaatacacattgatcaacagaaagaagtccaacaactacataaaaaattgaattttacttgaattaaaagaaaaaaggctatggacaacaacatggagtgtggctgcagatactattgtatatttatttgtttacctcccagaatatctctgatttacttcttcacctccaacccttgtagttccaagcccaccacccaatcggcgaggtcgccagtttggtacagttctaccacgttctacatcaacaagcactcttctaccttcaatcttccttccatcagcttgtttataagcagctgtgtattgcaagaatttgatgtcacgtacaatatatatcagattaaaaaaaatcaagaaatgtaaaaaaaataaacaaacctttcatgtcccttgtatgcatgtactcaataaagccataaccttttggcttatttgtctctgtgtcattaactaaacgaacctgaacactcaagaagaaaataatgaataaaccagaaaagagaaattcgtaagacccaaaataaaacggactaggaaacaaaatctatacctatatactaatcgaacatctaaaactaagcaacatcctacagaagcttgaaaagttaaatcctaaatggcacggcagacaggcactatgcctcattagccgtgctcacctttaaatcataggcttcccatcgcaagatgcatcatcaccgggtagagttgtagaaaaactggctttaatgtggccaatttaccagttgttgaacaattaacctccccttaccagggaatttttgttttcaaataatttaaaaatgtagaggctataagaaataccaggtaatcttgatggctgatattatttgtgagcctttgaggtcaaaagtaaaacttttagcagcaaaaaaatgtatgtattaaaattcaaaaagaggagaagaaactagtactccctagatgttttacccagtgcaggaaaaataatagaagttgtcgatctctttttgttgcttgaaacaaggccaaatggcacaatgcatcactgctcttctcaacttaaaaggtttcagctttgcttgcgcaggatgatccaccatctttggaattgtgttcgtagaaaaccaaaagaccatttacagaatagttccccccttaccagggatatttcttaaagtttaaaacttaaaaccaacacaagtcctacaaacactcattccaatatctctaaacaaaacttacgagagaggctaaggaaggagaaggttaattgagacaagcccgcaaggaaatatcagcatattggcattgacacctgtattagaatctcatatcgacactccacttatggtagaactatgtcaaagatacttaactatcttccatccaaagtttaacaatttcaaaatccaacacatatcagcttgaaatccatattttcacataattttataagtaccataccaatgctacagcaacaataatgtggttctcatttggagtaaaaacagacgctaaagaatttgggatctttgaaactgtttatttgttgtggttaaatttttaatttaatgaatattaagggattttttaatagccaaaaagggagcaggcttaacacaactgaacctcttaccgaaccccgtggggatgctcaaaatacctacccgcttgataggcccataaacgtcaaactcccttttgattctgctctcagttgactcataattctgcaagggcaaacaagcaacactcatcttcagcatactccactagtggaaaacacaagtctaaaaaataaagtttcttagtattcttacaagcctggccacaaacaaagtcttgtatggatctccagaaatgttcgggtcattatttggatcatctgcataaaagaaacagatcagaaacaagaacaacaatatcaaaatatcattaaggatctatatcattactagaagtaaaagaaggtggttccattacatttctctagctcctcagcagcctttgctgcacccttttcaagtcttagctggtgtattctagcccttctttgagtctgaattgatccaaacatgtcagaaaaaaaagaaaagaaaaaagtacaattagtgatccttgtttatcattgtttctaatcgttgactgagctcataagttaaattgaaggctatgagttgtgtttttccagatttctggtacagttgcagaataaattaacaccaaaatattcgaaagacaacaaactaaattgatcaagtgaatatcttaccggagtttcaccctctttaacaggcggagcgtactcaggatcttcaggctctgcaaacttactgacgaattgtgcaatcccttcatgaccgaaaataataaaaattaacttcaacaaaaattaaattaaaactcaaacgtaagcaacaagctgtataaaattttgaaaacctgttaatggcgggcacttccttttctctggaggtggcttaaactccaatggcggtcgaggctcaaagagcttcaaaagattgttagtaagaccagtgggatgactctggccaatctgcacccaaaaaataataattcaaacctcgatcaacaaaattataacaaaaacccttaatacatctataacaggtcaaacccttgcatttcataccagaatcaaattacagattcgtgttctaaatccaaagatagggttacaaaatcgaataagagaaaactgcagaccctaaaacaaataaataaataatcgggatagaaacgaaccagtttgagttgaagaacgttcgcacggttctgcgccttggtccgggcctgaacggcggcgttttggttgcgtaggaaagcatcgtttaagtctcccatggggcgaagcgatcgtaaccaaagctagggttctacctagagaaagtgagtttttgggtagcagataacgaagatgggaagcataagtgggtaaaaccggatccgaatgttacaatcgggtcggatctagaaggtcctctcctgaaagcggcagcaatagggagtaaaaagggtttttttttttttttttttttgtaaagaaagggtttataacatagattaataatcgttagacctcgcggtcattacaaaatagggattccggcacagaagcaaccggaagagacccaaacgtctgatgggtaaaaggcccatctagccacattatgagcgacaaagttacatgatctactgataaaagaaaaacaacaactactaaaagatagagaagactttttacaaaatgaaatgtagttctctattgcccaactggaccccttcccattgatagcatcaattactactctcgagtcattctccacaataatatacttatagccgatatccaatgcaactgacacagccaaagaacaggccgctgcttcaccacaaagagcatccgagaaatcttcccgagctgtctgaactctaatcactctgccaagatggttccttgccacaacagcaatacacatactatccaatcccactttaacatcacaattcagcttaatccaatcctgaggaggaggggaccaaacttcctttaaagctggggtaggacattggatcaaggagtcatacatatcagagggttttggcaaaggtataaatacacgaaccactctttttagagaaattcttctaattagcttagatagttttaatttttttcaaataattattatttttatcctgtgaatttttacacttttaagttgcgctcctataatatataacttattaataatacttcttaaaatataatttttaaaaattacgtaatccttccatcatattttattcaatttatcgtgaaattagtaatgtaatgaataatagttaataaattgatgcaaattaaatattcttcaccctttttacgttaataaataatagaaataagatatttttcctttttctgtttacccaaattttcagaaactgataatacaaacaaataagcttaagaaaagtataaattaaagataaagagactcaaatttttacgtgatttgagtgttaacgaattttagttcacgagttaatattattaagatataaaagctccaaagtattttttacaagtatttatactctagttaaagaaccctaattattagttctttttctcaagaaatccaatctctatccgttcgcatgaaggagtaatgttttatttatagagaagaatcgagtatgagcgtacccgaacccgatacgattttaaggtatcaacaacaactagaccatctgatggagtaaaatacattatttattgacttttgggccaattcactcttatatccacatattcgtcttttctcttgcgcatcttgctcgaaaaggacaacaccccaatgttggtcagtgacatctgtttgaagaacacattttacgtcagagggaatctataaaggtggtagatgttgtgtgatttctttcacctttttgactactacaatttggttatgtgaccattatggactattcttcttgagtatattgctgagtagtcatgtcagtatagaaagtcggggaataaattctcaaataattgatgatgcccaagaattgttggacctgaactttcgtgagattttcatctaaaaatttaagtagttcatgggctatatatggttgggcttttatattgtcctttggataatttcatcctaaggaattctatttgcgtctgtccaataatcattttcttttcaaacaacacgataccatgggctttagtgatagaagcaaactgggccaataacgattgatgggctttttcatcaggagacaatagtaaaatatcgtcatatagatgagagtctttttccaatatcgagccatataccttggtcatagccttttggaataaagaaggggcagttttgagcctaaaaggcaggacgatccattaaaaatgatgatttagaatgcaaaaggctgttttgggccagtcatttggtttgatgcctaattgccaaaattccgcttttagatcgaatttcaaaaaaatatgggctttggataaattggcaaacaataaattattatttggtattggaaatttatcatctgctaagaactcatttaggggcttgtagttgatgaccaacctttgcttttcttgaactttctctgatcgattattaacataaaatacatgatatacacatggtgaggaagttgactctattaaaccatgctgttgtaactatttgcattcaatggtcgccatttgttgatgttctagattcatgcctgggtgactagcttttgtagtaccttcaggatactaaggattacaaacttatgttaaaacgaacccgataatctaaaagtagttggctactcaaatttagattttgctagttttatgtttcatgtaaatatcattatctagttacgtgtttatgtttgctggtggagctgtgtcatggaggagtaacaaacaaaccttgatagtgacttctactatagaggctgagttcgtttcatgttttgaggctacatgacatgatgtatggataaagagttttatttcaggtcttagagttgttgattccatatcaatgtcattaagaatgttctatgacaattcaactgttgttttcttggctaagaacaacaaaagtagaagtcaaagcaagcacatcgacattaagtactaactattagagaacgtatcaaagaaaataaagtggtcattcaacacattaccactgaattgatgattgccgaccctatgacaaaaggcttgtcatctcataaattcaagg

SEQ ID NO: 298942 - DNA, 3819 bp, Cannabis indica
taaaataatttccaacaacaatggaggttgtttactgtgtacagaagaccgtatgagaatgaaaaacaattattttgggaagatttggagacaaggatcaacagatgccgaagtccctggatggtgattggggatcttaacgtgattgcgcatccttgggagaagagtggtggaagacgagtagccgcccgtgatacttggattcttacaaacttcttgcaaaatacaaggggaattgatcttggttcccatgggtgcaagttcacttggcaaaataatagattcttgggtggtttgactagagagactggaccgagctgtggtttcgggggattggattacagcttttcctgcggccaaagtcactaacgcacctatctcggtttcggatcatgggtacgtgcttttggacacggttaggggaaagaacaggggtcataaaccctttagattttttgaagcatgggcgagggaccattcttgtgaggatgtcataaaaggagcgtggagtttgaggggtgagaggagtagaaatatgtgtgaaaggctgaatgatacgagggttgctctccaaaaatggaaaaaagatgtcttcggggaatgtgacatgatgattagagaagctgaggaaagattaggttggatacaatgtcaaccaacgactgcatctcttttgcttgaggaatcggacttgcagtccagaatttctgaactttggattcggaaagagtctatgtggaggcaaaggtctagggagatttaattgaaagtgggtgatcaaaattcaaagctcttccatgcgtccactataattagaaggagaaggaatgagatctctgcggtgaagaataaccttggtgtgtgggagacgagtgagcggaagattgggatagtgttcaatgagttcttccgggaattgtataagtcccaggaaacggttatagatggggccttctatgagcttcagtcgccagttatttcggtggatgagaacaaaaggattaaaagtattccctcggctgaggaaatctggaatgtagtggccgagatgaatcctttgaaggccccgggacccgacgggatgccgggttttttctatcgaaaatattgggagatagtggggagtgaggtaatagaaatggttcaaaattttttccaaacggggctgttggatagacatctgaactatacttttatatgcttgatccctaaagaggagaatgcgagtacggtggacaaattcagatccataagcctgtgtaattttgcctacaaaattatatcgaaaatctttgctaccagactacgggaggttattgacaagttgatatcccctttccaatcagcctttgtttcgggaaggtggattgctgaatcgtcaattctaactcaagaattggttcacatgattaagaggaagaaaggtaagggagggctcatggcgattaagctagatatgctcaaagcctatgatagaattgaatggaacttcctccatgaggtgctcaaaggtaatggttttgacaagcaagtttgtgatttgataatggaatgtgtccaattggtttcttactcggtgttaatcaatggtgtgcctcaaaataaattctatccacaacggggactacgccaaggtgatcctttgtctccttttttgtttttgctatgccatgatgtgctatccaagctaatcattaaacagcaatcatgtggccagttccatgggatttcaatatcaaggtctgccccggcaataacgcatttgatgttcggagatgacacgattttgttcacccgtgttaatgtgaacatggcgtccaaaatattggaatgtgttcataagtatgagagttggtccgaccaacagtgtagcttggtgaaatccagtgttctattctccaagaatgtggcaagtcctttaaaggctaatatactaaatgtgctaaaggtaagggtgtgtgatggtaatgaaaagcacctggggaatccttttgtattcaaaaggaaaaaacaaaataaatatatgcacttgagagaaaaggtgatgaaaaggattgaaggatggaaaacgaagctgctgtcgtttgtggggcgtaccaccttggttaaatcgatagatctctcgatcccgttgtatgcaatgtctacaaacaaactaccactctctagctgccgtgatattgataagattataaggagattccggtggacgggggatacggagaaggagcgttacatgaccctggtggggtgggatcaactttgtactcccactttccaaggaggtttgggatttaggaagatggaggacatgaataaagcacttcttaccaagttggcatggcagatggcctcaaatttgaataggccgtgggttaaatgtctagcggagaaatattgcaagaaggcctcgttttggagtacacaagccagagataatgattcagccttttggaaaggaattctcagctctagagatgtaattcgtaggggaggaatgactctagttggtagaggggacacagtcgatatttggaagcagccttggatcccatggctcgactactgcgactttcaaaaccttatggatcgagtaaggccaagatttccaaatattagatctgtggcaaatatttctcttgataatggttgctagaatgttgggcttcttaaggaaatgtttggcgatacgttgggtgaaagaattgctagaattggccgattacctagtgagaacacagctgtgttagtgtggaagaagtcgactgatgggaggttcacagtgaagagaggctatgaggcgtcccaagctcatgggccgagtatagatagcaaactgtggaagaaagtttggagcccaaggttgcacttcaggcactcgatgatgttatggagagtgatttcggactgcctaccgactaaagaaaggttagtttttgtaagggataagatttgttctatgtgtggggaagaaactgaatctgccactcatttattttgggattgtcattgtgcatgggcgctttggtttggcagccccttctcctcccgtggaggggtaggtaatgataactcgatcaaggaaagattagtgaggctcttggaaagtatcccgaggcagcatactgctagcttcctatctttcgtgagctgtttgtttgaaggtatttggaaagctagaaatgaactcttgttcaaagggggtgtagttgatatcctacaaataagtgactccattatgaggagacactctgaagccttaagagcaatgaaggaggattcggacataggtgtaacaacacctgctggtgtgattggaaaaacggtatgcaacactgctgatatattcagtgtctcggacgcatcttggaaggaggacaaggcaggtcttgcggtgggattactggataggcaaaacaacaaaacggagtggttcgccaagcaagtttcggcttcttctgcagctgaggcaaagttgctggcaattcaatgggctatgcagctagttagagagaaaggattcagaaggtatgccggtgcctcggacgcaaaagtactgattgatgcattgaagaaacagatttgcccccaatttggcagttgaaacctctggctttggagatattaaacttgtgtaacttgtttgataattgtaatttcttttttatttctcgtagagacaatttagcttgtgatgctttagcaaaatgggctagagaaaatagtcagtgtaatggctacattttcagggagggatcccctattgtgattcccaactttttattgcaatgaacttttctaagttctttcaaaaaaaaa

SEQ ID NO: 298943 - DNA, 1753 bp, Cannabis indica
cataaaacccaacaatcaggaccaggagctttatctgggtgcatttggaacaaagcaagtttcacctcctcacatgaaaccggtttcaaaagctcttcattttgactaccactaacagtgcaattaatctcactaatcaccaaagcattttccgaacaactagtagtataaagatcaataaaataattgacaataacttgatcaagtccagcttcccaatcggtccaaacaccatcagaattttggagttgacggatttgattgtttcttttcctagcacttgcagaagcatgaaagtacttggtatttttatcgccatagtggagccaaaattgtttcgatcgttgtttccagtaaatgtcttgctgagccaaaagctcaaaataattattctgttcgctttcaaaattagtatacgagaacgaatttgactggcttttcattctcgacatgtgctttttactttgagcaatatgatacttgaagttccctaagttctcccttccctaatcttccaattgatcagagcaatttttaattctgacggatataggtacgccttgtgaattagcccagcaatcttcaatcaactgagaataaatgggttcacgagaccatacatttttgtatctaaagcagtgaaaaggggcagcctgagatatggtttcgggttgcaagaaaataggtgcatgatcaaaacaggtatagccaatattggtaagagtcgagtgattaaaaatatccagccattcatgtgttacagtagctttgtccagcctaatctcaatgcaatggtcagtaccttttccgcgttcccaagtaaagggataacgtctaagctccaagtcgataagatgacaatcatcaagggctgattgaaaaccagatattagtgcagaaggatatgggcggcctcctttcttctcgtcattacttgcaatattgttaaaatctccaataacacaccatggaagtggtgattcatgagaaagatttcaaagaagctgccaagttctatgccgcagttgtcggttaggttccccatacaaaccggttaacctccacactctcataccttgaatacttacctccaagtcgatatggtgttgggagaagcccaacatcttagcttcatcattcaatctccagaacatagcaagtcctccttttctaccatttacatcaacagaaaaagccccctcaaagccaagtataacacgtacacggtccaccaactctttagtgcaaagagtttcacacaagaaaaggaatttgggcttcttttggaaacaaatatcttccaggaactgaatggcccatgggttcccaagcccacgacagttccaactcagactactcataatgtttggtgggcttggacaccagcacccacctgttccccgttttttgaaattacctttgattcttccccatttgcatttatgtcatattccatatcctccactataggctcagtgggcccattgttattagttagcccaaggcgcctccttttaagttcagaaattgataattccatatcagaggagaataaagcagtattctcttttaccaatataactggctcatttaaagccatatttgactttatattaacaaaacccaaatcaagagcagcatccttcccattataatgcaaattgccatattgattatgttgaatattgttaggttttatgccctaaataaaactccatttcaatgtaatctattttattcaacatcaataaag

SEQ ID NO: 298944 - DNA, 1020 bp, Cannabis indica
aaaaaaaaaaaaaaaaaacacctttaccctttagagaattgaatttgtgttttgtttactgttgtctgatcatatggtgatagtatattatgttttaccttgataaacaaataaaccttctttattaattgcatgtggttcaatagacaacatgtgacaatgccacaatcactatctttctctctaaaaaaaaaataaaataaaatctccccatcaaattaacataacgacaattaaagtggagatggtacaacagatcctccagatttttcccacatccattttcatctttatcgttttactaatagataagaaagaatcaactagatatagtcggtcttcatcataaacgacatgtcgtttattataaattttactgtagcgataagagcgagagatagaaaataacacgtgtcttaataataatttcacagcttcgtttttactatgtagaatgttcaaattcaattgtcatacgtgtcatcactgtatagctccttcggtccacgttagacacgtagaccccatgaccatgacatgtctcgacgtgtcgttttatgggtcacttttcttctctctccatatctttgtaccaaatatgacataatatagttgcctataaatacacaatatatgattgttttattgaatagtatcacatcaccccttacagtttttagttagctactacgtaaaacttagtttctgagattatctatacgtaagaatatatacacatatacaaacacaatggcaagctcacagaagcaaaggcaagaactcgatgccaaagcaaagcaaggtgaaactgtcgtccctggtggaactggtggccagagcctcgaggctcaggaacaccttgctgaaggtataaatatatatatacattataattacatataggatacagggatacactacaatgaagctagcatgagttataaccttaattgtaatgaatatcacattattattttttgaggaaattacactctataccctttttatattatccttttt

SEQ ID NO: 298945 - DNA, 956 bp, Cannabis indica
agcgacttagtccgcgactcaacccagaattcttcattcggtaatatcgttcctcttttattttgctagcagtttactcaacagtggtgaactctaatttgatttttgagtagttttttgtaaatgcccacatgtgagtttgcatttttggctgcttatgcagaatttaacattatcatgtatttgaagtgtttagtaaaaatagcctttaaggttgctaaaacgatcatgaattacattgtgcgactataaacgaccattatggtcgcataacgataaaagatttacactgagcgaccattagttgggtagagtaaattaagtaaggttattttgcaaatttgtatttcacattgttagtttggcaaatttcacatttggataaactccaactaaatttacacttgcaagtaatcacattcacattagagatcaaaaggtataaaaccaaattgacgtatgttacattagggatttatctatgtaagtgtatttacttgatttgacatgattttcattttctatgtagtgatagtattttgcagcagaatgcattgacaatattagattttggagatgctttgataccttaataatagtttgttgtctttctttctttttttcttatttttttacttgaagagttgcgaaatgatcacaaggagattactgaaaagataaacagaaatatagaagttatgcattctgcaaggcttgctccaaaagcttcgtccgccaaagaatcgggtatggctgaatttctcgagattttttctggttctatttagagaattatccaatggaagaaatgctgctaatgtgctaccatgcaagaaaataggaaataaatatgtaacttatgattatgactggagttcacattttacagtatctacagtaatcatttcaaagcatttttcaaaaaaagaaaatttcaaagcatattgctgtgtcat

SEQ ID NO: 298946 - DNA, 1541 bp, Cannabis indica
cattgcattcaaatcatttaattactagagtaataaccctagaccatataaccgctcactttagggtaataaccataatctcggttcctcatttaatcacaaccataatatcaaacatgagtgtcaccgtgcttaactctacgtgctaactactgtcttacctggtatcccaagtatgtggagattccaaatctccgggtgttcctgagcaagcaccagtaatcctagtcataatttccatgatttcacatacagggttaatctcaaaattcaattttacataaacacataatttgcattctatttacagattaacatgtagagcttgaaatgagctttgcaacggtaccaagaacgtccaaaacgaagtttagagtccaaagttatggtcaaaacaagttttaacacattctgccctattaaacccccaatgggccgctgtactcaaagaccatgccgcggctcctgggttaaaaacccagaaaactcacttttaggtacccgaaaatgcaccaaactcaacccaaaaataccccaacttatcaacaagctttgcaatcaaattgaggtgttttccaagcattatacactagaaattcattcataaagtcaagctcaaaactaaattaagcatattcaatattaacatcaatttcaaacccaaaacaaagctcaattacaaactcatacacacactcatcaaaagcatgttacaacaccaacatcacatcataaaaatctcatgtttaagctcaaaacatttacacctataaaagatgcttaaaaattcaagccaaacccagaaatcaaatctctcttccaactctaaactcaaccaacacatccatgatgcactaagcatgatcacaacaacaaacgcacaccaaacacatcacaaactaacaacttctcaataacatgcatcactaattcataagaacatcaagaacacattcaaagagcattcaaccaccagaaattagacataactaaagaggaattagaagcttaccacaatacataagcttctagcacaaaatcacaccattattctccaattcaagctttgatttccaaaatagggttgagattttgaaaaagatgagaatgggagagagaggttcgaccaagagctagaaaaaattagaaattgattttcaattttctcaacttttgtttttgttgaataaagattaagtggtcaaaatgaccaaaatacccctaggaccaattataaccatatatatgtagacaagggaatattagtcaactatcacacacacacacacacacacaacacattatattcagattttgtatttatcaccataacacaataatgaaatcgacaaaaatacattttgggcctcgaacccagtttcggcctaaaagatccggttgtgactataccacgctgacttgtcaaaaaacacctgtagatagacagaacaaaaatagtatatagtaatatagtccataagcacgatatatcattacaattataattttacctttcttgggtcaaaattacaaaaatgccc

SEQ ID NO: 298947 - DNA, 4048 bp, Cannabis indica
taatacatccattattagaaaaaattaataaacttaaattaattttaaaatttactcttgattatttttttaaatttttccttcacattattttatgttaatttctaatatttattttgtattttatttttattaattttttttaacttcatgtatattatttttttactttttctttaagtaaaatttcataaatttttattttaattttggtcatatatttaaatataatttaatttatttaataggtatatatatatatatatatatttttttttttttatagtagtagcgtatgacacttatcttaataatatatatagatcataaagcataaaaggaacataaaccatgtataaagatttgaaaagagtaacacggtatacatgagtggccatgatatacatacatatatttacaaacccacaaatcctaacttactaggaaatgaagcttgtacaactttgcatgacacatgcctttactcacattaattaaaaccattcaaatattattcagtacttctggagtacagcactctaaaacattcattacccgaacatttgattttcactacacacttttccaatcattatgatataatatttaattatattattattctcttatttcatatatataattatatggccttttttccgggggtttgggctctttatccactgatagatcatttaccgcacttgcagtctgagccacatttgcagctagaaccacagttgcagccatcattttcagctccatagctcatctctgagtccacatagtaactgcaattaaacacaaatataattaaatttatattttcttttctatattaatcttttgtatctaatatttatatgtgtgtacgtacgccttggctggggctattccagtaatgagagacacagaggtggtagtctctaagattccaagatcagggtacttgccacatctgaatacacatgttaacatcaataagctaccaaaaccatttaatatataaatatatatatttgtatatattactatgatataatatcatgatgacaactttgagtatcatgacgaggataaattattctaatgaactagctagaaacttgtgattaaatctcacataaattgaaagacaaacactgtatatttaaattttaaataaaaggaaaaagtgcatacccagtgcagccactgccgcaagagcaggcagaaccacaaccacactttcctgagcagcaagacatgtttttagtatatggtttgaactttgaagagaaaaagactataaaatatgataaaagctaattaagatttatattgggtttggatgccttccttggttggggccttgcttgctatttataatgaaattgaggaattatgcagtgattatccaccctacacgtgtctaaatcctatattttttgttttttgtattttcatatcttcttttcttttggttaatggtctgcatattatgtccttttctttcatttattttttgaatggtctatattgataggtctctgttctcatgataaaagttatataaataaagaaattatatcatcatgtatataatatgggatatttttttttggaaggggtataatataatatgggatataattgatgtgtaatcagattcgggtggcttaatcagtaactactatagtctataggagaggagagtgagtgcccagaataaattaatagtgcaataagaacatattttctaaggatattatgtcacataattttatttcctccccaacaagaataaattataaatggaaaagaaaagcatattgttcatgaaaattaaagtagtcaacttacatagtactagatatagataagtagacacatgtgagtaataagattctaaactaaaacaaaacccaaaataaacagaggtcactcagtgcatgatattgtaaacttaatatgcgccttttcaattcttgggaaaacaattctgaagggaaatgataactcaattgagagagctagagaataaaatgaagcaagtggaaggatgacaagtcattttcaatttgaggagaaaaaaaactcttggtgcgtttatctatcctttttaactttgatcagtatttcaaaaagtgcagctattgaagttgtattggtagggaccaaatgaaacagtataacttttaaatatattttttttctattgattaagatacctatcgatttataaatatgtaaaaactcattagttatgcaataattcacaacaataaaaatctatagaatagtacataattacaagactacggccggataaaaatataaataatatacatgtaatttgcccttatatatgtcatggatctcttataattggaggtcatatatttagttttgaagaaatagtattttagttaatgaattgcttattatgataaacttgaaaaagaattgaaatataaaatatgtgaatggactatgcatggtgtttgaatgaattaagctttggttcaaagaaaataaaaataatgaaggatagaaaatagagaagaaagaaaagaaataattaatgaactgggtggatgctagtactagtttctggattcgtgagagtaggaacaagggggctcactgttgtttagcctagcttatggggtttttttggcctcttagttttcaggtcgtgtatctctcagggtccggagacgggttcccctttgtcgtccaccacttttaaggtaaaaacaagtttttttttttaattattatttgaaaaaaaatatctaaatttgattttggatccaaaaaatctaagtttgtttgattagaaaatttttcaccatgttgtgtgagtgagttatgtagtctcactgttgtgggactatatattttggtggacagatgcctttattgtcctctgatagctacaaaaattggaagtgatatagtatggggcctagatgaaaggtttaatgagtgatgtatacttcaaaaatcataatcaactgaaagaaaaagaaaagagaacaacttgtagtatttaatggtctttttccgccaaatataattagtttaaggtaattaacctaaaattctctattttccaaatacataattttaaaaaataattagtatttttgccacctaaatattttgaattactaagttgtgcctcatatagtatacaacatattaataatactcttcaaaatataaattttacactaacatagttcttctatcgcattttatttaattttatcgtaaaatgaaaaaagtgactgatgataaataataaagtgatgcaaattaaatatcattcactcttttcatattaatgaacaataataaaatattttttatataataatttatatttcatctttaaagtagaaattaaaggtaaagatatttgatttgaattcatttatcaactactatttagcatgtcacttgttttacgataaaattaaatagaatatgatagaaggaccatgctactataaaagttatattttgagaggtatcattaacaaatcgtatgttataaaagcataagttattagtgaaaaaagtttataagacaaaaatattaagagcattgctattaggcaccagtggtatctagcaacttctcgacatgtcacattgcgattggctagcgatactccctaaaaactattatattaaattatgtgggacccgatacttagttggaccaataacgatactgacacataagagggtgctaggcaccactggtgtcctttagcatttctcaaatattaattattcctttctaattccagttttagcagtctattgctgcaatagaaatattttaaaaaagagtgtataattatttaaaaagaggcaaaaaatagggttaagttttcaattaattaattatatgcaaactattaaaaaaatattataagcaaaacaagtggtacatatataatttgacatttgaatttgatggtggcaccagcgtactcttattctaacatattaagaaatgaaaaaatctcccccccaaaaaaaaaacaaacaa

SEQ ID NO: 298948 - DNA, 6555 bp, Cannabis indica
atgagtaatgggttttgataactttcttgaaattttcagggaatggaagagttatggtactcccttttatgcaccacggtagaactggagacacaagttgaatcagcaaaagaagagattacaaagaaagaagatgaaattctaatacttaacgaatttctgagcagagccatcaaagagaaagaagaagccgaatccaattgccaaagcataatgttggacattgtcacccttaaaaaacaactacaccaagctcaaaaagagcagccaattgcgccacaaaatgggctaggagagccaacaaaggagagtcaaaaccactttgctgaccaaatttttgcctcttcttgtgagacgaaagaaaacgaagtcagtaacgaatcatgtgaagataacaatatggactcaattttgcagccaccattattatcttcttcttctccttctacttcttcttcatcatcattatcatctcaattgccgccgagagctgagcagttggtggctggaaagccattgccggagaaagggaagcttcttcaggcagtgatggaagcagggcccctgcttcagactctgctcttggctggaccacttccacagtggcagcacccgccgccgctagttaactgtgttgagattcctccagtggccatttctcggcccttaacacaaagctttcttggccaagaagagtactcttgtttgagtcacaacaacaagagaagcctaccacattatgagggatgtggtttcaactccagcacaaagtaccaaaaggttgttctgtactgacaaaggggtagttagttcactttagttgttaagttttgcttttaaaatttcttgtgaaaccatccttttcattcattattcaaaggaatcaacatgaacgggatggttattttgtaccagttaaagattgatttaaattacatggaaattaaaatcctaactaattcagtagtctttttcatgtccttggagactaaagttgtcttttccatggggtaactttttagttttctgcccaattgtgaataatatgatgtttaattcaccagattattatggatatgtaactaattatcttatcctatataatgattaatttatgaatctggccttgcagttgatcatctggtcatgagatatttattcttctccttagctttttagcttttgaagtgtattacccacaatgatggtatgcatgaccaatgaataaggtctatgaatcaaacaagaatttttgcttttcatgaagtttagtctagcacattagtgtctagcatatgcagcgcataatatggcgtactaaaattcatcatacctaatgaattttgcacttgaaaaatgaaatgcattaaagtccacctcaaattcatttctttatagacaaaaaaataacctatggtgggacacagtttaattaagatagttctaatatttgttttcctaattaccgtgtccaaatcagagtataagctgtcgttttcaacataattcttaaaaaatcttttaacatttcacatttcaccttcctccacaacaatcctccaatgatcttaaccgggataggtgaagaatctcctgcttcgggaacccatcactacagaagaacactgatttatgcccatgaccaccatcatgcaacctatagaaaaatatttgtttgagaattgtttcaaaattgataatttatcctgatttaaaagaacccaagtcaaatgcaatgcaatttggtgatggatttcggcaaacatgaaattttgtgtcgtgataacttcccacaaagagttatgatagaaaaatcttgacactgagaaagcaatttcaaattcggaaattcaccatgtttgtccagttgcataaacaaggaacgaaggctacttaatagttaattgggatcaaactaacatcgttatgacttggaactcaggtattcctaaatctagaatcttatccaattcagagatacatcatgtttcatcaaatactaatctgttgttactttctgtttctgttgggtgtgcaactaaagtctcagtaaagattatgggtataaggatggatattatctggtataagttctcaaatcttttgagaaggtgcccaaaaacaaacccaatctcttctcattagaaaaaaagcacatgaatatagatataacaaatccaatctctctactgattcttccctattcttgtgtttatagtttgtagatatttcagataagcattccttaacttactccttttttatctccttgacttattcttttaattcaaatagtattcaagcatcagattgtaaattaatatacgatcaatactacttagtctcatatggtatctagagcttagatccaatttttctcatatgattcccacgaatattcacccatggcatccaatgatccatctacccccgaaccaaccaagccttccatcctcaaactcactcccacagactatatatcctggaaaactcaatttctttagatgtgttaatgataacgttccatcaaaaaatactttgccaataatgtcttcggtagtagagcatgataactgccttaacctggaggtcttattagaatgagtctcactggaaattaaataccatatataaagataaatgagctattgttaattgaactccatgcaccttaccacaaacacacatcctaaattctaacacatttcaggtgtttggtccttgatctcttaaagatctttcgttacacccatattttccaaacacaaacatgagaaggtgtgttttgtgcatgcacttgtggtgccgtaatggggcgtgataatctcttcgagatatgtgtgcattcaagcgtggtgcgccaacactcttaggaggataagatacaagtttctcaaatatataataggaaatgtacgcagtaccagtagcagaatatataattgaacgaagactacaatgcactccatttgagctgaatccagtatacttaccacaaaagcaagagaagagagataagcacactagaacaaaatatacttttcaagacaaaacatttaaataatatacacatttcaatcagtaaagtgtttgatctgttgtcaatgtccactctaatttagccaataaatttcaagtatgcgctcctcctatttcactgactaatagttcactgagatttctaatgcataactcgtctggaatcgtgaccaattcaggcatataattaacgtgtagtcttctcagattgggcatagctgtttcttctggctttacttgccacaacattacatttcacgagtgaactaatttggagagtctccaaccttggaaatccttccacacactattttagttccattgtaagaattatgcaatcggagataccttaactttggtagcttctccaacactggcatgggggtccttaacaagctcagagtccttcaagatcagtttggtgagactttctgggaaaatttcaacagtaagatcgttcaatatcttcccgtctaagaaaagttttgagagagaaacacacttagaaagttgctgcagatttgaaaatccaccactaatggtgttgagagacatgtgtagagactggagcatgcttagcttgaaatttgggaaagccaagaacgatctaacctcttcgttggttttgaattgtactcctaaatttcgaagattggtcagctcagattgtgtgatcttgtttttgagaagcagcggaccaaatcttatgtacttgagagtctgaatctgtttcaggtcggaaagaacatatgtattccaagtatgatcatcagaaaaacacgtaccaaaaggtaaaaacatatgtttcaaacaggatagcttcaaaatctccactggtaggacaacctcgtagttatcacgaagattaatggtgcccaaatttcttaagtttcctatggaactaggcaaagtgacttttccaccatctctcaaccccaagtacctcaagtgaatcaagtcaccgatctctacgggaacatgagtactgttacacataatggtactggtgtcatttctaaacccaaattccaaaactctcaacagtttgaaactcttgctccttataagtttcaagaaagacagaggacttacatggaagcaagtaagggaacagagtatgatgcatttggtttctatcaagatcacatccaggaatatggactgcaactctacgactgcttgttagatgaggagtagtattactcgaagaagagctagctgtggtattaccacgttcttttcatgatcatcatgttgttgaataacctcagagaatttgtcttctctagccttggagacgcagatatctctcattagacagtgcactgcacacgacatgtttttacaccaacctcagtgtaatcccatttccccacttgaatcatacacctattaattaactctctaaaatattgctctgctatctcttccatggtctatctttttgttgttgatgcaatccacagctgaattaactttctcttgggtatttcaaaaccctttggaaagttgcccaaataaagaaaacatggtttcaagtagtaaggcaagtcatggtaacgtaaagccaaagtatcttccactccatatctatttaagtgcaaattcacatctctctccactttctgccattcatcatctaactttttggttctcaaaaagtcctccaagtttaacaatggcaagaggtagtcctccacatttcatagccattctttttcccatatcctcaaattgagatgatactaatggagtaccaggagtggagactatatttcttgcaagtgcttttctttgtagaagaacccaactctcttcaagtgttaaaaaaggaggttcaaaagtgaaataatttggatcggcataagatgctacttgcttgatacgagtagtgaaaacaattttacttcccttttcaccacgagggaataccctttttatggtatcccaatcattcaattctccaaatatcatcaacaacgtacaagatatatatatctcttccattttaaactatctttaatgtaatcactcaaatcatcctctcccaaagagttgacaatctctttgattcttctcctctcttccaacttagttcctaaatcatcatcaccatcaagcgttggatactgagactgaggaaacccaacttgcatcaaaatctcagaaaatacatccctatagaaagtagaaacgtactgatgggatataaaaacccaagcacgacaatcaaagtgattcttcacatcatcatcattataaactttcttggcaagagtggtcttacctaatccacccattccaactatggaaacaaatgaaagctgatcattatctttatcttccatcattaatttctccttcaaaatcgccatactgtgatccaaactgatgatatcatcctcctcctcgtcgtccggattcgatctcctcaaactccgccatcgaggatcaacggctgcagaagcataagaagaagaagaagtattagtgctggccgtgttggcggaagaatctctacgaacgaattcgatcccgtaattcttcttgctttcgaagatgctttcgatcttggctttaatagagttaacttgtttgcgaagcttcttgaagtgaaaagctttgaagaataaggaggaagagtcaactttgacgatgtaaaactccacaacatcttcaatctcacaagctacgtttctgatttcagataccccagttccgaacgcgatagtcttgttcttggtcgatatagacggttttcaaaaaacagtactgtatacgcattagctcgtttcgcaagtactctacatcggtcttgactgagatcaaggaagttgcctcgtgactgagtagataggaaattctttggattgcgtgcgatactacagattctgtgaatattgataatattaccatttctgccattgttattgtatgtccaggtttgctgggaggggagtatatgaagatgaaactataatttgttcattaaatttgtattttacgttctaataatgttattagtgagaactcattcatttttcttcttttacttaaaataaaaataaaaacgaaaattcaatgaagacaacattttcatattacgtggggttataaataaataaaagaaagagaaataaagatcacatcaatattcaaccgaacttcttttttatatatcttacccggggttgtattatgtcgtattgtattatttgaaagaacaaactatccaattttatagattcaagttaccagttgttcaagattagattggttaactttaactcatgcattcaagaactagtttgaagataaagcaatttacaagcttcatctgcactgagaacaaatctcagccgaatagtatttgggttccctgaaccaggataataacatctactaaatccaaaagattcgttttattacaatttccagttcacacttaggaatttaatacaatctttacagcaattagtaatgaattaccaacaacaatcaagattcttgattgta

SEQ ID NO: 298949 - DNA, 1741 bp, Cannabis indica
ctatactaaaaaaatactaagatgtgattttaatagccattcaccgcgttccaatgttgtcgggcacaaaagtatgaaaaattataaaatttctatatgtgacataaaaatgcattctgaattcaaataaacataaataattaattcagtactaataaataatttttataattaaaatcctaattatttgctaatttccacattaaagctaagcgatttttagaagcttgttctacaaaatccttcaataggaaaatgaccaatacccatttgagtttccataggatgaccatttgccccatcgttaaaaatttctccagcccaattgatcgtatcgccaccccccaccaagcgtcttgaatacagagcttggccaataacctattggttcacttccaaattccagccaccattccccattctctttgtgctgcatgcatctgtaatacatatatactatatgagtaattaataataggtaatgatccattttaaattaatttaattagtttgaaagatatatatatagctgcatgtatagtatagtatattatatataatatgcctgggctaagctaacttgtattgtggtttacaccccattaaagatggaaacaggtttgcaatatagagcctaaagcagcactcttgcttacttgtacaaaaccggggcaatcaagattttaaatcacttcacactattgttaagaccatataattcagtaccatctaaaggaaaaaacacttgctgcaacaattagaaaatatttgtaaattcatgtgaagaatgtgagaagttcattgaaactttttaaggaggtggataaggatgaactagtaatttaacatggtttttagtactgaaagagatttagctaatgaagttattttctctttgctctgttttctgatacggggttgttgtgaattgttgtttagtgtttcttgcttttgattaattagtacacttttataccttgacgttagtgaaaatggtaggctcagtttaatatctcttgtcccctattggcttaccaccgttaataaagtagctccttctcttcaagcatttgttaattgcttctggtcccaaaattattttgcacaagtggactgatactgagctaaatggaattgctctcccttatatgttgtgagcttaaatattgtaagtgcttcctgctactttttatcttgctattctttgtagctctgaatatctgtctaattgattttatagccttattgactacgtactgttttaaattttgtatgactgaacttcaagttatagatatgctacttttggaagagttataatgtttctgatttttatgtgttttatatttgattatatatgtaggaaaagacacgtaaggtgttgaccacgaattcttttccctctctagtctctaccattaaggttcgctttaaattaaatttaattgttgaatttattctggtcattttcatctccttcgtttggagcatatctcaaccagtcatgttaccatggacataaaacaaactctgatgagtcaggccttataaaccaccttttaatctcgatcgattaagcaaatatataatactagatattccatggtataattagttttttttttaattaggttcaattagttcatgttaagcaatatatgtatatttaatttttttagttaggtaatgtatttttttttattttaaatgtcatttgcgattttaatctttaagaaaaaaa

SEQ ID NO: 298950 - DNA, 3318 bp, Cannabis indica
gctaatgaggttacttgtctttttcttgtgtagtaatttgaaaagagagaatgcgtttaactcttcaaaagttaaaagcaatgtagaccttgtggttcttgacacaaatgtatatgtagattgaacagaaaaagactgggaaaattagttctgttggtagagatgttactggataatgggattgaagatttgcatgacgatggcttcgaggggtctaaggttgagaggtgtatattcagagagattttctttagggatgacactggtagtagtactagtaagaagtgtgttgtgactggagtcattaactttgaatgtgagtctagtaagaacattgatacatcattttgttcaaacagtgaaaattccgctgcaacaagtaattattcctccaagaatacatgtgtggaggaactttctactgtgacagaagattttagggaggcctctgaactagtatattttccgaaacaggttgtttcgtctaacagagattgtgatgatgcgagtggtgaactaataaaagattcagtttatgaggttccaaatagtgaatgtgatttgggaaaggtttctccagcaattcccggaaagaatgctacagagcccagctctgaagtggttacacttcgtttggtggaatcttccagtcagggagtaacatctagttgctatctgttaaagcaacatggacagatagtgagagcgtgcacagtgggcgatcctaatgtttccaagggcaggttaccaggtttggaagggattgcttcaaaggatgtaagtataggtaaagctattgcttcacctgtttctcaggagagctttgcatcgcgacttgtggctgcaagtccaactgtgaacgttcaagagagatctgaatgtccttcagatgctgaggaaagacctctagaaaaccgaaattgtgaattagaattatcgacttatgtagtggagacaagcttaactgatggtcctcatccgctactccagtcaaacaaggatcctcggccgcttatccagtaccatgctgttgagttacttaaagcagcgggatgggacactgagaagcgtaaaagaccaagtaggcaatatacggagacggtttatatatcaccaaagggaaggccagttcgcgaattccctaaagcttggagggcatgtggtgaacttttgatggcagatggatatggttcggtggaggaaggtgttaagaaatggactaatatcagtcaattctattcagatttatctgatactattttagctcttgagaaagagaaaaatgcttcagaattgtcttatcaatggagaatgttagacccttttgtagttgttgtgtttgttgacagaaagattggtgctttgcgaaagggagagacagttaaagcaactcaaagcattttgattgacaggagtagcaagtcagatagattgttacccttggaaaaggctcatagtattaatcaccagattgcaaacagagatctgccaacttccatttgtgggtcttctttggctgatgaaagtgcattggtagtttccgaggggaattcccatgactattttcagcaatttggacatgaagaatctggcaaacagatgaataacaaggtaatagagctttcgaagtgcacacaactttatccaaaaggtggtgtgctcgtggtcgagattggaaatcgatgtatagaattctctagtttgggtatgacttgcttacctgaaaatggaactgatagcactgttgtgccggctggtagcttgcacgatgtttctcttacttccataaactgttacaatgtgcttgggcaatctgtttctcttaatcaagatggcaatacaagtagtcaaatctctgtcaaacagagtgatgatgttaatattgagacaattaaggaagttatttcttcagaggataatgaacttcagggaggccgagtttcagatgtcaagcattctccactgagattacaagatgggtcggctattgaaaaagagccgggtgttgctatgcattctgtacaggttgaggaagatagtagacagcagcatgaagcctcgaaactcacagtggatgatacatgttctccagacattacttcaaagaagaaggcacgcaggaagtctaaaagaatatctgaaattgaacaaagcgcactcgaacaaagtggcaatctaggttcagcttctatagatatggctgacttactgtgtgttaatggtaatgaagacctggatcaggatcagggagacattatagcctatggaagaaatgaagaaactgttaagagcgcgtcttcactgaactcgaaaaagaggagttgttctgattacactgagtctaaaattgtgaagaagaaatcaagatgtcgtattaaagatgatgacttgctggtttcagctatcattaagaaaaaaaaatttagtgcaagcacgacgaaagatccttctggtaagaaaaactacaaatcaaaagcctggaaaaagcttaaaagccaaaagcgtagctgcagattgcttccgagcctcgttaatgggggaaagcactttaaggatgggaagtggtattctgttggagtaagaacagttttgtcttggatgattgatagtggggttgtatctttaaaagatgtaatacaatatcgaaatcctaaggatgattctgttatcaaagatggtcaaataaccagggatggcattttttgtaagtgttgcagcaaggtacttacagttttagagttcaaaattcatgctgggttcaaacttaaccgtccgtgcttgaatcttttcatggaatcgggtaagccattcaccttatgtcaactccaagcctggtcagctgaatacaagacaaggaaaggaggtggcgcagtggttcgtcttgatgaggatgaccgaaatgatgattcatgtgggatctgcggcgatggaggcgaattaatttgctgtgatagctgtccttcaactttccaccaggcttgtatgtctacacaggttcgcctttcggattttgcatcttatttttctaattttcttgcttggaaggcaaaaataaaagaagggtttaattatttttatttgaaaaaatagaatgcagatatgtttgtatagagaagataggcagctatcaaatctgatctagtcctcttatcatgatttacaattaaaataaataaatcaaaaataaattaaatgcctaaaactaggaattttctaaaatatgcattccgttacatctctccattaatttagtaatctagagagatgtaacggaaggggcattttagaatttagtaatcagaattggaataaattaat

SEQ ID NO: 298951 - DNA, 4300 bp, Cannabis indica
tgatataaattagaaaaaaaaaacatggaatttactaacaatacctacatatccacttttgactcaaattttattatacatgttggtgaaaaaatatgatcaaaaaacaaaaccaaaaattggaatttctagataagtgagcaaccaaaaaaaaaaaaactgatttctaaattacacacaacttcatgatattttcttttgtgttcagcagagtttacataactcaaatttgtgaccaaactatataccaaaacaaaattacatgaagtaggaatttcctctctacatgtcaactgaaaacgccactcttttcagcttagcttctgctgctgctgctgcttgatgcaagggccaataggctgctgtgcgaggtgactgtggaggagataagcttggaagagcctcgagggtagagcgaggtgaacggctgtgcttggggggcgccacggtcagcttggaagtatcccaacaacgagtttggtgtccagtctcactggagcaaaacaatatcttgtgaagacaaagctggagctggaagtcatgtatgtcaatgaaactgatgaagaagtagtcttgaaagatgaggttggagccatgtgtagtaaatcattgcacactcttacctctctgaggcaaatttttctccgttattagtgcttagagaatatgtggattgaccatgtttgtcttcagttattgtttttgttggactatgagtagttttatcctgttttacacaataaggagaaaaagaaaaagaaactatgatatacccaactaaaaatttattaagcaaacacaagggcatggttagaatttttcaccctcttaccgctatgttaatcccattaaatgcttgtttgcaaggggagacatctaactgctgtgaattctttaaaaatcgatgttcgagtaacatggctgcagttggtctatctgcaggatttctcctaaagcagcattgcaagaaatccttgccctctgatgatagtgtttcgggtataggtggggaatctttcaaaactttaaacattgctgcagcctgcataaaagggtgacatggttaacacaagtgaataaatccatgagtattattgtgagtgctttattcacttactccttcatattcactccatggaggttttccagtgagcatttcgattatggtgcaacccaaactccaaatgtcaatagcgaaagcaagatcggcgttgttatctttttgcatcactgcatgcatgagctacaagaaaggaagtaaaattcatgtcatcacagaatcaaaagagaaaagaagagcctaaaagaaatgccaaagcaacaaaatgatacctctggagccatccaatatggacttcctttcatagaaagatccactacatgtccattaagctgtgcaagaaaattaagcaaggttaataagctgattcattaatatgataatatataatgttaacaacaatcattactcacatgtttagccattccaaaatcagcaagcttaacaacaccagatgagtcaaccagcaagttagcccccttaatgtccctattacatacattaaagagtgattaaaaagttgagagtaatccaagataaaatcagttaatcagatcaatcatgtggtcttacctgtgaatggtctttttgctatgtaagtaagctaatccagagagaatatgcctagtgaaattgcgaacaacagactctgtaatggctccacaatgttctcttacatacttatttattgaaccaggatgaacatactccaaatatatataaaatcgatctttaacctgcaatttcaaaagttatatcataatttgttcttggcatgaaattgtgataactaaacatgaaattgtgatatttacttactgtttcactaccataatactggacaatattttgatgctttagctgactgagtactttgatttcctaaaaaaaaataaaaaatagagtaagaaacaataatgcaaactacataatgatacaaactaaagagatattattcagatttggaaaataacctgctccaactgctttatagactctgcagattttggatcatcaggaaatagttcaacttctttcatggcacataatgctccagtttcactactcacatgagaaaaataactgagtcatcatcatcatcatcaattcatcatgccactatcacaacatatatcaaggaagatcatatatatatatatttatatatttatatacataccgattgctagcaacataaacacttccaaatgttccacgaccaatgatctttcccttttgccattgacattgcatcaaaacaggttcttgtttagaattgacttgtggaacatgatgggaagaagagggtggaggagtaggggttgcagctacaggaggaagaggtaaacgatgaacctcaggaggagcaatagtttccctacgtaatgaaatggtgtcaaaggacaatcttccttggaataatggggatgaagatccatttgggcttttacacatttggcttatacttcttcctggtggactatttgttggagaaccatatggagaaccatcatagtatgcaggaggaggacctgtcatcatatctgtgaatggcatctctggtgctgaccaaacttgatttggtttaggaatcattgaacggtagtattttgtcatatcaaaacttggtctttggggactaagtgcaggacttgagaaaggactagttggggcactcctaattggaacctcaactctgaaattctctaaaccattctcatttctacgacctttccaaactggcctcctctcagataaatctgaacttttcatctcttgggaagaaaacatactgaaacaaacaaacaaaaaaaacgaatatagcccagaattggtaaattagatcacattgccaaaattgagacaaaaacaagattaaagatcaaatttttcaacatgggttctgatgaaattacaattaccgctgagttttagggctagccgtagccgaaacaccttctccggtaccatggtcagctctgtcctcaactcctttggtgtacccattaagcttgggcgagggaagagggcaatcagaatcccgagaaggattagaaccagccaccaacgatccctctttccggcgacaaacaggggaaatctccggcaacgggaggggttgaggaagagccgaagcagaggaagaacgagtgggtatcctatcatgactactagcagatttatgaagaccccattgggaatcagaccatttggattgtccagaaccagaaacaacatcacggtcgcttaaaggtcgaaactttctgtgacgagagctctttattcttgacccgaatcgccatacccgacgatcccctgttgcagaagaagatgtcttgttgccagagtcaacggatccgggtcgggtcggagaagctctgagagaggaagaagaagaagaagaagaaaaagatatggtgggtaaccaacgcatagctgaaaagcatttgggggtgattaattctaacgtagtttcaacaaaagggttatagaagattatgaaaagaaaccaccatggcaatggcaatgacaatggaggaagttggttgttgttgtttctggttcttctggttatggttatgggttcttttgagaaagagaaagaaagcagaagccgagtggctatggaagacgcggtttgcaacgtactcccaaaccaaacgggaaagaaagattaattgtctcaattttgagaggtcaatcgagattttatattacaaaagaaacaaaaaccaagtcaagaccttttgcatgtgtaagacattataataattaattttgttttgtactaaattttctgtttattatttaatgaagtttattttatgttgcgtacgtaagcaataataacaattaactagtttgttgtagtttaccgccaaaatagaaactatatttggtttgatctaaactgtcataactatctcttctccaatggaacaaacaaaatatcatatgatgtcacttttgtacgagaacaagtttatgttattaccatttgattttgttaatcctaattaggttgttatgattgtaaatttttaataataataacctcaaatgtacccacttggcataaatatgggttttcgggtgtaatatatattttttaataaattttgtttaatcgattagaaattaaaaggcaataaagaaaattttcaattaagataacaaaaaacaaaattgttactgaataatttaagtggtgcatctggtaatatttttgttttaaaattt

SEQ ID NO: 298952 - DNA, 2710 bp, Cannabis indica
tatatatatatatatgttagattattaagttttaaattatatgtttttatatatatttttcttttaatgaaattaacttaaatggtagttaaaatggattggatggatccaatccaattaataaaaaaccagtcaatgcattcaatggttggaaccgatccaatccaaatacatttattggatcggatcggatgactcaattcaattggattggatcagataataaaatttaatatccaataaataattagattagattggttgggtccaaattcattggatgtgatccaatgaacaccctccctcccaatcaagacaataatgacaatgacaatgttgttgacttgtagttttattctttattttacactataaatagtactaatttttttgagctaacgatacttttatttagttttgtaattatattataaattttaattttataatatattttaaattatatttatatattacattataaaataaaaaaaaaaagttttgccagtgaagtatatctcgtcagcaaaactaaaagaatttttttggaaagttttaccggcaaagtaagctgcgtccgtaaaatttttcgtgggtaaataaatttggcgcaaaaattttcgcggcgagtgattttgtcggcaaaatctcgttaactaattgtcggtgggagacttatgtcggccaataaattaaatcgctggcagaaaatgttttgccgccaaggtatgttgttttgccaacaaaacaccttatgtcaacgaatcaaccctgacaacctttgttttcgcaaaagttcgctggcaaaataatatcggcaatttatggctatttttaccggctcgaggtggtaggctttctcaagggaacatgagacaagtgagatatagcaaaatcttattagagttttaaacaaaaaaaagtattttttttttttttaattttacaattatttttagttttagtttttaaatatccaaaagaatttaaataaaaataattaaaattaataaatgatctaaagacaaataagagactaacggtggtacttggggaagttcgagaactataactaaacctattattatccttaaaagaaaattatatgaatatataatttataattacatgccaatttcttagggtaaaagaaagtttttgtataaggtggtgtctcaaacattattattcatatcctcgtcttgtttgatggttaaagccttagctttgacgtagaaaaatccaacaccatggccgatgacagcaacaatgaaaacaccgacattgaaagacatcaaagaaagcataaccaagtaagaaactgcaacccgaaagccatacacgcaagcgtgactcaaagccgccgtcatcggaggtacaccagtaccttctttgatggaggttatggaagagagaacctcaactatgacagccatgcaaaacactaaaaccagagccactatgtacttgccggggctatcgccgggccaccctgagtacaggattatagcgttggtaccccattcgaagctcatcccactttgcatattcatattcatattcatcgtcccatcactcgtggttcccatagccatatcgaaaattttactaattacatgaccacacatatatatatttatataattatatatttgagtttctttgatatgatcaaaatttgttgttgtatagtattattaattattatatacagtaggtatataccaaatatatatgatattataaactttttgaaaggttttttttatgtatgcatatagattcaatatatgtatgttgatgtaaacaaagtttgtgttgtgtataactccgtatgagagacaaaatcatgaacatattagattcttttttttactattatattgtctactcatgaggaaggtcttagagtcgatcgttacaaataaatgtagactaaaaaaaggaaaatcaaaacaaagaggatggtctgatgaaacaaactagttaataacttctttttcgcggtggatattcaatattttaaaaaaaaatgtatatatatgaaataaattatatatatattttatttatttaataataataataaaataataatattatatcaaattataattaaactactgtaaaaaagttagtatactatattttcacttctaactctttttaaaataaataaataatatgattagcactctcacttaattcaactacaatgtctttaatgtatatgtcacgataagatccatcagtcgactttaatgaacaaattgataaacataaataatacaactgagctagaacttaaccatctccagattgagatcactatcccagagacaataaggaaagttgtctaaccacacaagttgtttttccatccttcgcatgcactgttaatccatgcgcaactacattgattgttcgacgaacatgaattaggaatatccttaaaaatctggacaacaaatgtaaagactcgattttgaccgagtcaaatatgtatatatatataaaataataatatatatgtatgtataaaaagactccttcgtcccccccgcccccccttctctctctacctatctctctttttctctcttttcaaacacaagaaagaaaactcacaaattccataaccaccacactccggcgacccacctccggccactgcccggccccacacaccagacaaatcggaaccccaggt

SEQ ID NO: 298953 - DNA, 2000 bp, Cannabis indica
tttttgtttatggtaactaaggaactatataggtttctttttaaattttgaaaagcacacactgagaaggggaagttctcagccgagaatcatagatagttggctagtccgatgatagaaactaatttcggtggctacggtatgaatggctgaagtgacaccatatataaactcatttactttaacgaacattgttttatatgtaattttaatgtgcttaatgtagtgaaccaaaaaaaagtgttagtggagagagagagagagaggatgagatttggtgaggtgggaatcaacagaagcgaggtggttcgttctgggagctaaccaaaccaaggtaagtgagatgaggatgatcatggagctgaaatatgatcatcttgaaagaaatatgatcatcttgaaagaagaggaagaagaagataagtatatatatattaaaaatatatatatatttatatatagactaaagtcaaaaggcggtttggagatattaatggggttttcaagagctggtaataatagttttaaagaagagaaatttttagtagaccaagctgcagaggcagcaaagcttttgggaacctctttcatggcttccagcattaaagggaacgacaacaacatcaacaaccaaacaagtaatagtacttctgacgaaacaccactaatattccaacaacaacaccatcatcagattcaaggccatcatcatcaacatcctaatcagatttacaacatgattaatcaattgtcatcttcctcctcccttggatcgacggtggctactgctcaggaggttgttcatcgaccgtcttctccagtcatgacggaggctggtgcggtttctcaagcgggttctcaggcagatctgcgttcggtttccaaggcgctgtgctcgaaacggttcaatcgggtcactgcagggcctcggtcagtgaaacgaaaagctagccaggctatttgggtccccaataaatctctccccgtgcctgtgatgtccttatgggtttctagtttgggtattggtgttggagagcaagctgtgtggtttgaaaaggcttctgatcatttgccaagtttagacttgtttctaattggttatgaggaggtgtggtttggaaaagggttgtgtgttagagaggtgggcccaggtgtgttgacttctgggtcaaaggctgttttgggcctggggactagtgggttgagcaatagggagggccaagggagagttgcttttaacaactcggctgtgggccatgaatttaatttccaacttgatggaaagagggtcctctcttataattattttagtaatttttttaaggcccaagagactactttgcatgaccttcaaaattctagagaaatcaattttcatgtaatttgggaagcttcacttgggccaactattttatctttctttgtgagtggacacgtgtgtgcgagtcaagagaagcagactgctgttggtcatgctttaattatagggtcggtctgtttggtcccaatggcttgtgggagtttaagtgaatgtggcaaattgggtgtggggccggttgttgcttgtggtgagaagggcccgctttcacttgttcatggtgagaaggaagcccattatccatctcaagatgagaaggccttatctaatatttttagagcccaagaaatttttttgaaagatctaaagcaatttgggaggatggatttgttcaagaaaagaaaactcttggatccttctgcttctttatgttccagacctcatatgattattcggagacacccgagtgttatccgaaacttcccttgggacacaaaggatcaggatcaagacagaacatccaagattgcttttgaagaaccttctaaagttttttcggattccttgtctcgctctaacagcattgtgaagaacccgcttattggttcgtttgtgattgaagaatctgactctagctcttctgttcactctcaaacccctgtggaggagaatgtcttatctc

SEQ ID NO: 298954 - DNA, 2859 bp, Cannabis indica
aaatataattcaaataaaaacctaaaccctataattctgcaaatgacagttcaactataagtcactatatctacaagtgccaaacaaaaatagaaacaaaaggcagcaccactaaattttagcataatcttataatcaagcaactaaacgcacgtttattgttcgaacccatgatctttttatgctgacaaaaattaatgacaaacatacatttctatcaattaacataaaaagtgaacattgaagtaatataatacaactttcaaaatccagaataataaagtattaggttcaagattcaaatttaatatattttaattgatttataatatgagttatttagatttgtattcacattgatagtgtttagtgcttagaataccttgctgtacaattatttaaaataaaatccttcatttttgttctctgtaaaatgcctccaaattatagatttcattgtaaacatgtctcttcttttgcattttgttcatttttttaaacatatttctattcaaaaaccaaagtctgagaacattttcaatatgaagaaaaataggcatctttatcttttgctccacaaatagcgaaatgccttcatgtgtatggggtagctatatttcggttgcctatattttcattataaaactaacatttatttactggattgtgagatctcaaataacacaatattaacacatattgtgcaatctctttattaaaaattacaaagctaatagcaagaaaaataaacatatggcatagaatcaatatcgataaacaaactgaaaatataatcaatgtacaagtaatttttatataattcaatgaattaaaaaagcataaaatattgagtaaatagcttaataatacaaataattctaacaacaacttaccttgattgtatatgaaactgatagaagttgcagaaatcttgaacagtttgtaatattttaatgcctataaagaaaaagaagaatatcatattagagaaaactaataaacagcataaacataattaatgtagatgatcaattttttttagcatacaaatagattcgtagcatgaagaaacattaaaaacttcttgttccaataaacataattcaaataaaaacataaacattataattctgcaaatgacagttcaactataagtcactatatctacagttgccaaagaaaaacagaaacaaaaggcagcaccactaaattttagcataatctcataatcaagaaactaaacgcacgttcattgttcgaacccatgatctttttatgctaacaaaaattaatgacaaacatacaattctatcatttaacataaaagtgaacattgaagtaatataatacaactttcgaaatccaaaataataaagtattaggttcaagattcaaatctaggcaatcctaatctacccagcacaaaaaaagtgggggagaaaacccaaaaataagtacgatccaagagaaacgaatagttcaatacgaaagtacgaatccagcatcagatgcaataaaattacagcaaagagagactacaagtaaatccatattgaacataacaatatgaaaaacagatacctttttggagtgactgataatacgggaagcataaagccaaagagagtaaatggaagtaaattttttaaaggaaaagtttataccctgtcaatttgatgtaccgttctgatcgtataaagaatagtatacttatacaaattttcaagaagagggtggtttgatgaatctaatgacacgtacatatgatgagtcgacattaatattgactcatcactaacatacacataaatttaccacgtatactgtgagcaagctttttaaaattctactaagagatgagtatcgattataagaggaaaaaatgataacatgcaaaatcaataatcttacattgtaacacgtatactgtgagtaagtttttgaaaaatctagtaacaaataagtattaaattaccaaaaaaaaaaaagataagtatcagttctaagagagaaaaatgatgatataaaaaattaataatttgacattgtaacatgtatactgtgagtaagctaaatatagataactttcaaaatctagagttttcctttgtagaaaaaaagtttgctaaatgaatataataaatcacaacaagaaattgatcacatgcatcatgaaaattgtgtgcctttctattattttctggtacaattagggattttatattaaattagggatttttgcatttatatgtatagtgataaaagaaaaaattaaggaatgagggaatttaaaatcaatgaaaaagaaattcatatataaaagcatacttacaattgataagaaagactataattattggacagtgtgggcgcaccatcctaactgttgtagaagccataatttcaatcagatcacccattattggttggtgattgcagggagttgaagatgaagagattcaggaggcaatggcaagagagaaagcaatagagaagagactctaaccagggaaaaggaaaattagagaagagaaagagttttaaaaaggaaaattagagttttcaaaggaaagttgtagagaagagaaagaggaaaatgaaaatgtcaagagagagaatagagactctacacagggaaaagcaaagctaaaaagtctcagtcaacaaaaatacctaattacaaaagctttattgcaatagtaaaattatattaaaaatgtcaataaacaaaaacaccttattacaaaagcttacacgttgcactttatacattaacaaagggcaaaattataaatacctaatttgatttttattgcttacatttggttaaaaaaatttacctaacaaataataactaat

SEQ ID NO: 298955 - DNA, 1832 bp, Cannabis indica
aatttaaaagttttggattcgaacccgtaactttttcctttttctcatccctccgtcactactaagctagccttagtggctttttaaattctgtttcttagatattattactcttgtaacaacctattttgaaagtaaggattcaccacaataaatttatgcataatgaatcctataatttgaacaactttgctttttatatgtaaaaatccaaactaatacatggtagttttccctcttgtttttttccaaaaaaaaaatgatagatattatgattatacaaataaatgagaaacatcaaacatcatgtagatgtacatgtgaaagtgtgctgatacattactgtaaaaggatggaacggatctcacattttgttagtatacgtgacaaaatctgttcataaaattaaacaatataattacttcattaattttctcatctttcgttatatattgacacgatcgatcagcgtacataccttcattaattacttcacattttgagtacatgctccttgcttttcgccaaggtgcgtaataaatgattatataattactatactagcttattcctaacaattttatcattaattaatcttctatagctgaattgatctcgataattatatacataaatagctacatcgtacatatataatccatttattttttgtgttcttcttagttcgtgcagagtaataccgtacgtaattgatcatggattattcctcagccaccactacactattttctcgtccagttgccgatcttcaagaccaccatgatcatgaaaaagaccataataataataataataacactactgttttcgatttgtcttttcttcgagatcaaaacaacattcccgccaatttcatatggccagaaggagatttgccatcgagcagtgatgccgaggagcttctgaaagcaacagtagtggatctaaaaggcttcttcaaaggtgacgaagccgagacacgtgtcgctgccgagtttgttcaagaagcatgctcgagccatggatttttccatgttatcaaccatggagtagatcctcacctaattgagctggcgcagcagcacatggattctttctttaagcttccggtgagtgagaagcttagggcattgacgaagccaggtagttcttccggctattcagctgctcatgcagagcgcttctcctccacacttccgtggaaggaaacgctgtcatttggctttcatgaggactcctccgttcccatcgtccaacattacttctcttccacttttggcgaggattttgagaacacagggtatgtacgtatatatatatatatgtatatgtatagatatttcaaacgtatacgtttatgtattatttttgtttttatgaatgattaattatatattacttggattgggtggtgtgtattgtatttagtatggtgtatcaattgtattgtgaagcaatgatgaagttatgtttggagataatggaattgctagctataagcttgggaatagacagaatggagtacagaaaattcttcgaagacggaaggtccattatgagatgcaactactacccgccttgtatgcaaccaaatctggcgctgggaacaggtgctcattgtgatcccacctctcttaccatacttcaccaagaccaagtcgcaggccttcaagtcttccataacaacaaatggctttctgtcccacctctcaaagctgccctcgtcatcaacatcggtgataccttcatggtcagaaaataataatatgtatacatatatattaaaaaaaatgcgatctatataactgtcttgttagactatatatatagtg

SEQ ID NO: 298956 - DNA, 2383 bp, Cannabis indica
aaaaaaaaaaagttaaaaaaagagtatatggagtaattccaaaaaaaattagagcaatagtaatattggtgcgtaaactgtgaagtaaaaaaaaatataataatttaaattaaaaattaataaacttttaattattaatataattttattttttaaaataaatatataattaaatattattataatatgtataaagttttaattgtatgcaagcagtcctatcgtaagaatatacaccttacatcataataactacataatctaaaatcaatggtcaaaaaagttccctaacggtaggaaacttttattaggtcctaccataatcttgccttacgtatatctggcttaaagtggtatagatttagtgtgatactgcaagaaaagaggttaacattacgtaaccattaataagatgtttcctcacattgaattaaacgtatatagtttcgtggaaataatagttggaggatattcagtattagttgtgtggttggcctcagctagctagacaattctcctaaaattgccaaacttttgaaaaattaataaagttcaaaaacatacaaaatataatgttcaaacgttgcttcactaagcatcaagaaagttcaaacacgtatcttataataataataataatctttataatatgaatatgaataactggcttgctaagtttatatacacatatttatacataaagcattagtttactattaatgtttcctcacgaaccgacgctgtaaaagagtacattccggaaagttatggtacggtgtttgtgaaagtcagagatatagatatatatatatataatgtatacaaattgtgttattttaaaagttactgagtataataatgtgtagaacttatacatatataacgcgatttaaacattttacaaattgaatctagttactacatactgctagctaaccctaatattattcaccgatgatttctatatatatatagagagagagagtacttgacttccagctgttgtcagacgccagttgcaagctatcaaaagtagaaaatttgagatagatctatatatgtataaaatagtcaacgcgacgacttatctacctatacagctctggatatcaaaatgaaacctactttgcagttctagtacgtagggacttaattatattttgaatttgaagggggccaagttgtgatcaattaataccacattaattagtccctccgtgattcattttataataatcaaaagtcatggtttctgaaaaaaaaaaaaaatttaacattgtttaaactaagtaaaggtgatgggtcacatgagttggagtagtgatacatatacatccagcgatataagtgaataaaagaaagagcgaaagactttgtcaattgccacgcactgtctcacacagcaaataagcttcacaagcttttacacttttgaattacaaataataataaaccaatttccaaaatattctctaaagtggttactttgaaaggacttcgtccttcatctattcataattgttatcttccctcacaatcaaacaataaactttccaattctagaatgaccatttggccaaccttgatttccctgatgtgatgaagccccttcattaaattagctaactcaacaactatgaatactaagttactaactaaaaaactatgtaaacctgtgcatattatgtaaattttttttttttggtaaggtatgtaaacaaaatttttaattttaatattttgtattttttttatcaacattgtcttcattaattttcttgtcttatggccataacgccttcctaaacatctacacaacacaagcaacatcctcatgttgtttaggtgtgtggaaatactcccagctagcaaactcatgattgtaacttttctgcccctagagatattaaaagttaagataattgcaaacatagggctaggcccgtacctaattagagcccacccaaacagcccaaaaattaaaaatatttgtgtacaatctgaaaaaaaaaaataataataataaaacaatgtgctaaaatgtaaactaattttaaatttaaaaattaagttagtaattttttttaaaaaaaaaataagaaaatgacaaaacatactaaattaattaataaaaattataaaaatttatttactacatatttcttaaaaaaaaatatataataataattaaattaagttatataaatttatttagtattgcattgtgaataaatatattaaatcattaaatatatacaacaatatttgatatatcgtattactgaaaattaatatatcgtagtaataaaattatataccacaaagaaattataataatactaaattaatactcaaaaaatatatatcatattaataaaattat

SEQ ID NO: 298957 - DNA, 2632 bp, Cannabis indica
aagaaaactcccttttgcattttcccataagtattggataaatgatattatatttgaaatattttatatttttaaattataaataaacaataaaatataattgtcatgcatagttaaaaaaaaaaaaaaaaaaaaaaaaaaaaagacagaattgttcctcccttatacttttagttaattattaattagaccaccaatattgacatatctaacaattaggcttatataacacacaatcagacccatcattaagaatgttatctttccaaactcttagtaaaactgcatcagatctttgagtttgagctatatttaaaaatcatgtttcataataacacatattgcccaaaatttgaaaattgccaacagtgttatgcaacttcataatttgtttagaaaatatttttatgataaaattacttattaatttatcataataatgccaaagaaaaaaaaattaataataattgtttttgtgtatttatgaaataatcccttattttattatgtttattaattcaaagtagcatggtataggtggctactggcaaaccgggtgcgacgtgtactcattcggtgtaattctgttggggcttatatccacgagaatactgggcctggataggcccaaactaatacccgataatgtgatacatatttgggccaaaaatgagtacaaacccaattgctcactagtccacaaaagcctaacagaggactggggctaccatggtgaagatggttccacaattacagaggtggggatgcgttgcattgaatttttccccacgaatcgacctgcaatgaaggacgttttagaacgtcttaaaggcttgatggtctttcaacgttttggagatacgaggcctaacaaaagggacaagaaatttcatattgattttgatatggcaacatgaagaaattagcttcttctttttttaacatgccacgtagacatagacaaacagaagtttcagctactgataacgatttaaacttcttttcattttatgtggaagtggaacacaagcaatgtaaaagttgtgtatataatttttctctcaaaagaacatgtttatggtagagaaattaattttgtttttatggtggggatatatttttatacattaattgttgatgtaatgatgataaagatgagaaaatataatagtaatggtacaacttagctagtagcctaataatatttttgtacattttgtctttatctttcatctttacattattttatttaatatatatatatttcttttatgaaaaagcacattcaataaattttttttttatagtaaactctcacttttttaattattagttgggaataattttattttagtatgtctattaaaaacttcttttttaataaaattttgattttttgaagattaattttatatttaattttagatttgtttccttttaaacctaattaaatgtaataatttatattgaaaataaaattaatatatatacatacaattaagcatataacatatataaatccttttttaaaagattatttatttattaaatactttttttttatctaattattttcaagattaaaaatatagttatttttcttaaaattcttggctaaaaatttaaactttaaaataattttcttatttaaaatttatatatataataataatctaccttattatttatgtgctaagagcagcatcaaggagactgcatatatcttatatgtcgtgtatgtgtggtccaaggaggttgcatttcttgtagcatttttgtaattttatctaaagtgtacggcatatatgccgtactggcatagcttttttttatatatataatttagttaatatttatattattgtatttgtaaaatcaagaattattttttgagaaatttgacaatacacatttttaaaagtgatgtacgaatctactcctatttgtttcagcacccgatatacttttttagtctattttttttatatatagtagtgtatattatagttatttaagacatcctgtaaaatttagaaaaatttaatacgccgaaaataattcacttctttaaaagtggcgcattgatatactcctacctgttttggcattcgggagacttgtttattgcaatatgatattttaatttatcgaattttgtcgattttacagtattataatctttaatctaattagtaagtttatttaaattattagttaaatataacaattgtgataattttttgttaattaatatgatattatttttttattttattaaaaaattaatataataataaagaatattttttagtgtaatttttggtgttgtagttggagtagaaatactttttgacgacaaatttggtgatagtgtaacactaaatttggtgttttcttggagatgctttaaacaaaaaatcataaaaataattatacatggttgtttccttcaattttttagctaaaaattataattttaaaataatttttttaatttaaaaatttaattacatattttgtttttaatagtttatattatcattgtttaggataattaggatttttgcttcgtaaactttgacatgtaccaaaccatgtcccttgaacattttaggtcgtaaatttttttttc

SEQ ID NO: 298958 - DNA, 1702 bp, Cannabis indica
aaaaagaatgtctactatttaattaattatttaagaaatagttaatataattaattaattctaaaaaaggaaatctacctattagtaacctgctattacaggtcaaagaaaaatgtaaccatatggttacaataaaaatgtaaccattgaatagtcacccatatatatatatatatatataaatatatacacaatattaagtcaaagttaaataaaaatttatatactagttctacaaatttagataacaattttatttttgttacaagaaaaaatataataaaagtttttaattactttcaactttttgaagggagatggtacttttgctctctctattgatgatatctaaaagaagtggttcttttagatcaaacaaaacaaccttgtatcatcttctcatgttttctcttctatgttgaagacgacctctcatgtcctcttggcttgtagaaaacgataccacttcttttatatttagtcttatattttaatagatttattaattttattttctttcttttgataaatgacatttaataaaatagaaaaagaaaacagtgattcataaaaggacaatctcatcaaattttaacaaaaggtaccattttttactgttttttataatagaggataccgactaagtattattaataataaaaggtactaaagtgacattttaataaaacacagggtacctaaagagtctggaccctaataaataaactaaaatgactgccatttttggatttgttgagggagtgccatattcagatttgttgagggagagattagggctaagaagaggctaccgctaccggcgaggatagctggcgaagaaggagccagctgaagaagaagaagaatcgaatgaggattcagatgaaaatcgtagagaatgaagaaagaaacgcagagaagagaagaaggaggcgtgcatgtgggttgcacatcggcggtaactttttattttgaataattagcaattataattctacttgttaaaaattcttcgaaaacttttatatttataaaaatttaaatccatatgtatttctaaattagtaattttttttaaaagattcactgttattataatcaacaatcatttataataatagagaaaatagaataaggaatttctcccatccaacaaatgtcaatattcaactcaagaacatatttttgctaaatcatgagcagtttgggtaacatttctcttgacataaaaaataacaatgtcagggaaagagaatagtaaacaacaaatattaaagattaaatcagaataaactagataagtctaaagattcataatttcaaaatgttgagacatgaagggcatctgtttccacatgagtaatctgcagtgaaagttagagatccaattaagtgcatggaagagagctttcacctccatttcatctgatttgaagcagccttgaacaggtttcaacataagcgcaatgagttggccattatgcttcctgacaatggcaccaactcccaaaacctttgaaagaggagttaccgttgcatcaacatttagtttcagtccatacaaatcgggcggcttccaagggatcccttcagttggtagatttatattggtcgacgaagtagtacgtgttagaaattattttaccttaaggaagaagagagagagggagtggtcggccaaggtagagagagagagaggctc

SEQ ID NO: 298959 - DNA, 4093 bp, Cannabis indica
aataagagtgggataagattagatagttgaacatttcaatgcttgaaaatacagaggttatatcatctttgcttgcttgtgtgtatttgagtagaaaagtaatatataagtatatctatatacactaatcaaactctaaactcaaagccaacaattcttatcctattttgatatgactaaacttgttattctacaaaatctccttagtgatgccctatttgcatatattaagtaagaggagtgttaattacaatttttttagtcaacattcatgtttgaaattatatgttagaatattatttatcaaattttttttcatagctgtattcgttataattacaatattattcttgtaaattttaaaaatttttaaatagcttatagtttcgaaaacagagaatgtgatattccggtctaccacgcgtgttcaaaaaataccacgcgtgttcaaaaaactttaaatccaattttggtattgtaaactattcgaaattttttaaaaatttacagagataatattataaataacgaacaccggcatagaaaaaaaaaacgaaaaatatatttcaacatttgttttcgagcatgaaggttaactaaaagattggaataagaggttgacggtagctctcatatttaagtgaacaatgaaaaaaaaaaaaaattggaaattctaaaagagaggtgcagaaagaacctcatcaactttattttcttggcatcttttcaaaagatgaagctggcgacgtaagtgaaatacctgccacaccatattattcaatgttcagaatcttctaacaaagaaatgaaaaattaaatgaagtagatgaaagcaaaaccaagttgattagtgtcacttcagtgagaaatcaatcgtttattcgatttaaacaaacacaatcaccaaagactttgttactaataaaaccgtgcccctaaattattaatgacattaaatattctccctcaactttgaacaacgttaataatttatgagacttctattagatttcattaaacccctgttaaatagttagcaatttcatctccccaaaatatgactgctattatattttgatcccaaatttttaccattgccacattgtgctcccaaataaaaggacagaatttggcagtggtgaaaattcaaggggcaaattataatatattagtcataattcgaaaggtaaaatttctaattagttaaaaaaaaaagtctcaaaagtttagaaggaataattagcaacggtaatagtttaggagcatatattttttttaccaaaattcagggggcaaatacatatttattcattaaataatgatccaacttattacctcttcttgcagaaaagtgggaagattctcaattgaaacaaggttatatatttcctccaaaagtttctcttctttgatcccagaccatgtctctgcaggcaatgccagaagaagtgctgttaaaacatcattttcggctgggtgtaaccaaatgtgatctttagagccagagcagtggcaggttgaacttgactcggaggaaggtaatagcatgtcaactccctgttcagagtttccatttaccacagtcccacatactactgtgattggatttctgccattagcttccaagcacttaacacatgtttcccgacagcagtagccctgtgaaccagacttaccgaataaaatctctgccccgtggcaacagacacttgcagctaatttcggtaaattatcactgttgttagaagttgttatgtttctgcgacaggaattagcagatgacagatattctgttacgtgtttataaaggccggtgtcttgaacttgtctcaatacttcctcctgtacaaaagcattgaaaagtgaataattggattgatgagcaataaagtcttaaagtataaaatgttgaaactttacaacaccttgacagagagtctagcattctcttctgggcttacaccttgggcaccatcttctcgccttcgaacttctgcaacccacttaataaactcctcaaaattggatgggagagatgtaaaaataatagaaatgactttctgaatgtccttcacactttctgacttcaagagaagagggacatcttccattaagtatttggcaataccgatccaactctcgtgtttacagctctgtcggtaacaacacaataagttcaataagcaaaatcctaagtatgcaaactaacaatctattggccacttatctctctattgtgatcaacttcggcaaaggagcaacaaaatacaataacggaaatatttttcaaaattatagataagttatcaagaaagccaagaaaaagaaaagaaatgaatgaagtaacttctaagatagataatccatggaacattaagcaattcaacatccacaatgaatttaatttaatattaacatgtcttatatttacacttaaattcaaaacatgcaacgtaccagggtatacagcagtccaggctccctgtgaggcctagatactagcatgaacctgagaaaagtaagaagaagaaaaaagtagctttattgggaattctaatataattttcttttataagcacttgaactacagattcaatatcaacagaaaacagtttgtttgtttttcagaagactcttaccctctacgctgtccagtagtttcatcaacattatccatggcgtcccatagaattggtaacggaacccaatgtgggggatatttgaaacgtgcaacatctaagataagtgccatgtcctttccagcatgataaccaccaataggagaaaaatgaccagttccagtctacaacaaaaatttaattgatacttacaaaccaaagcaacaaactcaacattaacattcatgcacatatatgagtacacagaaagacacgagaatctcttaatgcaattattgtagtgccatgttaatctaagattcgaagttaaatggggaaaatttaattgctgtcttctatattaaccaatttagcatccaagagaaatcacacacgcaaacacgggcaaaatttgtttttctaccccttgaaacaagcacacatacacagaacaaaagttattgaaatgaaataaaattaacctgtttgagagctgctctattatacgatgagatcaaatgacaatcatctgaagtggaacattccatgacatacttgcggaaatcgttgatggtactatgatttgtacggaaagcttgaactttggctccagcacattgagccaagcatacaagcttaccgaatgagatgcctcgagctttaaccttttccaaaggttcacaacaatctaacatagactcatcaaaccatctccaaggtcctatgagataaaacacaaccagctacacccatttacataatataattcaaagggatcaatatatagactttagggattaaaaatttgatgagctatgatattcagttttaaggaaacattgaactctactgaatgtaaatattgaaaaccaaacctttccattttcttccaggatcaatagctagggcattcaacaccatggacaagctcgccaatccacagtaagccggttctgactgagtctgaaaataagaaatcaatctatagaaattctccatggttccactgtgaattgcttccataaaaagttcctgcaaaactccaaaacaaggtttagtgagtgaatgatctaacctgtgaaaacttaagtttctcccctataatatcaaaaatttgaaaacccataatgtataataagatacacaacctacagttatgatcactgtcaatgtcaattcataataacatactaatattaccaaaaaaaaaacaatcagaatttaatactattttgactatgagttttgcaaaagttagtaattaaactctattttgtaaaataacaaattaaactttgtattttccaaaatactacaaatagtacctgaactcaattttcgataatttttataatataactgatttgatgataatttctagcacgaacatagaatgtcataacaactttagatcaaattattattaacttttattttgacaaaagatcagtttaggttactatatgaaaaaatcc

SEQ ID NO: 298960 - DNA, 5000 bp, Cannabis indica
gagcagaggtaacctgtggattaaataagttcaaactcttagttttgcagaccaaaaaaaccaacttactttcactacatttttccttatattatactgagaattctgtaatataacttatcaattcagaatatgaagccataccactttacagtttataggcacttctttttccatgtcatttttgttttaagaatcttacttttatacatatgctgaagttgactttaagtcaatcacaacaattcatctatttgtaggactaaaagatggaaagacacacatacttacagataaagaatttgcaagataataaatggcaccgcaaacatgcttcctgaatactctacagagagctttttccattttcattcctaattagtattggaattaatacacataatacatgtatatagactagtgtggactaaacaaaaattaatcatatactgtttttttaattttcttttttaaatttacggtgtagtgctagttctaataaaaatttttgttacaatttaaagttaataaaaatttctacttagaattctgtaaaaataaaaaaaacctgtaaataaatgtgtaattagtattgtaattaatacacataatacatcatgtttatatttggaaaagtgtgtaggggagaagagagaagggttgttacaatcaggctactctccatcgtgtacggactcccaagacataattcatcctctttcttcttcaccactttcctttctaataaatcaccaaaaaagaaaaaatctgacaatagacgatggtgacgtggcaacatcacaacgactcccgaatattcatcagcggtgcaattaattaaagatatcttcttattttttttttattaattattatttaataattctaaaaagagaagaaaagaacaaaggagacggagaagactggttggtaattggtatattgttcttgctgttctgccacgcactgtcgtttcgtcttcttcttcttcctcttctttgtcgttttaggtttagatacgcatttcttgtctcaattcactgaatttctttcccccaaatctgaatttccaatctcaatttcggtctccttggggtgttattgcacaagaaattcaccgatttggtgatcgtagtttgaattacagattgcttatgaatcggttatagcaatattaacgaaaaacgttgtttggtgtttacaaaaatggctggttcgggtgacgatgacggtgacgcagtcttgagtgacgtggaaggagacgatccggcgccgattctgataaagagtccttccgcggatgaagtctcgccggagcggttcagggagctgagagcggagcttgatcgcgagcgtcaaggtcgtttggcggcggagaaagcgagaagtgatttagaagtgccgtttaatcgtttgaaggctttggctcatgaggcaattaagaagcgagatgagttagggaggcagagagatgaagctttgcgcgagaaggaagaaatttccgggagttatgagaaggtcgcggctgagttagccgaagtcagtagagctagagatgagatttcgaagcaggtgagtgagatcactaggcaattggatgaggcagtgaaggagagagatagtttgagatcggaaattgggaattcgacgcatatgtttatgactgggattgagaagatttcagcgaaagtcagtagcttcaagaattttgggaatggcggattgcctcgttcagcaaagtattcgggcatggcgtccgtagcctatggcgtcattaagaggacgaatgagattgttgaagaactccttaaacaaattgatgccacagccaagtccaggaatgaaaccagggagcagatggagcagaggagttacgagattgctattgaggtttctcaacttgaagccaccattagtaatttgagagatgaggtttcggagaaagcttctgcggctgagaatttagaaaagatggtcgctgaaaaggaaggaaggatttctgaaattgaaagagagatggaagagaaggtaaacaaggtggaaagtgaagccacggagttgaggcaattggtggaagagtacgaagagaagttgaccgaattggaatcgaaaatggaagcacagagacctttatgtttgatcagttgagtttggtatcaaaaatccatgaccggatttatggtgttatcaagatagttgatgccagtaatatggatcagtcagagctctcggaatcattatttctccctcaagaaactgacttggagggaaatgtacgagcatctttagctgggatggaatccatttatgaattaactagaattgtcactgagaagacaaaggatctaattgaggaaaagaatcatacaattaagagcttggatgaaacgatttctcgcttgacaaaggagaaagaacatattggatcattgcttaagagcgctttgtcgaagagaattacatcagataaatcttcgaaatccaatgatttgttccatgttgcagaaaatggtttaagagaagctggcatagatttcaaatttggtaaggttataggtgataggggtgttctaaattctgaccacaaagtggactcactggacgcagagggtgacgaagtatacactttggtaagtttagcatttgttcgggtttgaattactataatttcaactctgcatttggttgcaatgacaagtttgattttatttaatgttaatatgtatataacaggctgaagctttggagaatattgtaaagacttctcagcttgagatcattgaactgcaacattctgtggacgaattaaggtactctatctatcatatgctaatgtgaatctatgttttcatctgtgccgtttttcgtagtttaaattgatatattttgagtattatattgtctatttgagttttctataatactgatgaggtactttgtttttgtattggttgtgtgtatgaagggcagagtcaagtttacttaaagagcacgtagaggctcaagccaaggagcttgaaaacaggatgcgtcagattgaagaacttgaagagaaagagagagtagcaaatgaaaatgtatgctgcttatactttgttgacagcttaattatatttcctacctcatctcatttagtttcatttctgattagaagttggcttcaatgtatttgtcaggttgaagaactcatgatggatattgcttctgctgaagaagagattacaagatggaaagtggcagcagagcaagaagctgctgctggaagaggtgttgaacaagaatttgcagcacaggtatgctttttaatctggtatatcattctgggttgttggacacagttatgggttttctgaactttctgcatacttggctttagtatctattaaagcctttggtgcttctgtaacaagtgtgatatattttcttagaaagatgcaactttgagtagaatctggaccttatatcaggtagggaaaagatgagacagcaaatagggttgggtagatattaaacaatatcttctaaaaattgatatttaggaaattgatgactctgtgttagtgcttggtcatgacacattgatcattctccctctttagcaagtttccgaaaacggagcagctgagcaatcatttggaaagtaataaatattagcggctctctcatgcataatcagaggcagctgtgtctctttagaatgattctgtggtccataatagaaattggtatcttgtttaacatcaaaataacagttttctatagggttcatcttcttggtcatttagtatgtgaaaagtttctggtcaaggttcagtttttgactgtgatcaaatatgcagttgtcagcactcaagcaagaacttgaagaagcaaagggagccatgttagagtcagagaagaaactcagatttaaagaagagacggctgcagccgccatggcagccagagatgcagctgagaaatcattgaggttggctgattcaagggcgtcaaggctcagggatagattggaggaacttacccgtcagcttgaagagtttgaaaaccgggaagacacaaggggccgaagtaggcctagatatgtatgctggccttggcagtggcttgggatggatttcgtagggggcggtcgacctgatacagaacaacagactacaaatgaaatggaactcgcggaacctctcctctgattatacttcattttttttacccttattacacttttttaccggtgtatttatcggatttttttttaacatcagtacagccaaaatgaacgaaagaaaagaagaagatagatttagatcatcatctctgcgtggaggtgatctagtttgcagtcataaaaagctgtttaataagtttgttagtttctcaatcatcatcgcaagttgataaatttgttttgaatcatgaaaaatatataacgaattaccatataaatctctcactaaaatgaaatatagataataatataataaggattcactattaagagaactacattgaaattgtttttagctataggaaatatatccaccaaacccattttgcaattttctttttccattttttataaatattggtggcatgaatttctgcattgcacttaaatacttttttttaattttaaccgcataaatacaaatttaaatgccccacttgacaaaaaaataaaataaaaggtagataaacttgggtatttatatcaaattatcattaaagtaatagcggtataagtacccaaaattttatatttataagcgggataaatctaatatttatttttagtaacataagtattcaatgtttgtaaaactgtaatttttctctaattttgttagtacagactctgttattgtattaaatatggtacatataaggcttaaattcttcatcatgggtctagatagaaatatgtaatatcaattacttccaaatgttttttcaataaattcaaaatagagtttgtattgacgaaattgaaagaaaattacagt

SEQ ID NO: 298961 - DNA, 1889 bp, Cannabis indica
aattaactttaagaatacttatattttgttttatccaccgcttaaaatacacaaaagtaggaactgttagagcatgttcattcaaccttgtaacttaagtactcaaatattgatatatatttaagaaaataaatgttaaaggcaccaccacctactagatatcttatattactattggtatattaactattgggtctcatataatttaatttaatatttattatagaatatctctaagcaattattttataaggtgatatctctaaatggtgctagcaccactggtgatttagagcattttcaatggtgaagtttggagagaatatttggtgatatggaaaaatgcttggaaggagctaatcattagagaattattggggtagagaaagcttaatattttttttttgttggttctctctgagagagtgaccctggtccctggggccttcacctagtgtgtatcatgctgggtttttcttggtgtgaaggaccctggtagtgattctcagggagctttttttggtcctaacaggtctttgattattgtgtctgttgttgtaggaaatgtttttcatgtttgttgtattttcttcttaaggttttttttctttcttctggttgtgagtttcgaggtgtagtattatgggtgacgaacttaaacatcttacaacactagcggatgggctaaatgttgatgaggatgagatttgggattcaaatgaggagactgctcaaaagttcaaagaatgatcgatggtaggaagagttttagctagaagaaattttactgctaactttttcaaatcagtttttccaggaaatggaaaaaagaagttggttggtcgatggaaattattgccaaagagaagggatgcacagtggtgggcttatcttttgaagataaggtgttggcggaaaaaacttacaagaaatccacttgtattttcatggtggtatcttgataagtgaaaaatggccagccacagggagatgaaaagatgtgaacttgaatacgattgaggtttggatcaaaatgaaaggtttttctccaaatgatttaaccattaataatgtgaaacacattggaagcatggcaggagaagtcactgaggtggtttggctgaacacaaatgagagatgcggttagagtaaagatcaaatttcctacaaacaaagctattttgtgggaggatatattcccagtgaaggcaaacagatctagatactgttcaagtttgaaaatcttcctattcttttctatagttgtggatgcttcggacatgagaaaaatgattgtgggaggaatgtagctaaagtgaaacatgagatgggtgatatggttcttctgtatgggaactggctcaaggaagatactagattatctagttgttttaatttgttgaagttaacgtcggtggtggactcaggaagagaacaacaacttgtcggaacagtccagagctaatggtgactggagaagtgggaaaaaccagtgatgtatggaaggtacggaaatggaaaaggcgcatgggggagagcaattggcgggttcaggagttagtgcagaaaaagttggtaagtcccaaaggtgtttcatacaaaaggaacatgttgggataagccaaacacttggaaagccaatgtcatatttattagaaaaaggtgatcagaaaatgagtgggaaaggggaaggcacagaagtagtggtgagtcagcaagaagtaggggtgagcatagaatccagaaaactgaaaaaaccgctcaaatcgatctactgaacaccgttagaactgaaaccgacgaaaccgaaaaccgaaaaaaccgctaacggttaaaacggccattaaacggtcagttttttttttgataataaaccgaccgaaaaaatc

SEQ ID NO: 298962 - DNA, 5893 bp, Cannabis indica
atatcaacttgttgaatgtcccagttgtaagtgacaacaagggtaaacattattctaagtgtggagggtttcaccacaggactaaaagtgtcaaaatagtctactccaggtgtttgttgaaacccttttgcaacaagatgagcttttaacctttccaaagtaccatctgccttgtgctttttcttataacccattttttttatcaagaacattcatatcagaattgtagggacataagaacccaagtcttgttcttaattagagctttgtattctgtagtcatggcattgttccattggggatctgcaagagccttttttatagattttggctcaatcaaaaattggttagtactagtaacattagcagccagaaccttaggtttatgaatacctgactttgaccttgttagcattggatgaagagagggagggccatggggcagttgtttgttactggtagaaaaggcagtgagtgtgggatggtttgctcagtttaagatgggggttgtgctatgtttgtggtgagttgttgcataggagatgtaataggtgtttgttgtggaggtggagagatatctatggacctaattgggttagattgtgggggagaaatatggggacaagtgggtacggtggtgataggtgcaggcagctgggggaaaggaatagcagtaggctgagtaaatgttttgggagcaggtgctggactagaaaacagagaggagtaagggaaaatattttcatcaaatgtgactttcctagctatgtatactcttcctgaaggatggagacatctatagcctttgtgggaagggctgtaaccaagaaagacacacatggaagttttataaatgaatttatgtttgctgtacagactgagaaaagggaagcaagcacagccaaaaacttttaaaaaagtgtaattaggtgttctatcaagcaaactttcaaatggggagatgtatttattcttttgagcagacagcctattgatgagaaaagtggcagagacaaaggcatcccaccaatgattaagaggcattttggcttgagcaagaagggtgagtcctatttcagtaatgtgtctatgtttactttcagctcttccttgttgttggtgagtgtgaggacagagatgtttaaacactatgccaagttgagcaaggatggtagctaagggtctatattcaccccccaattttattgaatacttttaattttggtggagaaatttctttcaacataagcattgtgtaaaaatgtggctatggtgtcagatttagtttttaaaggaaaaatccatgtttattttgtaaaatcatatataaaacatatgtagcatttgaaatcttcactggtagggtaaggggaaggaccccataaatccatgtgaattatatcaaaaggggcagtaattttgtgtagtgaagataagaaataaaattgatgtaatttgccatattggcaagcatgacaaacatttatttgtgaggaagatatattcaaagagttcaacactttattcataacatattgagaagggtggcccaatctttggtgccacaaggttacaagagagctagtcttattacaagaattatttctagtgtgatagacagcaggaggagtggcacggttttgacactggtaagttgaggaaattggattagtagccaaagtctttgagtctttaggagcaataaaggtggatagccgataaagaccatcttagttgttccctgaagaagaggggtcttagattgattgtccttaacacaacaacaatcagatttaaattcaacagtaacatcattatcatgagtgaatttagagatgctaataagattcttttgaatggaaggaacatgtaagatatttttgagataaaggggttttctagctgctaaaaaactagaaccaacttttttaattaagagagatgagccattacctaaaatcaatttctctttacctttgtatgatgcttgctattgcaggtttgaagtatctggtgtcacatggttcgaagctccactatcgaaataccatgcagtgtcatcttgtgaggactgggcagcaacatgtgcttgagggttggagttggaagatgagatattggggttggagtcatctggtccattaaagctgatgtcaaatcttctataacacttttgcacgatgtgtccagttcttccacacaattgatagatgacacaattttgagtataagaacctctgccatcattattgccacgaccaccattcaagttccttcctctgcctctatatccattcaaagcaccacgagtgccattggagttaggaatggatggtttcttagattgagcaaagttggcagaagctcttgacaagtctgccatgcgtgtcacattattggcttgaatatgcatttcatgattctgaagtaagaactgaacttcttgaaatgtgatgttatctctggatgtgagattgccaactactacttcataatcaatgccaagaccagcaagaacataaagaatcaattgttcctcagtgatttgatttccaactgcatgaaaactttctacaaggttcttcaacttgaggaggtactcatcaatagccagagaacctttcttggtgttctggagttgattcatcaagtgaatcatacgagctcaagaggcagtgccaaaaagaagctcaagtactctccatatgtcatgagcagattcacagttcacgacatatcccaacgtgtattcagaaatagaagataagaaccaggatagtagaaattgatcaagtcgatgccaacgagtgaattcaggattactaaccatggttgttgactcagggggttgacaaatccgtggttgaggagggttgcgattcaggagaatgccttcaagatcatgagcacgaattgctgaaagaacttgtgaatgccagaacaaatatttgttcctgtcaaggcgaagacgaggaagaaacatggtggtgggaactccatagttgtttgacaaagcaccttcaccaaaggaagtccccatgaacgaaccaagagtctactgatcccaacttgagggttgtggcagaaagaattatagagagaaaagaagagaatctgaatttgttattactgaattgaattattacaaagctaaagaaagagtatatatacacaaaaataacagaccgacttaactaaagaaggaaaagaaagtgtaactaacttttaacaaacttaactaacaactataactaattatttaacaatctcttcaatagatatagttataaaaatgcatatatatatatataaatatatatatatgcattttgttaattaaagagttattaattaacaggtctttatagtgaagatgaacttaaacatgctctcttttcaatccgaaatgataaggttcttggccacaagggtttagtaatggcttcttcaaataaatttaggaaactataggtgatcacttcacaaacgttgaaatttatttatgaattcgggcaaatttctcaaagagatgaatgcaataactttgactctcattcctaaagtgaagtgcgttagcgattttagacccattgtttattgccagggatggacccatgtaatcccccacaaagtaaaaattttgagtccattattgcttattggaatgtgatttataaagtcatcaccaaagttcattgtattcaattgagacaggtgcttcctagtttgattgtgtcaaatcaatgaggttttgtgcatgaaaggtatataggacacaatattttaatttgctaaaatcttgtgaagcagttccaaggaaaaataataggtcattttgtatgaccaagatggatttgcgaaaaccttacgatacagtggaatggagtttcattaaagaaatgttgactgctctgaactttcctctatagtttatcaacttagtgatggagtgtgttaccactacaaaattctcgttgatggtgaatggtacattacattggtactttcattctaaaaatggacttagataaggtgatctgattttaccgttgttaattattttgggaatggaatacctttcctaattttttactgaagtctctcaaatgaaggagtttaagcatcatcctaggtgtgctctttgaaaattaatcacttatattttgctgataatctcttactattttctagtggagatgtataatcaattttgttgttgttgttgagagctttttaaaaggttttccaaaacctttgatcttcatgctaacaagaataaaacatcaatattctgctctgggataaatgctacagatatgagaagttcatattgcagtgctcaaattttaccaaaagcactctctccttcagatatctgggtattctcacctatttaaaaaaaaaaaaaaaagtctaaggtcgattctgataatatcttaaagaagatggtaaataaaattcgagtttgaagtacgagaaatgtatcctatgcaaagagatgtatgctcataaattttaccttaatttcattccattactattgggatcaattgatgatattaccgaaatatatcatggataaaatgaataagatttttagggatttttgatggaaaagaacctatgattctggtgctccaaggttggttgctcggaaccaggtgtgctctcctaagagtgtaggaggtttggctttcacaatataaagcattagaattttggtgctcttgaaaaatatgtttgggatatagtcactgacaaagagagcctttgggttaagtgggttcactcaatatatatcaaataggacaatatttttctgatctttgtatcgaactttggctagttccaaacgccaaagatttggtatgattttacttggaacaggtttattgctccaaaacataaatttattacttggttagcttgtttataagctgcaaactaagcatagacttgtgatatttggtgttattgttgataataggtgttgtttgtgtgagaatgttggttaatcttaccaacaccgattttctcggtgttgctatacaaccaagaaattcttactgccataaaaagaagtggacatgtttgagtttaagacaagagactttagaggctttcttaaagagcatcgagaagaggaaaatctctaagttcaggcgggttgtgatggtagctattttgattgctataatttatttcatttaagaagctagaaatatttgtttatgagaacaaaaagtgtatgttgtaaataatatagttaggagaattaaagagagtttttaataggttttctcgttttaaaagagagaaaacaagagtagatgacaaatgatggtttgaggcattgagcacttgtattgtaattctctgctagtagttgtgtgtaaatagttgttttggacaataaaattcactcatttctacaaaaaaaaaaaaattattattaaacgagtcacaaaattaattaaaaatcatagaaaaatttaaaaataaattctaatagtattggaaaaataatcgtcgaaactctccctcactctccagtagccacaagtgggctttgtcccagtaacccttcttcagcctctagttgctagggctgaacatcgggcgggtttaccgggtttcgggttggcgggtttcgggttcacgggtttcgggttcaaaaaattgaaaccgaacccggacccgaatagggcatgggttggcgggttggcgggttggcgggtcacgggttggcgggtttcggttggtcgggtttagcgggttggcgggttgacccggtcaactcagtcaactcggtcaactctttaaaaaaaattaattttttattcaaataattattttttattttttatttattaaattaagcatatataatata

SEQ ID NO: 298963 - DNA, 2153 bp, Cannabis indica
acttaattagtagtctaaaatattttgtttccttttaaaattataagtttcttttttattgattttaaaaaatattatatttttctctaaataaagatctaaaatattttttatacctactaaattttaaggtcaaccttatagaatttttgttgagttttatcttatgcaactaacaaaatcttgatatggctaatgcattattgcgatataattgccatatgtataatttaaataaaaattgattttaaatttatgtttttttttttcaacaattaataagaaaattttcaaatatataattttatttattaagttagtaaaataaaaattaaatattaaattgcacatgagaatgaaaaatcaatcatattaatattttgttagacatataagatacaacttcacaaatattctagtactgtaaataatttgaagagaattttcaatgagcatatatacaaaaattaaaaggcacaatttgatatttataataattccaacaataaaaatcctaataataactaaaagcttatattaaaatcaatcatgttgctttaatttcaaaacatttccccaataaaatcacaaattaagaagggagctatatatatataaatatatatatatataaatatttaagaaaatacttaaggtgtacaattctttttagtcaattatttttttttatattatagtaaaaattataaactaaaaactctaaaattaagtggatttgaaatcctcattgtttatatataaggacaatccaaatatattttataaaatttcaaatgacttaaaatgttaaaattaaaattcaaacaatatattatacataaatttttttcaattattatttttttatatatataaaatatataaatatttttttatatatataaaagggaaattatttcatatattattttttaaatttacggtttgagttgtttcgatagttttttaagtaatttttatgtgaattactatacggattttgattgcgatttatgttgttctgttagttgctataggaattttttgtgtgtaattctataaaaataataaataataaaaaaaaactattttaaagtataaaaataaaacacccctatacaataaccctaatatttttataaacacaatcttaacttatatgacaatttatatatatttgccaacacataaagttgctgctgagctatatccttcccattgccagcatatatataaagacaacaaatttcattatatataaatacaccatctaccaaactcaatcaacaacaatcaatatatatatatattctagacatatatacataaaaatatgagaggtatagtagtagtgatgatatttgttttggttttggtatcaattaacacaaagagtactagtttggtaaatggtaacttgtttgaagaatttgagttgacatggggtggccaaagagccaaaatagtggaaggaggcaaagttctcacactctctcttgactctatttctggctcaggtttcacttccaaaagacaatacttgtttggtaggattgatatgcaacttaagctcgtcgccggtaactccgccggtaccgtcaccgcctactatgtatgtcatcactcactacactctctctatactcaattactatattagagaatctctctctatatatatatagtaattatggatttaaataatttaaaatagttagttgcacgtgtataaaaaaaatacgtaatattatttaaattttatttttagtattgtaaattactcaggagtaaaatgccatcgtcacaggttataaaagtagagatactaatatcgcagcataacactgctaattttaccaaaaatatataattttatatatatatatatatcaattttttataccttatttaaaagattattttttagtatatatagttattaggcatcatgatctaatgacactaataagttaactccctataaataattagtgattctctataattattattttaaaaaataagtagtacatgatattaaattatattaactttcataagttaaggcgaactattaattaggacttatctattttaagggtccaaataaaaaaaaaagagttaatttcacaaatgcacaaaaacaacaaaaa

SEQ ID NO: 298964 - DNA, 1454 bp, Cannabis indica
tgcactatcttagaggcaatgtttttgctagaaaagttaaatttatatatctttaaaattataccaataaacttactttcttgtgttattgttataaaaagatactagatcagaacacataaggaccaactaaaactcttctataaagctgtatcaataaactggcactagccgcactaccctcaatctaggagagtacacagttaattgattcaagaggatctcctccacaaaaaaccaatccaaaactgttctagactaattgtctccttaacaacatctattgccccaaatgtatctatacaattaatcaaatgtatttaaactcaaccaactaactgtaaaaacaactacccatacggctatctcttatgtacagatcacttatcatggtatatttgtttcaatggtcatgtacaatggagctaaaaaagtcagaaaaaactagtccccttgagccatctgaatgctagttggtatgtcaccaaacggatgttttccatttcaatgaacaaaatcaaaactctctagtacacatctattcccttcctaactcaacacgcgtaagtaactccaatccttcatctataaattataaataagaaaactgcacaagaacgcaagggtgtcttcttagtttcaacaacaaacctcctactcactattcactaagaatctgaaaataaaaaacaaaatctttcacaatcttaaaacccaaaggccataacaatttatactttctgctatttattaacatcatatgaccataaaatagccaagatagcaacacccatcatctcgaacttcttactaagatacccatcacacaagaattacttgacgaagttcaaaggttgaattttggtacaagtgactgtaagtaggcaacagacaaaacccttaattacataactagaaaccgaaaaatgaacagatacactatccaccattatttgaaggaagtttcaactaagaatataacaattgaagcgtatatggaaaagaaagaaaaaacaaaatgacatgaaatcaaacaatgtatgaaggtaaaagaggaacaaaggatacggagttctggagtgcttatctcgagaattgatggacaacggatcagcagcgagtattgactgaacagcgcttaggtcgcccgacctcgccgccgagtggagctcttcccccttcttgctcatcttactttcccagttcttccccgccttttttttgggatgttgctgaaattgaatagtactgaaaataaaaataacagcatctgtgtatatggaaccggatattcattacgctaatgacattattactaataagtaatgagaataaagtgaggtaatcattccttatatatatatatatatatatactagcaaaactacgtgcgaggcacgtatactaaattttatgcttagtttttttcctatgtcatttgaaagtgatacaat

SEQ ID NO: 298965 - DNA, 2371 bp, Cannabis indica
ctagcctcaagtggttaacatgcacatcgtagtaagtattatattgtattatattacatgatattatattaaattgtattatatatattatatttttatatagtacatatacatatgcacatacaatattttatgaaataaattaaaattttatataatataataaaaaaagtatgatacaatacaatttaattatatagtaatatcaataagatatgatctaataaatatttatataataaccgataagtaattcacttcatgttactaatagaatctaacagtaaaaatgttaatataattatataaactacagtagtgtacgtttttatatatcaatatcatatatatagttacagcagaagaagacatgtagatgtataggacttgtaaattataatggaaccgttcgtgtgtgttatatcgtttgtttcgttggtgccaattccataaaagttgtattattagcccaaaatctcatgcgacggctcattcactcattttatacattaaataatgtagagaggatatatgtcttgatgagatgaaaatgaaaatgatataacatctatagatatattttttataatatataactatggtagtaaacaagctaatgtcatttcacgagtgaaaatgatattaagaaccaaaattaaattttgaaaaagaaaacaaattaaagtatatatcaataatcagaggtcaatattatacatacagtgacatgtcaatcgagcgcatcggtttcaacaccatatgttatgtgtaaagtgaaatttgatgatatatgtctgttatgagttagggtaattaattaacattgtttaagagaataattatcatttattaattatatattttatgtaggtgcaatgggagatggatttatagcaagagacataacatttgtgaatagtgctggaccaggaaaacaccaggccgtggccctacgcgtgggttcagacaggtcagtggtgtttcgatgctctgttgtcggctatcaagatactctatacacccactccaaacgacaattctacagagacacagatatttatggcactgttgatttcatctttggaaattctgctgtcgttttccaaagctgcaacatttccccaagaaagccttcttctagtgggcttagaaactttatcacagcccaaggtcggtccagcccagatcagaacactggcatttccatccacaattgtaggatatcagctgcctctgacctggctcctgtcaagtccagctaccaaacatttttgggacgtccatggaagcagtactctcgaactgttattatgcagtcgtttttggatgattcaataaacccatcgggctggtcaccttggtcagggggatttgggctcaagactctcttctatgctgagtacatgaatacaggcccaggggcctcaactggacgaagggtaagttgggcccatgcctcactcacggcccctgaagctaattcctttacggttgctggtttcatcgctggaaatgcttggttgccttctacaggagtatcttttgattctggcttggttggataaatagaagtattattatgatctacaatcgatcgatcccactggaatttcgtcacaaccactaatgtttatacatgtacgtgtttgtttttcggtttgattttcagcaaaatgccaaatgtataaattaaaagcttcgttactatttcgaaaataagtatttgcttctaagtgaagcaccaacactttgatgttttgtgtaaagaatgttgttgacggttacaatatcataaataaatgtaattacaatgtaaattactcaactgtttagtattctttttaataaatagcaaacttgtaattcaaacaatcatgaaataacaaaaatgaaatcttgataaaaacatagcatagaaataagaatctcgtgcaagagtatgagtaattttatttgtagactgtttaagaaaagacacaaccacattgtttaaaataataaaagacttataccgtcatttataattaatccatatgaaagaaaacattaaggtattgcttgtcaaagccaagactaaagtaagtgaattagtatccaccaccaccactttgacccacgccttttgtttgattcaactcagagccttgctttttaatccgtagagcttcaataacctcccctgatgcatctcttgctactattgcagcaccatagaaaccttcattagagaataatatcgcatccatgttaactttgatcttagtatcacttagcttgactcaattattgctccacgccatcatcattttgtaacccaaactgaaaaggtaaaattctccatgacgaaaaatatataataataagaaaaaaa

SEQ ID NO: 298966 - DNA, 7449 bp, Cannabis indica
attttttattttttttatatttttatattttactagacctcaatgattcactaaagtagaacctaaaaaaattgtatttttgtatgtgtacaataaatttctataataacaaaaaagaaaaatacaattataaagatctccaataacaaattagaaatttgttaatgcataacacatatttatggtaataaaacagaaataataataagaatataaacacttgatacaagagaattatatgtaagtatcagtgttcttttaaatacttctagtctacagggtcacgctcaaagaatgaaatcaattaataaagtcttaaacaattataaacgcaattaacttaaataagtttagaattcctctaaaattttatcgtaatcttttgtaatttattttgtcaatctaatttctaaataccactaaatagtaaattttttttatcttttgatgtgtgagtacttgcttacttcctcccttggacaaatctttatctaaaaattattttctaattcaattaagctcttcaccttattataagaagagtataagaataacaaaacaaagactaaaacttagtagaacactctaaattttcacaaaataaactctctcatcacaaaaataaaaatataaaaaatgaaactagaagagttgagagtgtttggctgttctctaaatcttatttataacataaagttttaacatcataacatataatactaatttattatattaaattcataactacaaaccgtgacgcacatccagtttaaaaaaatacaaacagcaaaatatttcaaaccgtattttttatacaatataatatcttagagtgcgagcaatttgtacagtgtgagcagtttgacaaactaattaatagttttgaggcatcatccataaaatttaggcattttttcaaaataataataataacaataaagaagttgaagaagaagaaagatgttgaaattggaaacgcaatcgcaaaattctgattcgtaaaacaaaaccccctttttcatgctcaactagctccaaaccaaaccaaatgccttcctctgagatcgagattgaggtcatttcatcggaatccaagtcccaatctcctcctcctcctaacgaagtcaacatcttcgacgttttctccgcttccgcttatggtgatttcaacaaattacgaatcttcgttgaggaagatgcttcttctctcactaagcccgataacaatggctattacgcccttcagtgggctgctctcaataattttccccatattgctcattacatcattgaggtatttattctttttcacttccattttttatggacttagttgaattatagtaattgtgacgaaatttgaatattggtttaggttttttttttattattagttgaagtttctcaattttaggtgaattgtactgttcatgaggtagatgtaaagatttgactatggttgagcttgttgtgattggtgaaattagaatttttgtgtttggttttaatgtcttctagtttagttacactgatttttgatgaacctgtagagcttcataaggaaaaaaaaaggtttttttttacaatcgcagacctcgtttactcatgaaatcaggaattaaaacacccttaaatttgttgatagtaaaatcaaataatcaaagagaaacccagaaatttatttatgtttcataagttgtctaaataattctcatgctccttctaaccaaatgtggttcaatatgtagccaaaacagctaccttaaacatttcccggttttattaatgtgtaagctttgtctcattcccagaaactaatgcaactttaagggacaatactcttcacactgaattctcgaaaacttggaacctctgttttaatgaaaaactgcaatgcataagtgatctgcagaccattcaaatcaaagacaccatctgggcatccaggtggaagagcctagaaaggctttcttataaccatatcacatatataagcttcgtggcaggacactcctgtgtcgatttattaatgtaactatacattctcatcctttccaaaccacacatgtatagatttatgaatgttactacacgttcacactttttccaaaccaacagtttctgcattttacttaattcaagttttgcacaaaatgacctggggaaaagaaaaagaaaaaaaaatttgcacaaaatgaaaattccttactatgttatctccatccaacagctctaaatctcgttacaatctgatgtaggtctgtttttgttagaatagtcttggctataatagaaacggatactgcctaaggcacctcacgcactgaaatatcttttcttccccaaaactaagtctcctcccaatccttagaaaattttgtgaaatctttttcccaaattgtacagttgctgtttcggactttcctgggatgggagtccttcatgtgaccctactactttaaatgaccttgtgccagaaagaatttctctgcaaaggaaatttctagaaaactttaatgaaagtgttcataaaaggataacttttgtatatctttatttgtttgatttggaattggttagctgaagttgcattttgtatttcttgtcttttgattaatgttcttaaagcatggaggcgatgtcaatgcagctgataacgtgcaacaaacagcattgcattgggcagcagtgcgaggtgggattgctgtggcagatgtgctcttgcagaatggtgcccgggttgaggcctctgatttaaatggttaccgggtaatcatttaatttgactctctgtgtgtgtgagtgtgtgagtcgtcatgtgaaaaccgtgttcatagccagtgtaacatggttataattttattttatgtgatttggaaatgtgtgattgagtggtacctaaagctattatgtaaaccagatttttgtgcatgctgcaggcagttcatgttgctgctcaatatggacaaacagctttcttgaatcatattgttgccaagtatcatgctgatttcgatgcaccagataacgaggggagaagtcctcttcattggtatataaaaaaatagtgtgaatgtgtgtattattgcttttaaattgatatattatagttatttattttttagcttcttaagtaatcttctgaatttgaagaaactttagtggataaattttgaaatgtggttctttgtttttagtcttttgataagtcatagatgcaccaacttattctatctctagagttttgatcaaagttgtcttatgaaaaggtataaaattatttttgatttttcacagttcatgttttgatggtatccggacattgtgaatgcatctcctgtactttagttgtttataagatgtatcgtagattcacctagtctcaagaacaatgaaattttgcatattgactatgctttcagtttctctgttaatacttgaaaagcaatccactctgaactttgtaacggataaatttccctgcatttgtctgaaaagggtattttgcagaatctttagaacatcagatatatatctttcggaaaatctgatacttttaccatgttgaattacctctccatagaatgacatttaagttagttgacggttagtaatgactactcctgaaactggtttcttgtcttttttttaggaaaggaacttgttttatgttttaaagggtgtgtaatgtatatttgttatcaaattctacaaaatatggcatgctgtttctatatgccttttaaaaaacaaataactattcatgtttaagaaattaggaagtgaggtgatggaattttctaagtattaaaataattacttaagcttgttgttaccaaaattgactcctatgactattttaattagggctgcttataagggatttgcagatactattcgattacttttgtttagagatgcatcccaagcgagaaaagataaagaaggtatacttgggagaatttggaacttttcatagttatttttcttcgcgagaataatgtgaagattttgatattttatgcccttaggttgtactccattgcactgggctgcaatgagaggtcatgtggaagcttgcactgtgcttgtacatgcgggcaccaagcaggagttaatggtgaaagataatgctgggtttactccagttcagcttgcatctgataaaggtcatcggagtatcgctcttgtacttgtatgtaattttgtattgaagtagcttctaatagcatttttatctcgggggtggaagagttggtatttttcgtatgcatgtgtgcgcaatgaatcttaatattgactaatggtttttggacagctgagtatcttatgaaagctgtgctaagataggattatttgacggatattgctgatcgtaacctattttcctgttcattatggttcatatcctttcttcaataatgcttgcagctatgtatgtgggcacacgtctcttttcctgctattttacactactagaacagatgacagtttttacttatgctttcctttatgttcttaaaaatattggtattttgcttttgtgggattataaagctggagttacttatttaagatatttgagaggtatttttcaacttaaggaatgaaacttttacactatgtttggtagggtgaaagggaataaagaggttggagaatataaggaagagagaggagagtaattatccctttaaattgcttggtaagagagatggagaatcggaaggataaattactcttgtataaaattattatattactcttataattcttttttaggagggtatagttgtaataaataattaagaatggagagtgaatcattccatcaatggaaggattctaaatggtaaattgggaaggatttgcgattctcccacctctcctctttctctcacagtctctcttgccaaatgagagaagataaactctcgtactatcactcttcctcttctcttttccatccaccataatggccaattatatcctttaatttttaagttttgtaaatgtagttttcttgtatatactatgcttagttttgtcatgcttcttcttaaatggaatcagttaaaaagaatttttcatttttttcatctgcagtctaatgcacagcgtgctaatagcaagagttggagagacagatttattagtgggaagattcttactaatgggtatgcccctattttattgtgtataataattggtcccctgattctcttcatgaattcagttcttgcaggtaatgaaattacagcttttctggttttcttttaaataaagaatgggtggtttttctttactaatcacggtgactaaatttgaactactgttagctcctaatatgacgaaagttaccgctgttgttggcctctgggggtggactgcggtttctctggcaattggctcattgataatgttctataggtgtagtaggtaaggccttgccttaaatactttttctgttgttacttggttgggtttcttccaatggaatgaaaatagatgcctctcctggatacaatcgtttgaatgtctgaacagaattttgctaggcaatcacatttcccaaaatttctcaagtctgattgcttcttttctttattcctttacatttttcccttttcttgcaagcccaaaagaggacacagtacaagttctttattctttcaactcggtattgttcaaggctttttggctaggcaaaagagggcagcggtccctattctctccctgaatctctccattctttgtgtagtggatttttccttgtatttgtataagatctttttattagcatgcaatcagtcatattttttactatgataaagtcaaaataatagcccgctatcatattcctaccagaatagttctatattggtttttgattgtgattacctaagctctactttaatgacattcttttcttatttcgtgcagtaaagatccaggttatataaaaagaccaggggactcgggtttctctgtcgacacagaggtagtttgttcatttcggtatctcttggtttctttacacaaaatttgttacattaacatcttctacggcctcatggttcacatatggagtagagaataaacaccgatttgataatgaatagcaatggtcggctaagttgtgttggtttttccttttccttgtggaacaacttggttaaatgtgatggatttaacattgcaggatctactattgaaaattgatcataactgctcttccgaatggactggaaattggtctcaactttgtccgacctgcaaggtttgcttgttgaattctctttaagatgaatcgaaggacaatgattatatcttcttgattcatactgctgttgagaagctgcttgaattagtttcaaatttgttcccattttattttgtctcagataattagacctgttcgtgctaagcactgtcctacatgtaaccgatgtgtagaacagttcgaccatcattgtccatggatttctaactgtgtggggaaggtaaattttttctttttgtttggattctttagtgtaagaaaatgtaaattcttatgcaattaagatattgcggttcaggcgtggatgcatttgtttttgctcaatgaagctttcttttattaatattgcagaggaacaagcgagatttcttcatatttatctgcatgggaacaatgacggcattgatttctgccgtagtttctgttcaaagtatgttgttgtacttgtaccgaactaatccgtcttgaaatgacctttatgcttttgtatagataagactgcatttcgggctaactaaacaacactaatgattctgttttgatagggatttggatagcgataccatcattgcaaggcgaagagagttggattcatttcgtgctagttcactatcccggcgcagttgcgtttttggcgatggatttcattgtttgtattgtcgtgacaacactgaccatagcgcaggcttctcaggtatgtatcgggaacattactagacaactctattctttcgatattcaacttattttcatgaagctttaaatttttatggagtagatagctcgaaacatcacaacaaacgaattagcaaatgccattcggtatggatatctccgcgggccagatgggaagttccgtaacccctacaatcatggttttcggaaaaactgtggagattttctcatcaagggttacacagatgatgagaaaattgcttggcctccattgcagcaagttgcaagttagtagaaccggtctggtcggttggccgaccggccggtatgtgtaaccctaatttgtaggggtgatattttttttcttctttccttgtttatggatgggatgagatcatgtaaaagataccaagtcctttgttgtatgtacatacaaaaacaattcaaataaccaaacaagaaataaaattatgtggatgtccaaatctttt

SEQ ID NO: 298967 - DNA, 3458 bp, Cannabis indica
cttctagaacaaagagacaaaattgaaacttcaccaccaacatatccataaaaagacaatcccgaattcaccatcttaaactagaagagaaaaaaaaaaaaagaaatcgtagcataatagaataaagaatgtttattgaagaaaaataagcataataaccatcaattatgtgagagatgctattctccttgccaatgaaattattttttatctacttttctcagctgctttttgtctttggaagtgttccaaacactctgtcccatacagatgaagttatgccgaaacccttgttctgaatacggaagtgatgattcaagtggtatttctgagagggaagaaaaacagaacatgtttacatatgaaatagtattatatgctatactagtttctaaatagtgattaggactaaatttgccattccgaaatgtttgattttctcaccttaagatgtcgaagcgagtcctttgatggctggccatggtgaaggtagtaatgggtaacatcataaatcacataacccaataaaccaccaccaaacaaagcaggagtagtagaaggtgtagcaaaaagcttaaccatgttccagaactgccaggataagaatgtaaattttgattttgatttcccatgttacaatcaaattctatatgagctctataagtggaatgatatcctaatgatattcctagtaattaagtaccacaaccatttgtaacagaacccatggtgctttgtcactttaaattaataagaaaaatctatccaaatttaaagaaataaaattcataaagaactgttcctttctagccacaagaaaaggcaccagattcagaaacaaaagatgaagaaacaaggggataaatacatactggcgtcaacagaacagcagtcgcagctggaggaaaaacaagacgcaacccatccatgggatgcttatgatgacagccatggagaagataatgtacagtgtttcccctgtatgcaatcatgacaaaagttggtacatcgaaaacagtttcaaaatcaaacaaataaacttgagcatagagaaaaggagagcatcactaaccagtagctctttgtttcgatgtggaaaaggaaacgatgcaatgtgtattcaagcaacgtccatatgaatatacctaatcccaccatgagagctatctcaggaaatgtgtggcccattagtacggatttggagatgaaatagcagacaactgggagccagataagaggaattacccaccaggccgtcttggtcaagaactataatacaaagaaatggtcagaatacactctcaaacaatggatgaatttagccagccagataagaggaatatcataaatactactacgttcaaacagtgataacagcgatatatagtacctacctcccagaaatcactttcgaaaaaccgaggaccttccttggtcggaataggctggtgcacccattcttgataagcatctccaagatgaccaacctatgagaaaagttggtgcaatttaattacagtaaattagccagaagatagtttctgggactaatctgtatccatacagattgaaataggtaaagacattcaagaggatgagagatataagagtgttcatagttatactaataatgacaaataagaaaaaacccttatatctaaaggcatactgctgaaataattacacataaaaaccgatttttgcaacctattttgttcggaaattaatataaataaatgtcaatgtgacattacctgaaatacaagaggtttattcaaatcaacggtaaactcctgagcaaccatgtttatatataggatctacagtcctgctgaaaaagaaaaacaaaatagatgagaaaattataaacaataataataagtttagagctacaatgtttcaacaagggttaggcttgttaatgctaaaaactcatacttgtaaaagcattatcttaataatatcttcttctttccacacacaaaaacataattgtacatgtaaatcatgaatttaattaaataaacagaaaagtctcatgttagaggagaaaacccaatatatatttatacacacgcacgtctataaaacatatagatatccattgtatatttgtactcattaatgttgcttctaagagaaggaattaaaaaagtctactacgcaattgggttctggattctagttccactaagagacttttttatacgtaattggccccacatgaaaaggaaatccaaaaatatcagccattatcaaatcgaccaccgaccgggaaattcagcataatcacataaaaatgcttataaccattactttatggctatcaaatttcaacaagtaaagggagaagacaataaaaaacagaaagaaatacaaaaacttatataaaaaagaaaagaaaaaaatgaacgaatgaaagaaaagaatattctgaaaaatggcatcattagatctttaagggttttaataaacaacataataaaatggtatttgaaagcgaccattttgctagataacgcaaactttcatgggaagaaattattctaagcaaatatcttttttacccgaacaaaaaaaattcgcatcaaccaagcaaatcccacctcaaaaaaccaaaagtaatatccaaacaaaacacacacacatccataattttcaagaaaagagaatcataaacaagtataaccccagatctgggaatgaaacaatgagcgttcaagactcaaaagcaggaagaggaacaaagaactaacccgacaaaaatgcgggtatccaacaaatgactttttcttttctatctccaaaacgaaatttctccttctagacaaattaggaagctagcgccagcaatgagaaaagggaagggtctgacttcagcgtttagcggtctacggcttcggtgttgggctctatgagaaagagcagtggcagtggtggaggagaatgagagaccctctctctctctttctctctctaaaactctccttgtcacattcttttttctgaatctctgtagcaaacgacaatataaggtcacagagaaatctggaccgttgattgttgtatgggcacaaagaatcaaccagcagatcctcgcgttggattctctggatgatgccagactggccttctttgatcacagctagtcaaaaaccgacgtgggggttttataccctgcgtcaccattactaagaaaaagacaaaccgttagtgacgtggcaatacatgattagataaattttcaaaagacattggggagcgagagagagagtttcttcgttgcgtttgcgtgtagataggactcacccaactcccagtcaaacctttttttttttgaattaatttatatattatttttttttattttttttttaaatttacgggtttttaaagtgtttgcaacgctagttataataggaggttatgtacgattttttattacaatttaagttgca

SEQ ID NO: 298968 - DNA, 3386 bp, Cannabis indica
cacagttgaagagggcttaaatggattgattggtactacctatatcaacaaggtgcatcttgtttttcagtagcccatctcgaaagaactccacagttaagcgtgcttggcctggagcaatttcaaggatgggtgacctcctgggaagttttcctaggaagcgtgtgagtgaggacaaagcacgctggaaacactcgtgttggtctgtagggtcagtcgtcattccaggaagcagccaaagtggcgtactcgtgtataagagccaattattccgtgggtgtaagggcccaatgaaggcttgaagcggggacgttacatatatattatatattcatagtgtatacttctctacattgtaatttgcatctctcttcataaatattcatttttaaccaatgatcgtgcaccgtatcctaataggacaaatacacaaactttattgtcttgcatgaatttatactaggtatcaatccaactttgagatttaaaactttcgtggtattataaaagttgattagatccttctattatatttttttattatattatttctctcacaaaatctttgaggttatagaatttgattatttgaaatatttactatatcttgattttagattcacatcttaatcaatgaaagacataataaaacctaagcaattgtcaaaaatgattataaacattgagtataatgtcaattctttttcaaacaaataatatctctaataattttatttctccctcaaactcaacaccctttaaattattgacttttttttgtctcaaaattaaaccttagtgtgagatcacaaaatttgtagccctttaattactaagagtatacaataaagtatagttccttactatattggagtccaaatttctttcatgttcttataggacattactttaattggacatccaaaaaagaaaaatatccttaggttagattattagtctaaccataccatatttcataaagaattttaactatacttgatcccttgtccaggattatgttacacgcttacgtggttttttttttttttttttaaatgagtttaatagagaagaatgactaatcatacttcttaccatatccttagctaaatgttcattatatctcttaaacaccattcgcgctaggtttgcctagcattttgtattagaagacgaaattatattcctttagtaattgtgcaaaacaatcttagacgttactcatctaattcatcatacctcctatgatagtgttaaccatcataattaattttgacgactataattttcttgctaagttgatttgtcaactatggttttgaaaatttataagaaataacgtaaggattgatgccttcacagataaaataagttccattagttgtctttaaagacaagatactattatattgatcatttcacgaaagcataaggagagatccattaaaatgacatgccaaaaatttattctttgtaaaaatttaattatacttccccttaacaacctagacaacactactatcactagtcaccactatacgacaacaacctgagcattgtcatcaccattaacatagtactcgccattctaccattgaagcacctttgaaagtactaatatctttttctttacgattcaaaatcgaatccaaaatttaaactcacaagaatatttcacttgtaacactaatttaaaggtttcaaacacatctataaatgatttatctttttcaggaaaaagttctcaacaaccaaacacccagagcaatagaaactctacaacggtggggagaaagatttattcaagaataacatccgctattaataagttttgaatacaagtaggattccctggccaccaaaccgtgcttttaacagtagacagagtaagtttggccaaagcatgagcaactccattacaagatctattacagtgcacaaaattaaccacatgaagtctattaccaaggtcaacaatatcatctaaaacaagacccaaagaggtgataataaaagtattattttttagtttaagcacaatattcaaacaatcatattcaactatatagttccatacccaagagagatgcattggactagcgccttgcgaatagcgaaagcttcagcaacatcaagaggaaagcaaccagccaaccatccacatactagcttgcagacgctataactatttccaggtgattatgaatcaccatacccaagccactacattttcccaaagaattgatagctgcatctgtattgactttgagataaccaaactaggggattccatttcggtaccatctgaagagggcatggacgaggttccatcccactagtagggacgtcaatcgtctcccctataaggtgatgcctttatcaaggtctgtttgtcgtgaaacgtccccagataatcacgggcccaatgcacagtaagcatgggattcagctcaatgttgttgtggaccattttattacgtctgaaccagatcctccacagagtcgccataaccaattcagtcaactcctttgaaatggggtcaataaccctgtgaatgaaatcaagaaaatccacacaacgaacaagaggatcccccaacacaaactcacaacatttcctgtaatgtaccaacgtagagcacccccaaagagcatgatgagtagttttatcttctaacccacacaaaggacaaagcccataagataatagaccatgacgtgcaaggttaattttagtggggatccaattatgtgacactttccaagcaaagagtttaatcttaggaggaagattaaggggccaaatatttttctaccaactagaagcgccaccagatggagaagctcgaggtgcagccaaagtgtgaaggctaagctaataaccactcttaacagaataccaacccgacttctcaaagttccaaattattttatctggcaaatcatgagaggaccaagggatagaaagaatagattcagcttcatgaggtaaaaagttggattgaattaactccttatcccaatcacctgaatctttccttaacactgataccttgctagaaccatcaatttgactaggcgcagataacactggaggcgtcacacaaggaatccagttgttgttgtggtaattgcaacacgcaagtatacacattatttgaacaagtattactcacaaagagtgaggttgatcccacgaggattgtagttaagtacgttaaaattaaacttttacttctatttggctgaataaaatttaagagaaattttaaactaggaaacaataagaataaaaatcatgaagcaagtaaatttataggcaaattaacaatgaataaaagttagggctttcgatttcaattgtatctactgattatggcctaata

SEQ ID NO: 298969 - DNA, 4551 bp, Cannabis indica
tctgctacaaccactgtaaggttcctgatactttatatatgttcatttcatatcgttttagaagttcatgtttaggatgttaataacatacttgtgagtaaatctagatcctggtaaaataattccaacacttggatatcgagaaaaaagtgtaaagggccaagatctctaatgacaaattgaggatcccatgatgataatatcgtccagatatatgagcagaataatgatagtagtagaagatcgatagatgaagagggacgtgtctgctttgaaagtaataaaaccccaagccaagagagttgtattcaacttaagaaaccatgcccaaggtgattgttttagaccataaagtgacttagacaacttgtaaacacgatgagggtggaggggatcaaaaaagccctcagtttgagccatgtaaactgtttcagtgagatcaccatgagaaaatgcattttggatgtcgagttgcttaatagtcaagtcataggagaccgccaaagatagaaccaagagagtggagttgggtttaataactgggcttaaagtctcattatagtcaagaccttgagtttggtgaaattttttagcaacaaggcatgccttgtagcgctccacagtaccatcagaatttagtttgatacggtacacccatttacattctattaccttgcaattaggaggaggtaggacaagaatcaaagtatgtttcttagaccaggcaatggtctcagtataaatggcagagttccactttggatcgacactagcttcccaaaaactagacggttcaataggaatacctgcaaccacactataaaacaaataaggtttgcgtatacccgatttagatctagtaatcatgggatgtaaattaaaattggcagtggcagtgtgtgggtcgggaaagtcaaccatcaatggaatagtgggatgtgataacgaagtggacgaagaactagtaaaagcggtagcaggggtcggcggtacagtaagaatagggggagattaaaactgagaataggaaggagtatgtgtaggggagaaaatagtaccttgagagggagattggtttgaaggttgagatatatgtggagtaggagagggaggtgtgatatgcggactaggacatggaggaggaataaagaagggtaatgagtgataacagattgaggtgtagtgggtggtggaaagataacagagggactagtgaagggaaaataagactcattgaaaataacatgacgagggacaaaaatgcgatcggaggatgggtgaagatagaggtaacccttgtgtcttctgctgtaacaaaggaaagtacatagcaaagatcgaaactcaagtttgtgactattgtaagggcaaagaaatgggaaacattcgcatccaaacactcaaagaagagaatagttaggaggcttatgatatagtagttgataggggctagaatagagaagagcacaagtagggagtcgattaattaagtaaatggttgtagagaaagcataaggcaaaaagtgtaaaggcatatgagaatgagctaagagactgagactagttttgatcacatgacgatttttgcattcaacatgaccattttgttgcggcatgtgagggcatgagagatcatgacgaatgtcgtgttgggtaaaaaatgtggaaagggtgtgctattcaccaccccagtcagtgcgaacagcttgaatgttgctttgaaattgagtggaaaccaaatttttaaaaatgagaaaggcttggaacgcttcatctttggtagtaagtaagtagaaccaagaaaaatgagtaaaatcatcaataaataataaaaattatttaacatcagtgataatcgtgactggggccggatcccaaatgtctgaatatattaatttaaatggcttagaagcccgagatatagaatttggaaagacaagtctatgagatttgcctaattgacaagcagtacaaaatgttaggctatctcttttcggaaaagaaaaattacaaaaagatgaaacacgagaaataatgtcttgagacggatgacccaggcgagaatgccaaacatcaataaaggatttggataaaaatagcagttgttatgggggacaccaagaagcaagcaaagaaggcgagactcaaacaatgccttggtcaagtaggcctttgaggaggattttgtggttgtctgtgtgtttgaaaatgaaataagtaggatgaaattcgacataggcattattatcaagacagagttgagaaacacttaatagattttcagacaagtaggagaatgataaatctgacaaagcttgagaaccggggaagtagaagatggtaaaaatacagaacccacatgagaaatagaagccaaattacctttgcccattgtaatttaatcagaaccatggtacgaagtggtagattccaagagattcaagttcggagtgaagtgatgggaaatgcccgagtccatataccaagttggatcatgaaccacattggagggtgaaggagttggtaacaggggagggttgtggggaggttattgctgggtgaaataggtattgaacaaataagatggttggtgtggttgatattgaagattggtgcgatagtagcaagaaggagttgtatgacccactctgaacatatttggcatttgggtggtcgagaaggtggtctaggggcagaagcaatctgaggggttgtgagtagggttggcgggggtggtgaaaggaagggtgagtggggtgggagttattcgagtaatttaggtaatttaggttggtgtaaggataatttttgttaagaggtttgggagaaaactaagaatttggagatggagtttttgtgcgctgtttagggaaaggtaagttggcaaagttggcttgaaaggagctgatggaggcgacttttgtttgtctttccaagcaagcttcatcgctcagaagaagagcatgaacttcctcaatcgttggtttgatgggacaagctaaaattggtgttgcaagcacattgtactatagacccaaaccatttagcaaatacactaaatgttcttggtaatagatcgattcaccaacaaacacatgggtattacacagagatttgagtttctggatataagcggacgctgagaggccttcctttttaagattctacagcatcgtccaaaagtcagagctccgagcaaaggaagcagcagtgtaggtgtgttctagagaaacctaaatttctgttgctgtggagtagttcacaatttatcccaacatagaattggagaaagaggcataaagccaactcatgaggagtctattgtatcgatgccacaccgtgaaatcagtgttaatttgggaggagttcaaatcgacaaactgaggcgggaagataatggtgtcgtcgatgtatccttcaagcccatttgtgataatgatattttccatttacattctccaaactaggtaatttgattcatcaagcttaactatgattgtttgattgagagaaggtatagttgagggtagcagaggagatgagagatgcagagggaaagaggaagaaggtgtagtagtggcggttgtgttattagggatatcttggtttgtgattatagggtttagattagggtttggtgtgtttacttcatcaatttgtggggtagaactcgtactcagtattaatgccatggagagcttgtcattgctatgataccatgacagaaggaaagcaaaaaaagattattttccttaggtgaattggtacaaagtacatgggttaaataaccctttgaataaaggaaaaacaattacaagacacatgtcttacagagagaagaccaaacaccataaacttaggaaaagcaaacaattaaaaaaactcaaattaattattggttaacattatgggaccacattcaatatttttagatctatccatatcccatcaaattacatatcagatgttagattttaccacccgatctaatctaattaattttagtcatctggttgatccaacatccataaatgttggattaaattgacttttctagtggatgtattttatgtatatgtacagcattttttcagatttatcaaatattttagacctggtatagttttaggattcatctaatgttttagattaagtaattccatccaattcaaaaaaaaaaagaataaaattttaatcttaatttttatatatacatatatataaatatatatatataacacttctaattgggtattacacattgatggttactaaaagagattaactataactattaattttaaaaatattaaaccattagattttgatccaatggcaaataatgaaagaaaaatttgagtttctatgcgagggatgactctgagtacatatggtcgactttaacgaataaattgaagaacataaataatatgattgaactagaacctaaccatctcaggattgagatcatttgatctaagatcaactaggtgatattgaattagatagatattacggtaagtttattatatcttatccaagtccaatatc

SEQ ID NO: 298970 - DNA, 8011 bp, Cannabis indica
aaaatttcatggtgtgagtatagggtgaaagtagatctttcatacgatgaatcattgattattatgatttttctattaaaatagtcacttgaagttaaggatcaaatcaccggttccttgaccgagaatttcacattttccacaatccatttcaccatttcactatcgacattgttctctgatatcacaatgcgagtttcaacatttattcctccaactgtctcaacaggttctttgatcccatttacttgagccacaattgagcggttgtccttttgggcatgaggctttaaggtctgcaagccttcaataccaacctgtaaagacttataatgtgagaccttaggtaaaatgtaatcaatgtgcattgtaacagaaacaaaacgattctggacctagcacgtcaatataagccaacataggcttcaaattaacaaattttcagcaacaaataaatgggctaatccaatttcaacaaatcatgacacatggtataaccatcatatatgcttgcttgatattctagcttccacatattctagaacagcataaatattttcttaagatatgcttctaaacaatcaagttgaatcaaccaaatttccaattaattaagaacttctaaactagagaatggtattaacaatcttataaacacctttaataaactctatcaagcatgcatgaaaacacttactgtaaccaattcaacaggatatttctttattccatgtgtactgccattcttctttggactactttttgcttttactcgtacattctggaaagttgtgtgccaacacctttcttctctgcctaaatgttcattatcagaaaaccaccaactttctgccatttctcgtgcgccttcaagagcaaataaccagtttttcaactctatagagacttccacatcatccggctttcccaagtgcaaaagagtgctttcttttccatctcccaaacttccatctagagaaaagtatgaaggttaataaaaaagaaaaagaaaaggactgaatgaaactatatgtaatagagagaaaagttaacttcatgactaagtacatgaaagatggtgacctatctgataaattcaaagtaaacccaaataatttctttcttaccgtcttccatatcatcaacaaaagatgatgttttgaaaatttttgacaacggtcctgcctttaagttatccaaccctttcgaaagcccttttccagggccaccatcagggctcagtattccaaagcgatgcaacagagcttcagcatagttcattcctccgcctaagcgaacacccgaaatacaagctgacacattcaaactatgacactctatgtccacttcattcaaaggaatgacattttcgatgttaatatccaaaaatggatcaacagaagcaatgccatttggtttctggtgttttggattatgtatccaaagaacagcttttagctgtggatacccagtcccacagatagaaagaccattttcattggaaattagtgcagtattattctgatgaaccaaattaccctcagtgtcaacacagtctacctcaacattatcccagcgcaaaatggatgaaacagcaactgcgccaccaagagttctgtgagtaactttgataaatagatcattcccaacaaactgtaccagaggcattccctgaatattcatagaagtagactccaaaaatctaagcttaaggttcttgactgctaaacttactcctgtatcactaggaaccttatctataagcctttcatgagaagatcccttacagttctttttcctggcattttttccaatgagaacaatcttttcactaactttgccaaagtatgcataaagatccaggacaaaaaataattgttcaactgaagtatttgacaaatattgttcacaggcaactcctattctgacaataccacctggaggaggtacgtttgttaatgggctcccatcagcagttaccatagctacctcaatacaagcatctttaagttcaacacatctccacaggtcagaggcagaattaagaacaatttgaaccctagatgattcggctgatgtttcaagagacaaactaagttctgaagctccagcagtccatttcttttgactcgcatcaacaggttgcccttcccagagacaaaagcaagcaggatctctctccagattcagtagcttcaatttaagtgaaggcgactgtgaaaagaataaatccttaatatgaagccttgctccagtaaaggagttctgagcaataatatccttgttgctagcaggacaacccaatttagctggatccaaaggaactgtaacatctagctccatcagattgaaaataaatgagtttatggaaaaatctggtaaaacagaaccaggattgactacaactccatcagcaaggaaagaagatatgcgcaaacaggattcttcttgaagatgaatctggccatataatgcaaagatcatactttaggaatttattaaagaaagaaatattagatagaaataaaagatgccaagaatagaagtattactgcacttaccgtaagaggttggcagttaatgactgtttgtgaagcaaacaatggtggaacaggggtgggcttaatttgaagagaatgaagacataatagagggacaccctcaattaattgccactgctgctcttccaacggatatatgagaggacagaagttcttagctgtcatgaaaatcacagtgatcagcttcacagataaaatgaaactttaaccatacatggggtcacaggagtaatctcctttctatatgatcagttcatgaattttaacttttaccaaagtcaggaacaggaacaggttctttagcagttgcgtgcattgatggttgcactaatgtacatggaggccgtgaaaaggtatccctacattccagctcacacaacattaatatcatctgcaactctatacaagcatcctactctgtactaaaacatcgcaattaaatacgaaatagtatttttttattattattattgttatcattagcacacttggtgcttaattgagaccaactgcttaattgaaccttcgatctcttggtattaatccgaaatagtatttataatactccctcatcaccaaatctcatgaaagagttgagccagaaaggtcaccttaaaaatagtccagaaatcatgactttagtcaagttattgacattttctccatcagaaacgctagcctacaaagcaaagtaggtttgaaaataaaatcttgatagtgaaatgaacatggcactgcagaaacgctatgatattacactgaagcaggccacatccagtatatatataagctatacagaacttaggcatacattgaaaataattatatagtatattttaaaactactcaaaagcaaccaggttagttgggaaaatgctccaatgcacttcttaattgtcaacattttagaaatgtactatggtttaacatatgtcagcatgtatgaaggaatgcgttatttggattagatatacatttaagttagctatatagtttaaactagcatagaagcttatggctgggtggctgcttgcttaaattacaaaatattcaggaaaggtgggggaagaaatttccaccagaaaatataactgaaagtaagactacacacatacagagtacatacccgagaaaagaagagtgactgcatcaaaagttcaagctggaattctgcaagtaaattgaagttgttctagaatattaactgatagcatatgcttccagagaaaacaaaatatgacactactgaaagccaatactagaccatttaatcaatttataataaaccttagccactagcataagttacagccatatggatcatttttccaatatgtacctagagtgtgtgtgtgtgtgtgtgtgtgtctgtaagttttatattccaagctaccaataaatgcgtgtcatatcatgagcatgcatgcttacattaaaagttaaaattatttgataaactaatataaggccaaactcccaagtaagagcacaaaccagcatccttaatacatagaaatatgtggtcaacaacaatagagataagagaacgcccagctgcttctatagatctctgcaaaagaaagacacaacatagttgtgaagtcacataataagttgagcaagaaatatttttctaattcaataaaggcaactaaaacctgctgagcctttggatcaacatctcctctatttagacaaacgtataatccagtcataaagcggagaagagcacgtaatcctgccacaatattatacatcagaatcatgctaaaagctgcatacttttagttcaaaaatttaaatatgaaactggaaacactaggttattcacctggttcactaatagcaggacaaatagcttctgtaatgtgtaactgaacttcaagtccaagtggactgtttaacacggtcctttgcactgtgatctggtcacaattacaacgatacattagatacaccttaaaaatttattaaaattaaccctactgtaagattcaacttacatatgcttctccagctattccttcaataaaacgctccccaccaaaaaaagctcgctttgcaccatcgtcatctctctggtttcctccctcttgagagcatgctacattagcatccatgaacatatcaggatgaggcaagagatcaatagacagtgactcccactcaagtttctggtaggaaaaggatacatttcatcagtatcaagccaagcaaatgtgacttgttagagagcaataaccacagtatatcaatactaatgtgcacacaccagagaagcaataaccacagtatataaatactaatgtgaccctaatcaagggaagtgattacaaaagataaatatagaaataaatgaacatgaaagtatatagaagaaatgcctctaatgaaaacggaatagactattactttgaacacgtatatgtactttttgtcattgttgaagtctcgtgcctccttaagatttacaacctgtttcagtacatgttctgagttaagaagctgaatgtgtacaatgtggtaaaaaaaaacacttgtgagttgtgagaataattagtgaattacctgccaatcttcattagttgtatacagcaaaaggttgcgaatagtaatggatgctagaggcgacgccctattcaaaaaatgcaaaggaaatttgagtaaacaaggctaggattactatcatgtcttaagtctacaattgaaatatcatatgaaacatcagtgtaaataaattctccacaaatgtcctagcatttgatagaataattggattttttttatagtgtgtacatcagtaagaagttgcattcatgtgatgaggacctgttcgttaatagtttcaagttcaaaaagagaaaaaaaaccatgaaagctaaacattcgaaagcaacaagaaattaccaacttgcccctccttctcgtcgagcacctccacgagtttcaagtagcagattgacagtaccaatctccacagtcattccgtctgcaatctgacattatgaaaggcccaagtcatagcttataatgcaagtaggcatgtatattatatgctcttagacacagccagataagagtgctttcaggacggcatcgtcattgaatttttagtacatgccttgtgatcaaagttctgatattacatcatatcagaacactttcatgtctgtactaaagaacaatgatgacaagacaatcgacgtactgaaatgacatacaaaagtggaaaagcaagggcacaaagacatgaatatggaagaagggaaggcgcaaaaagaaaactgttggggaagctgggagccgcaaagtgcaactcttaatgggagaagacacgtgtcaattacctaacataccaactcctccctacttttcattgggcaacatcaccctgtaaacgtatttacttaaaaattataaatttatacttaccaacaccacacctaaaaactgaattcaatacctttcatgcaactacttattaaatgctatatcctttcaggacaatcgggttgaatttggatcaacaaatattattacttaccaccaccacaccacaaaactgaattcattatctttcatgcaacttcttattaattgccatatccttccaggacaatcaggttgaatttggatcaacaaatattattattatttgaatttttggccctgtcagttcgaccgggagacctcccactcccagtgcccccaaggtttttttgagcatgtgggagattcgaaccttgaaacttgaaacaaatgcctaccagcactttccaatacaaataggccaccccttggggttaataatcaacaaatattattttatcatacaaaagatagagcccaaccttgtcagcgaatccataaccgctacccttagcagaggtcgaggatgtttgggaactgccaaaacgaagcataaattaaaatcttagagtagaaaccttacattaatcttcataagaaaattatgcaactatgtttagcattacctgcttgggcttttacatgcatctgcatctggattctcctctagaaccaaatcaagtctatcaatttgcactattataggctcgacttgtacattgcttacagatgatgggagctagtaaaccacagaagacaatgttgctcaaataaaatatattgttatttcgacataaaaaacattttggcagttgaaaattagctagaagaatttcaatgtccattctttcgcactcgaataatgaatgacatcattgttcgcagagcagagagtagtttatactagttaaaactaaattgcatctcaaatcaaattctgagcagataaatgttgaatttcctacataatcaggaaaaagaagaaaagaattctaatcaccaaccacaatctctaatttcccaacttttgcagtcgtcacattcagagcagggggaaatccgacgcttgaatgcaaagcatcgccatttatatctgcgaaaattgagcccaaaatcaaccaaatttcccaactaaaatctcaaaacaaaaccctcgcggaaccaaataataataaaaatgatctctgaatttgtttattttctattacccaaattagagagctgaacagtccttccctgcaacttaaactggtccctggagaaagatttcaaccagtacttgagagtgtactcgagagcccgagccagaatcgactccattgcagaaatctctcgccctccctgagaacctcagagaagcttctggagaagacaaacactggtccggagtccggatctttcttccagatctacaaaatctcaaatgccaaagttcgatcggaggcccgacaatggcggcttcagcttttatggggattcgcaaggagaatttcgcttttacttttgtttttgcattcgcctttttaggttctgaagcccagctcagaagatcaaggaatctcagaacagtgggggtggtggaagagtggaaaggaatgaaggtgagtcgcacgtgacgagagaggtgtgtccgaatgtgtggcacgtgcgagagagatggggtgtgcagcggtgttgtgttggatcttggatctaaacactcatttagctctcaatgagggggtgagtttggactgtttcagttctgacacgctgtgtacgtgtcagaatgaagatttgtcggcctgccttcgcgtttttggaaaaagcggttcaagtactaacttgagtttctcacacatatgcatcccgccaaattatgcctctttcctctaattattattttttatttcaagtaatttgccacataacttccttgtggtcagatttttgcaattaaaatccaattctaaaattttaatgagaaaaccttttaaaccttctattagcacttagcctttttcatctatttttgagtgttaagtgtcagattggaatgtacacgcgtacacaatatacacgtggcacaattttattggtcc

SEQ ID NO: 298971 - DNA, 6644 bp, Cannabis indica
actaaaaagttatcactaaattaactctttttttgtagtgaaacaaaatttaggtgaagcaattatatattttatattacgtggattttaaaatttcaataaaaattatagaattagatatataataaaatgtaaaatattgcataaatatgttaaattaagtgatattttaccttaatccctagttttatgttcaaaacccaacattaaaattttaattctttctcaaaaatatatatatgtataaagttttaaatttgtgacctctttatactataaacaacttttaccactgcaaatcttgtttatcattagtgaacccaaaaaactatttatacaaaggtccaaagtttttatttttggacttaggccctaaataacttagaattattaattgttcctaataatttcaagtgggatggttaccctatctcatctctacatagctttgcccttgatgatatatcaagaccttatcaaacactattacaaaataaatgttaagccaacttgcatggttaaaatggatttgaaaaaaatttattgtgacacaatagagtgagattttatagaagaaatgatggcaaaatgaagtttctatagaagttcatatatctagattattatgacttgtataaggatattaagattcttgactggatctttacacgagttctaaggtgatcttagtaactatttttgtttgtaattggaacgaaatatatatctctctcgaatcctcactaataaagtggctcaaaagattagggtttcaattccaaaagtacaagcctttgaaattataactcacttaaccaaaagtggaaatgataggattaccattgttgaccaagttattgattttatttcaatggtaaagaagcttgattgtattttaagtaagaagacgaactaagtttggtgcaatactgatttggaagtaatgaaagcttgctaacttaccccaataataataataataataataataaatattttaaagctatctattaattttgattactaaaatttctaattttattatttatcaaataaattattaacagctaatgaaaaatacgtttaactttacacatcaaaatctacatttaaaattgatattacaaatgaatttagggtttgtttagtgtgtcgtgttgtattgtatgtatagtaatgtattatattaatatcttttaatacattctatgttttgttaataacttgtattaatagcttctgtaaaattatattaacttattataaacttgatcccaactcggaccccgtttgggtctgggttcgggttcgatcgggtccaagtctgggtcagggtccgagtcgaggtccaggtttggggccgagtccagggcccgggttaaggtccagttccagggccaatttcgggatccgaggttaggtgggggttgagtcgacatctagggtcggggtttaggcttatgttagggtttgaggtccaagtccaaagtcgggttggggtttgagttcggggtttagtcgtcgtctaaggttgggctagggtttgagtctagggtccgggtcaggatctggttgggttcggggctggggacgggacgggtcggggtccatgtttgggtcggcgtccgggtcgaggtccgagttcggggtcctagtccgagtcgggtccaagtttaggttcaggattcaaggtccgagtctcggtccagggttggggctgcgtctgggtctgagtttggtccacgatctacgagcgtgttggggtccgggtccgagtttagggctgggttcggggtcaggggccaggtcgaggtcagggtttgggtttggggctaggttgaggtccgcggtttaggctaggtccgaggtccaaggccaggtcgaggtttgggttcgggtacgggatctaaggttggggtttcagtctgagtctagaattcgggactagggtcgagtctggggtagggtccccaatcccaaaccctttataaataatataatactagctaatacatatcatttgctatgtattaaataaatcgattcacattgtattaaaatttatggtcgtaataattaatacaatataatgttttatacagacataatgttacttgttatttaatacaatacgactcttatacgtcttaccaaacgaacactttatatctactaaggaagaacattttcgtgcgctttttttttttctaagattttttgaaataaataaattcttttacgtacataaaatattaaaaagaaaatgtatttatataaattgaaatttcaaaatattatttccaacggaagtatttaattaaacaaaggtatcaattaaatcttatactatatatttttgagttgaaagtactactctttgtattatactatttccattaataagatacaaagctttttgtctcttaatcaaacaaaggtcatttgttggctccctcaaaataaaaataaatatttattattgacttaagaccattatagaagattagatttcaaatttcagatctcagatctcaaattagatctcagatctcaaataatctagtggtgtttatttatttattatttgtaaagaatgtagtggtatttatatattcttattatttggaggaaataattaagaatggtttactaatgactaattatgagtacacatttttcagatcattgttgtgtctaaacaccacatggtatttaattaataatatgattcatatctaagatataaaatagtaaaaaattcattaaaatatgacttcctttctttttcttcttttgaaaaagactattcaatttcaagattgctataaatagagcttaattctccaaaccacaaaaacattcccataagataaaagaaaaaatgtgttcatcatttaagagcatgtctttattaatgatcttcttattccttctctcccttatcttctctagtgtccaagctcaagttccttccaatgccactttcaaattcattaaccaagatgaattcggtaatttcatcgtcgaatataatggaaactaccgtcctttagatgttttcaattcgccttttcaactttgtttctacaacactactcctaatgcctttacccttgcccttcgaatggctacaactcgatctgagtcgctatttcgttgggtttgggaagccaaccgtggaaaccctgtcggtgaaggcgctacacttacattcggaaccaatgggaatcttgtcctcgctgaagccaatggtaaagtagtttgggaaaccaacacaaccaacaaaggtgtagttggcttcaaattgttaccaaatggtaacatggtacttcatgactcaaaaggtaaattcatatggcaaagttttgattttccaacggataccatcttaataaggcaatcattactagccaagggccaaaagttagtgagtcgcctttctgagaaagaaaataaaaacgggccttacagtttgatagttaagcccaagggaatctcactctattacaagagtcagaactcagggaagtctttgccttattttacaacagcccaaaaatttagtccagttcaaggatccctccaaaatgtgactctaaaagcttccccaacttctgatgagggtttcgcatatgacttatcattagagctttccactggaggaaacttcattgttgggagaccgaaatataatgcaacattatcatttttgaggttgggaattgatggaaatgttaaagtctacacttacaacgataaggttgactggggtgcttgggaggagtcatttagcatttttgatagaaattcagcgtgggaagatgagtgtcacttacctgatcgatgtgggactttcggaatttgtgaggacaaccaatgtgtggggtgcccgtctgagaatggtgttttgggttggagtaaagagtgtggaactaaacaagtaagctcttcttgtaaacctagtgatttccactactacaaagttgaaggagttgaccatttctcaagtgggtataccaatggtgatagtgtcaaagaaagtgattgtggcaacaagtgtagtttggattgtaaatgtttggggtacttttacaaccaacaaacttttaagtgttggatcgcttatgatttgaagactttgattaaagttgccaactctacccatgtggggtacattaagacacctaataaacaagcaaccaatgtcttttgagtatttttccttatataatgtagccatgtactttgctacaataaaagaaattgataatattgatttagtttataaaatcattacattattgccatttctcctcaattaaacattttagccatgtatcttattcaaaatgggccagccatataacccaaatgggcctaaggtgagattaaataatgtggtctttttcaataaaagtataaaaagtgctatttaaaagaatctttatttaatgcaattatggagtagggtgaattagcttggattgggtggatttgatcaattgatccgatctttaccttatttatttcaatttaatacaaactttttgtaccttaattctatagtttccaatactttatttaattatatcattttcttgtcaacttttacctactacaaaaaaaatcagattataaatttagtatatgatatggatcaaatcttattaaagaaaaagggtcaacataaggtcttgacttgacattaatagttggacagatctgaaataatgtaatggtgccttattttatgtttcttttggggggaaatatttagaagaaattacattgtatactcactttattttatttgtaatgaatctatagttttcctcaaagtattgtctagaaagcttaaaaagatatttaattgggatagataaattgaggaatatctcttttttgtatcttttaatcgaaaatactctcatattatatttcattaaaatatactcacttttgtgagtgggttgtctaatataccatcacttgccacttaaatctagcacataatttatattaacttaaggggtataatgggggcatcatctataaaagtagatatatcttaaataatatagaaacaaagataaaaatcaaaagaggtgaagtaaagtgagcatgtaatttcttctatttaattattcaatgcatacatccatatccaatataatatagttaaaaagcaaacatatcaccataattgacttgccctttttcttttgaaaataaccaaaatacccttttaagattgctataaatagagcttctccaaactcacaaacaaattgtcattaaagaataacaaagatgtctttatcatttacaaagaataacaaattgtctccaaactcctaatgctttcacccttgccctacgaatggctacaactcgatttaaattgctatttcgttgggtttgggaagccaactttggtgaaaacgccacactcacattcaaaaccaatagtaaccttgtccttgatgaagccaacgataaaattgcttgacaaaccaacacgactaacaaaggtgtcattggcttcaaattgttaccaaatggtaacatggtacttgtcaaaattttgctttcccaacagatactatcttggtgggacaatcattatgagttcgggccagaaagttagtgaatcatctttttgagaaagaaaacaaaaatgggccttacagcttggtaattgtctcactatattacaagagcaaaaactctagaaagccattgccttacttcacaataactcaaagatttaacccaatcgtccctacaaaatttgaccctaaaagctttcccaaatactgacaatgattttgcatatgacttatcattagagttctcaacaggaggaagcttcattgtcaagcccaaatataatgcaacattatccttttttaaggtctacacatatcccgaatataaagttgattggggtgtttggaaagtgtcattttggtgtttttgataggaattcagcgtggggagatgagtgtcaattacccaatcgatgtggaacttttgagatttttcatagcaatttagtgtgggaaaatgagtgtcaattacccatcaaggcgttttgggttgttggaacaaagattgtggaaccaaacgagcgagttcttgaaaacctagtgatttccattactacaaagttgaaggagtggaccatttctcaagtaggtataccaagggtgatagtgtcaaagaaagtgattgtggcaacaagtgtagtttggattgtaagtgtttaaggtacttttataatcaacaaacttcaaagtgttggattgcttatgattttaagactctttagattatttttttagtactttttagtacaatatatggtcattatgtaagttttggatatttttctattgagtaatttgcggcaaaaccccctcaactatcaatttacttgcaaaaaaccatccaacctcatattttggtgggaaaaccctccaaagtactgtttcgtttacatttttaaggtatcgtctatttagcctcgttaagtcttaattttgcccacgtggcaatgacaggtcaataaaaaattatcctacgtggccatattttacaaaataaaaattaaaataaaacaaaaaatttaatagtaatttgcg

SEQ ID NO: 298972 - DNA, 2459 bp, Cannabis indica
caaccttcaattaatcatcaaattagacacattattagcattaacaagagttggatgcacaaatgtgacaaaagggtcttcatcatttggtaaccaaggctcctccaagacatcaatattcaaaccattccccacatgccaccgaactccttttttcactagagcttgagcttcctaaatactacgccaaacaaatcttggattgttacccaactgagtcgagagttaactgccattcagataatatcgtgctttaatatttttgagaccaaggaattttgctgaacaagcaacctccagccttgcttccccaaaagtgataaattatgatcctgaagtttctaaatctcaaaaacccttgcacttttatgtttgctcaacttctcccaaaacaaccaatgggtaccagttttcttggagttagatgccttccaccaaaactttgacatatgttgttccatctctctacttatttccaaagaaagaataaatacactcatggcatagcttggtaactcttgggctatagtctttataagaatctccttaccacacttaaagagaaactttgaatcccaattttagacccttttcctcacattttccttcagatatcctagaaaaacatttttattccttcccattgtacttgcaaggccaaggtaagtactattagcatctaaagaaagtttcatagttgaagcttcaatgaattgtctgtataaacactataaaagatagaggatttccttaaattgacttgttgtcccaaggcatgctcaaaaagatgaagaagttattgaacacggactgcctcagtcatggtagatttacaataaaggtaactatcatcagcgaaaagcatatgaaaagtttttggagctccattttccactttacaaccatgaagccaccattttaccttgaacttttgaatcaacgttaaaagaccctcagcacataaaataaatatgtaaggagacaaaggatctcattgacaaatgcctctattaggaaaactagacccatttctcatccaccgtgaacgattgtatattgggcgggcacgggagtgggcgtgggcacaagagcagcgcgcggggagctccacagggggaaaagactgacgtgacaagggggattaagacaaaggaggtggggaccaccatggaccataggaatacttactttttgaatcttcgcgtttaacagtagtgtattaaagtacggaactttaatatagaataatcaagtacggtttactaagtgctatactagtgcgtgtgattttaattcgaaacacatatgtggatagacatttagtatatgtactgtgtataatttgattatacatgattgacccgatatgaactaacatattttatcaacatattgtttatcataaaagatttattcatattaaaatgatgatcatcagtagatcagtctgaatcctgagtattcatgaactcgtatttgtgttcattaggttctcagagaagatgattcttacaacttctgttttgggaacctaataacataagtgtctggaaacatgttatacaataatagaatccaagctttttgaaaggatcgaatattagttcccttagagtgttacttctgggagtgctaacagttggatccaaatctataatgggattatagattaactgttcacgttgaattaatggtacataagaaattcaagagataattagaagggtaaaacgataatttttactaactctaattatgaactaataattggagggtgaactacttatattgattatatcaatggactactagaaagaattctataagtatatatctatgttgtcaaagagtgcaattttatatttatagtggagtaataatagaattaataaactgattattttattaaagagttcagtaataatcgtgtattttttggagctcgaaatataagttcatggtccccatatcacatctatacaatattgtacaagggaaggtataatttgaggaatgaattgagaaagacttaatttttatgagaaataattcttgaaggcaaactttgtatagttatttcaattatgaattgagtgattaagataaattaatctttgtagtttgatttgataaaattatatagttaaatataatattattattaagtaatattatgagagaaatatattattttagtagaaaatgatatttagttaatctaagttaaataagagattgataaaaatattaattaattattatttattgacaaataaataataaatcttgttaaaagacaaattgaagaatcaatttatggctttaaaatctgccccacacacatgtagagtgacatataaaaagctcgtgggatttgttttagtttattttattatttaaattaagattaatcaaaaaataaaataaataattaatcttttttaaatttatttaaattt

SEQ ID NO: 298973 - DNA, 5109 bp, Cannabis indica
ggccaaaagattatacaaaatttctgtttagaggcaatgtgaaggtcaataattggtgtttaagagtttgatctgtaccctcatgaaaaaagaaaaaaataattgagaataaaatgaaggtttggtttgtaagaccaagaactggaatttttttctttcttggagtacaatgttgagatataattaagaatgtcgatttgtatattggattaaaataaggggcattcttcttagaatttagattttgctatgaattttttttttccttccattgtatagcattttggttggcaggcctttcagattttatatggaaaatgtaaatgtattgaactagattattttattcttttcctaggtggcaacaactcctcattaacagatttgttggatacgatactattttgatgaatagtttgctgagttctcctggtcaaggtaatgacttcttatcctcgagtgttattaaattttgttttacatagtatcgtactgcttgggcataatgtagtttgtaatataaatacagtatatttcttttcccttttctgtgatagtatatctcattggtgcctggactctggacttttatatatatatagatatatatatatgtgtactttttaatagaccaaggggaccatctctgtctttccttaataatttgtccatgtcgagtttgtacatttatttgaaatttctatatgcctgaacatgtattaaaactccatgcaggttatctttatatatttcaatccaaagagatctataatcttagctatgcacaagaaccaccagaaggtcctgcaagatttggtggtaaggtcaacttaatgcattcatctagtgctatgtattccatgaggttacaatttgcaagttttatttatttatataagcgagtaaatatgattaaaaaaaagtattgatgaaagttgatatcactggttgtttgtctcagagtctctgcatactctcttatatctataattaacaaattctacaaatgcccatagaatacatagtgctagttttcaacccaagagatgtactgtacatgaaacccctttgtcaaaaaaaggctgctgaagttcttgaagtactgctcaacagttccttagggcttaccaagtagatgcagagtatataggtggttgataaatatcagtctagcaggctgctgacatgttttgttatttttcttttgtttcaaattgtgtaatgaagagtcacttttctgtatgagttatttacctgatcattctccttagtgagtatatttttattaaaaagcagaatttttttctttcaagttgggtggatatccattgccatatatagaaactagattattgagaacttttttgtagagcaagcagatttctttctcactccttgagctgtatatagtgccatttttatgttcattcaatgacattttttcaagtttttgctgcaaatgtgttgaaaatatgtattatgtggcaaatcaatagcctatttgttttgttctttgtttatttattacttttttttaagtaaaattaccaagcaatagagaatagtgaagaggatttaaccaaggcttatctcttaaatgaaaatcatgaaatgatgtggctcctaatttgtccctatagaaatagtttttgacctcacagtgtgcctaaaatcctgtttgttgtcttcttccatgcacccatattagagcttgctcaaattgtctgttaactcttaacaattgcttataaatgatatacaattgttctggactgtaagtagtagtgttgcacactgctgttccactttttcacaactgacctcaccaatatttcttattactgctgcagattatcttgtgactaagtgtggtgtgcttatgatgtccctatttgtgttttttacgactacaatgtcagtatcattcactttgagagagacacaaactcgaatgctgaagtttacaggtctgcttattatttatttttccttgttgtcctgtcacaacctttcagacaaatataattgagttttaaatttttgagctaattttcatcttacccagatgagaactctttgtatgagtgttttcatgttttgatattgagctccaagaaatatccattgtattgacttgaccactagatctaagtcaattactaaaacagtgatggcagcatataggaatgctttttgcgacattttcttttcttccttccgtgcttcaaatgataatttgctccccttattgatgtgttgaaggaagcattatcactatctcttggaagactgagaaaacatgttcgttttagtaatctaatctggcagctgtaacacagaattatgtggttacagcaaccatttggattatatggctggaaagaaatatatgtttgaaggaaaagactagataggaaaaaggaatatatgtgggttctctgtagtaataaagttgaatttgttttggcaattcctttggccatctgtggcgaagcaattcaaggattttacctctttccttgatcattcataaatggaaatggaaaattaattgttttaacaagagtttctttttaattttgttcttaatgttttatttatgtttacattatgaggaggccttatcctcttttggtaatatttaaatcaatatagatcttgtctcttatcaaaaaattatattattgcagtgcagcttcaacaccatgctcggcataggcttccaactttccagttgatttttgtgcatgtaattgaatcactagtctttgtgccagtaagtatacatcgatgtcattgtactcatttcatctaaatatatcagtccatatagttatctgtatctcatgccattattctacggattcttggatatttttttttcttgcacatttgtggcgttccttcagatagaatgttgttcagctttttatttggtttgctactgtatgctaactgagaaacttttgtgttgcttctgcagataatgattggtatcttgttttttctgtttgagttttatgatgaccaactattggcttttgttgtcctgatactagtgtggttgagtgaactatttacattaatcaggtttgtttctttctctctacaaatatagtacgggccttggcataattgcatcttttttaaagtctactttcaccaaactctacatatataaatcacctatttaacatggtgggaaaaaaaaacctggatgctcattatctttactcaatgatccctatgttgacattctcggaggaaacaaaaactgaatgtaaagaagtttttcctttttctaaagaacagttttgtgagagaaaatattagaaaaagttagaggaagatattttactaaaatttattctagattttgttgatttttttattttctttttaaatttatgtatgaaagggttatatattttataaatttgcattaaatttaacaattaattttccataacaaatatatatttcattgtttttgtttgaatttaaactaaagataatgaaattcctgggaatttatttatttttgtcctccgaaattcaagttctagacagaaggttaattatcgtttattcttttctgtattaggtcatgaatagttaagttttaatttggataatatcttatcatcttttattaataacacgtctcttatagaaatgcagggtgatgtgagattggtctattgtcaacaaataaaatataaataatgtagggtgatgtcagcaatttttgcttgactaaattgttttgctgccctaattattgattgtgcttgttgcagcgttcggacacctatatcgatgaagttctttccgcgcttctttttgttatattttctggttttccacatatatttcttttcatacgcctatggtacaaccttacacatttatttttttgtatcttgtttccattttatatggaatttcttttctcatattgcacataaatttccaggattttcctatttggcactctctacaactgcggcttttatgcatcatctcattctatacttttggaatcgttttgaggtgaccattatcaaaatgcacttgacattcaactcttaacctttcattctattctttattttaaaatctggtttttactaatttttttatttcaaacacaccacaggtgccagctttgcaaaggtttatgcaaaatcgtcgatcacagcttcagcaacacccggacttccagattacctcctcgactatccttgcttcaactctccacatcacaagattaaacacaagaaacccgggaccagctaatacagacacggccacagggcctgggttgagagctgcgccggatcaagcagcaccagcaaatggagctgaacctcaatttcaaggacgaacggaaaatgacaaccctcttcaccagatgcctggtcaaggtgaccctaggcaagcagataatggtgatcactctgggactatgagttcattcagttctctattactgtggatcttgggaggggcttcttctgaaagcctcaactcttttctttcaattttcagagacgtgagagaccaaggacaagtttatgctgaatcgccacccgccgaagatcaaacaaatcaggatgtaagatagtattgtaacattgaatatttgaaagttactagttagtatggaaaatgttttgttgccaaatacatgatagtataggaaatgctcacgtgtgcaatgtaatcacatgtaatatttgctcacaaatgaatatgaaaggaaaatatttatatgtggggagaggtccaattataattttgagaatgctgtgtacaatagttttttcctttttcttcttcctcgagaaaagtttcattcattccttctaatccgtttcatttttttttcagtgacccttcctttttagtttctgccgttgcaaatacaatgacatatgtattaggagacttgagttgaattacataactttgttttataatcttgatgagcaaaggaaacttcacaaagtatgctccatatataataaataccaactctatttccaactcaatgtttcacacaaaacatgtaactttataccaaaacatgtggagactcagacaact

SEQ ID NO: 298974 - DNA, 3566 bp, Cannabis indica
taataaaattattataaataattttatataattttaatagaagtattaattaatattaaattttatagtagaacgaaaaattaaaaatcaatctgagataatgttgctatatgttaatgaatccaccaaccgaaaacataatcttcaatcagataatatattattatctaccaaaaaaaaaaaatcaataatatttgggcaaatcatgcatatatttcaactacaattttaatgggtatgtttactaataagatggagccaacttcacgattattaattaatggtcctacacacttaaccaccagtagtgtgtggaatcctaggtaactatgagacaaaacaaaacttattaagagcatttattagacacaataattctttttgacctaagaaatataacaatatgaccacacaaacacaaacaacaaaaaaaaaaattaaaaaataatttaccagatcgaacctaagaccatgtttagtgatatatttgtcacaaaaataattttcagatagattaacatcaatttttagcattatattgttgtgcacaattacaaaatttaatgtaaaatttaatatttaattaatatttttattattattttaatttatcaaataataaaataaatctataaatattttataatttaatattataattaaatacaacaaatattataatgtagtgaccaaactagggaggcaagagggtgccatggccctgctaaatatttttaattttttataattatacgtaaaaatacttaaaaaaataaaacaaaataacttaatgtaattttacatatattaggctcctgctaaattttggtctaactctactattgtataaatataaataaaaaaattaatttgacacaaaatttacattttagaatataatttttgttaggtgagctatttcatcacttttggtcaatctattaaataattttatattgcgcagcccctttttttcattatgtttattattgattatatgaatattgtatattaattattaaaattataattaatggagtgttttcctttgattcagtatgtatatatacagtcccacccagagagaaatcaattcagaaatcctctcttttgtcgattgatacgtcgcactcatcacacccacaaccccacgctcctcaaaaaaagaacatttatatatcaatattgttattgaatattagtggtatctactacattttataaatataattaacaatatttttttaaatattattttgttaaattatataaaatttcttatttaattatactaataataatataacaccacaaaaaaagtgttagactaataataccatttactaattctaattcactataggtgggtgtgatatttaaaagaaacaaactttcatgaaggaagattaatagattatgttatgttttttttattattataaaaaataaaaaatggtgtattaaatacacctccaacctcttcgtattacatatatatatatatatagtgatagtagtatttattgctagaaatctacctccaaccataaccaataaatttcaccataatttcaaagttcaaaattaaattaggagagaagaaataaggatcacacgaagaatttgtagtgtggaaatggaattgactttgctccgaactctaaatccactacgctgtgaggtacatacataccagttgtattgctaagctatttgtcagagtcatgattgaatcattgggacaatgaaaaattaatgacacttgttttcccaattcatcactatatctatataattatacacttatattttctataaggtgtgaatgatgtgagttgtagttgtttttttctaaattaaactgcatatgtaatgttttgtaattttttaaactgtaattacactacaaaattttaaaactgacaaaaatcaaactatataatttaagcagtttacactattataattatataatattataataaaaatttaaaaaatcaaatctaataaaaatttaataatacaaaaaaaaaattattaaaattttaacatcaacatacatactaattgtttctaaaaaaataatataatattgtaaaaaataataactttataatacatagtgcagtacagtttgaactgccattattaaatttaaaactataaatcgcactgctccacgcagtttggcaaaaatacaaactacaactacgctacaaaggatttcaaattgtcttttttacttagtgtagtgcgatacagatagtttatgcattgtgggcagtctgatgaacacccctacacaatattagagaattattaaaaagtactactagtgtaattaacatttttctcagtgttatcttactatatattagtataattaagtattgaatcccatataacttaagaaaataacttttaaaaaatgtcactaaccaattgtgaattgatacctataaaaaagattagatacgttatctaataacaatactcattatgtactattataatattattattaattatataatttaatattaaattatttattttaatttagtaaattttataaaaaaatcactaatgtataaaataccatctcataataatcctaattttgttacatgtcataagggaacgacaccaagcaaacagcttgtaaactttatgttcttagtaaaactaacacttatgtagtcttgaaattaaagctagtagaggctagagagtcttaagcttttctcaagatttagaaaccctaatcataaccatatacatagatactcaaaatattttctacattttttctaaaccaatcatatttaatttattttaaatattttcgatgagacccactattttaatcagtgcatatttaagtgtacatattattgcaacatatctctatacaacaccatcttcaaatataaattttatgttaaatttagcttaaagaataaattaatattatattagatctaaattttataattatgtttcaatgtactaaaaataaataaatctataaataaaaatatataaaataattatcaattgcattaatgtggcaatagaataaataaaatataatatttattatgatgtaaaatttagctcatgtcaaaataatttaactcaacttttattatgtaccaagtttaaattaaattatccacaactattgaaattcaattttataaatataagctaaaaaatacatatacatcatatttatagcactcacaactacaaaaaagtttacttctagtcacaacaaaatttgtgactaaaattaaaaaaattatgactaattataaattatcattcctatgttgtgactgaaaggtccgtggctaaaagtattagtcgcaaaaattataatttgttgtgactaaatgtgtttttagtcacaatattgattgtgactaaaactaaattagtgataacttgtagctaaatactatgttttagtcacaagtaagtttttgttgtgactaaaagtcacatttagtcacaaaaaatttatattgtgactaaaaaattgtcactaaaagtaacagttt

SEQ ID NO: 298975 - DNA, 5443 bp, Cannabis indica
aacatggatgaaagttcaggggcatgatttagtacatatcaaagtttgaagggcatgatttgatagatattaaagtctagagagcatgatttagtacataaacaatcactaaaacagtaaaattgaatgaaattaaacaaaagtccttaaatctaacaatctcaatagttcagggagaatttttaacggcaaaaaaaagttcaggaagtataatttaatatatgtcaaagttcggagagaaaaattactaattagcctataaaataatatcacttaatttactctataagaatgtagtatggtacaatataaatttatgatccttttgcaattataatagtcacacacagtataattcattcatggtggcataataaatttttttgtaaaattattttgttcataaaaaatttcataaaatctatcattacaaaacactcatttcaatttatataaaagatgctacttaattttctttcacacatttacaatacttttttttttatcatacttaatcttcgataacatattgacaaaaagataaaagatgcaaaatcaaccattatagccaaggtggtaaactagaccatcaaacccgagtaaaaagctaaagccaaacaagttatagcattttaaactattttacaatgataaaaagaaatagaagagaaagaaagtcatgtgtaaaatatcataaacaataatactaagctcagtttgacactatccttcttattaataacttaaacaaggcgaaagtaatccgtttcaaaatttgtaccccgaacaacaacaccacagcaacctatttaagaaagttactgccttgccacatgaggattaaaggaagtcgctgttggagaatccgctgagcacaaaactgccctttcccgatcaatcaccaccaccccaagccccacacacgcccttgttcctcattgatatctacatccacaaacaggttagaatcactcaaacccaaaatctgaaactgcctgcgagagagaccacccactgtccccactagcctcacattaacaactagagccaaattagcttgagcatcttgaaagcgccacagaaaacttaaagtccattgactaaccaaatcatcaaagagtaatttattcttatggacaaaagtttttcgacgataacaaatccttcaacgcaactcaaaaaaattcttccatgtcctgcttcataagagcatccatgcactccacaagcaattaatagaattaggaagcatctttaaagctatctaaccctttaccaacccaactttttcaattatttttaagtgaagaacaagaccaaagtgttaggatttataaaacactcaagaaatacaaataataacagatctaaacatatttcagtagtgctttaatatagaaaaccttaaatcacattttatagaatatttgataaatcaaataagaaaatgatgataataagatgagcaaaaacactaatctgaagtcattattagagattgcacagaaggttatgatcttctataatgcccctgcttcaagcctccattaagcccttacactcacagaatgtaataaaactatatttatagaattaaaagaagaaacatagcaacaaaactctaattggagtaagtctctttaataaggcttcaattaaataaaaaagctcacacatttgttttaactaaatttcatcatactaatgttaaatccattaatcgtatatcactagttatatgagttattataagaaagaactattcctcaactcatattttaataaaatacaaaaaattgcttcacttaaacatacacatcgaaaaattattgaaccacatcaaaactcttctaatcaatgtattacatcatataatcattcaatttcagaattaaattactcatttcaaaaatcaaacaattaatttcattataattttatgaaaaaaatctaaaactttaaacacaaaattctctcacataaaatatatctctaaaactgaagcaaatcaataaatcaataaaaatatacaattgtaatgaaacaatatctactcactaaagatttcaattaactaaaaaaaatactgtttcaactagctttcacatagattctaagctcattaattatagatcactaactatgctaaaacagtaaaaaatcatcaactcacgttaatgtaaactcaaaataaaaatcttacaatgtgttatataaatgaaaccttcaaactcataaattagttttatcattactaaaaattaggtaaaaaaaaaaagaaaaaagctttcataaaatattacaaatgaaaaaatgaacaaatcaatgggatatctttaccatgtgtacaatgcatgttgtcatatatataatccaagttgagagatatggataagaatgtttataaactagaaaataaaggtcaaattgtcaatatatgtaaaagcatgaacatatatgtaaataaatagaattaataagagtcccatcaatcaaattatatataagtattaagtagtactttccaattagatccatccaccactaaagttgacttaatattaataaaacaaaaaataaacacaagtggtgaatcaaatgagatgaaatggtagttgtgaaagggtgaagagttgaccactattgggcttaacctaaggttgaaaggacacttatattagatctcatcacacattaatgttctcttctcttcttcaacttctatcattttccttttcttcttttttaaggtaaaacaaaagcaaaaagagaagagaaaagaagagaagagatcaattatgtttaatcaaaacaagattgcattttggattggagtgttgggagcaacaatcaccttaacagcctattcacaatcatatgtatctccaaatgaaggcatcacaatagggcttttagtcctcatgtttggcttgcttgtaagggaaggtttcatttctctttaatcaccttttatgtaatcatcatgtaatttacttactatacatgtgatttggattattgggtttttattttcttgagtgtctgaatatttatcattgattttggtataaagaaagaacaaaggaagaaagttgggtttagcttttaccatataaagctcataataaatacaaccccccttttaaattggagactagttagaatatatattataattaccagcaattttttgcagagaagaatctgagcttttccatctgaaaacacaacctacataacaatatcaattagataaatatatattaagtactataaaatttcatgtaataattagtgtccaatgtaatagtcaccatagatctagcatgagaaaatgaggcagtggtgtagccagagatgacttgccgatcaaatacacttataacttaattagttataataatttataatgcaaaatttgatgcattatattattgagttgagtgttgttaattatgccggcaagtcatccttggctgcaacactattatacatatacatatatatatatatgtataaatatatatatacctcattcccacatgcaagattttagatgaaacaaaaatgttatattgtgagagttttgaccaatcccaaatgaccccaaatttcattctttccccaaaggtgaaaaaggcaccattccctaatagaatattgtaagaaacagaacaaggcattggcccaaaatagagaaaggttggaaatgatatgagttgtgttgtgtgaattgttgaatgattttggttttaactgatagagaagaagatgcctattggactaaatttccctccttggcaggactagaataatataaatatatttatgtatttatagagagaaagagagttaaaacaagtatattaatgatgctctgcttaaactgagttctttcatctgtttgaaaacaaacattgaatagtttttttttattaaagggtttgtgatgatgatgtgactttgcattgttgaagataccaataccaatatcaatatatcacattaagctgatcctactactcatctatctccatcacctaagtaatactgactgccttacttttaattgcttgaattcaattcagttcttcttccaagcacagcatactagtaataagtgaatataatagtaggtaaaagggtagttgaaaagatttactctatttaagactagacaccaaaaccaggtaagtttcattgtttcaacactataatatgccccaactaagtaagcatatgtataaatattattactagtactatttgctactaaatgctttttcagcattgacaactacttcaaagatattcttcttttttttttttgggtcgttgttagcccccttatgataagaactaagtaatgattcaattaaggtagactgaggtattaaaacctctataactgatacattatcttaagaaagagatacgtgattctcattttaattagcaaaaatatatcttttttatatgaatagaaggcctgcctagaagggtatgtgattttgttcatggatatctacctaaacctaatctatgcaaaggaaaaaggaaacataccaaccaaagtggtacaacactgcatagattgtttcatcataattgggtgatggagttattaatggtaataagtggaagacacttggcttgtttgtggcttcacgggtgtcaaaaaaatcaccagctggacagagcttaagcattgggacaagtcatcatctctcttcaatcctcatagtcaagtcaaatctaagctaatctattctaatctacacactgtcattcaattcccagtgttaaaaaaagaaaggggtgggggggtcttcaaagctctttcattttcaaacagtttgttctaaacaaagcaaagatttttgtagttatggattagctggaatctttttccaacccaaaaatggcagaaccccacttcacaagaagtcgacacacaatgtttacacatgtcattaattggagtgatttcagctttaaccaagtgagaatgacaccaaccctttgagtaagtaatcatcactaacctaagcttttaacttttttcttttcaacagactttgaactcatttaaatcaagcattagctgtgtaatgaaattctttgtaagagaaacgcttaaaagtatctgaagtgctattaattaatttagtatcatattttattggttaattaggatttttaccctctgagttttgacatgtccaaatcatgttcttgaacttttaaggtcattgaaaatatctcctaaactattgagattgttggatttaagaacttttttctaattttagtaaaaaagtctaacatggatgaaagttcaaggggcataatttagtacatgtcaaagttcgaagggcatgatttggtagatatcaaagtcttgagaacatggtttagtacataaacaatcattgaaatagta

SEQ ID NO: 298976 - DNA, 2553 bp, Cannabis indica
tttcgggtgttgtctttgcactgagcagttggagccgaaccttgactagttctttggtgtgtgtgagccttgatttggctgttgggcttctattgttagggcctatttcaaattgcaactattgttagttttttaaaaatatcatttttgttgtggatgcataacaaaaagtaaaaaattgaaaaataccaccattcgcattttgtattaattttgtgtctttgaagttgtacttggaaagctgcaaattttccaataggtacaaacgtttgttgcgttcaactttcactaatgtgaaaatttctgataactcttcagcttataacgtagacatatcacaagtcaaagtttgctcatgcaattcttaaatgaaaataagaactgggttttcctacaatatgtgttaattatgctaacttagcttaaccttaggggttttatatatatccgtgaatgaatcatgatttttgttaattatgctaacttagcttaaccttaggggttttatatgtgtcaatgtagatttaaccaaagagtttgattatggtcaatatttcactcgaaatccaacaatattcgaaagaaaacagactgtgtaacaaaaaagttactatttttcttctcaattgttgattctacaactgtgacaaggtgaaatgacttatgtacatctttattatcaatgaagaaagagtccaatgagcttttgtttatttctaaaatggctttgcttgaattgaactagcttctctaaactaaaagctagaaactcaaatttcaaatcaaataaacaattctatcttttgttccttcagacaacttcttctcctgatttttttgttgtgtcatcagtggccacaacagaaagttcttgatttctagtctttgtagtttcgattttcacaattatttgttcatctgttgttgttgttgttgttggtaaatctttttcagtgatttcagatggaggcttatccttgctcttaccccacagaaccatgtaaaggcccactacaataataacagctccaataaccctgaaaaaaaagtgtcaaaaatcatttctatgatttgtgacaacatacttgtacatgttgtagagattaaacaaagtaccttcccaagtacattagctctgacaaaatgaaagagctcaatattgcaacaattacaagaccaacaggattaaaagcagtcacaaaaacaggtcccttttgaatcatgactaatccttgaatatagtaagcaaaaccagaacgaaatacaccctgcagtagcaaccattgttatttattacaagtaaatatcagttaaaaaagagtgaaaaataaagagaagagtgagtgagtttctaacactgtaaagtgatgctaatatcatggattgtgatcttaaagaccaggctgcagggttgccccattccattcctaaggccacaaatgtgccttgccctgctcccatcaagcacattaaagatgttagggaaagctcagcagggtatgacttcagtgtgattgcctgtaaaagcaaaatttgtgtctcaatatttgaaatgaaatcaaagaaaaagtttcaactctcttaaaaaagtggaacttacttgtagtattatgaaactagaccaacatacacatcctgctataatcattagagcaccttttacagagttttgattatttgcagcatttacagaatggtgaagatggttagcttgttttgcccatggtaaattcaacactggtccattatacatggtcatgaacattgctccccaacagctactatggttcccattatctttgcttggctatgtacttttttaatattaaccttctcaagcctacaaacaaccagttaagacattattaatgaattgtccccaaatgctactaattcacaagtttgatacttttttatttctttgtcttttacctacaaatccaagccattataaatgcaaatgcaggaagaacattgcacatggcagttgcaaaagttgctgttgtgtacttcatcccagtgtagtacaaattctggtcgagtacaggcctgaaaagagccatgaacaaaaacaattaataactagtttagctaataacaataataataaattctatgtaatggtctttactccaagaaggccagcaacataatcttgaaaaagatagagaaagtcatcttgggccttgttttcctgttacaacattgagatggtattgatatgttagtatattgtattatacatactctgtggctctccaacacaatgacatataataaagacttaataaaaaagagaagacagatgtgagatgtatatataaatgtgtgtgtattgtatacctctctaacacgattgcaaaaggtgcagttataacagctgctataatatgtctatacactactaaaacatgttggctcatcccttggtttagagcagctttagagattattgacattcctgcatacccaaattgctgcagaatcaaagccacaaatggttttgcttgtttgagcatttgagctgaggacttcttcttattattattatta

SEQ ID NO: 298977 - DNA, 2750 bp, Cannabis indica
gttttactactaatgccttagaaaagacattccccttattcaagtttaagtaaaccttatcgatgattatcacgttagtgcaaatccagtgtattgataaattgtggaacttaatatttgaagcatataatcacaattactttctactgtgatgacatcaatgtatttttgaatagctatatgttttggtgtttaccaaaatttttagaaattaaaatattttagagctaaagaaacattaaaatggcaaaaaataagagaggaagattttttatgtggttcgagtgttaacacatcctagttcacgagtcaatctattagcctcattaggcaatattgatgaattacagtgttatgtaagaaaccctagctcttttttctcaatttattttctaagaagaagaagaagatcaaggatgattttaaaagagtttttgctatgtgtttgttggcttgtgcccttcacatgaaaattttaggggtatttataggctaagtgatgggtgtgggttgccccatgacccccttagagtttcttcttcaatcccactattggggtaaatatgtataatgtaaagctgattggctggtcctgtggataacattacgaccgtgcatgctgtaggtggataatggggaccattttgtaccacttaagcacatgccactcaaaggtttaacctttaaaattagaggacacatgtcattccaagttggttcctttttggtgtattagctgcttggtaagtggatggtggcgatgtgcgcactaccatgctctatcgtgagggatatgatcaaattctattaggaaaagtataactattgcttgatgacttagcatatggtaaaagttagtgtctacgatcacctatgaggtttgacatccgcatctggtccttctagaacatatttaagagcctctcaaaatgtgcctccttgttaagcccatctagatccaggtgggacacttttatcccactctttgagaagcagagtctgtcgtaagtaagcttctgtgtgtctttttccctaagtggctctaggttcaaggagacccttcagcgtctgtgtgtctttaaaaggctttaactcaattgacccttttccattaaaattccatgtgtcatttcttgcgtaaaacacatataacatttacccccaagctttcgagacgcaatgcagcccgagagcttgcagcccttctcaacttttaggaaacccatggcacgtgggaccatttgagattgtctcatacttcgagagttgtcatcaattaataaggcattggctgtaggcattaatagcatggaacataggcactccgttaaatgtgattgttggcgttgcgcgcgtgtgggaacatgtctcttagggggagttatagtgacgactgagtgatggaaatgactcttcttttaatgaacacactactcaaagcatgtaatgatgaatgttaagtgttagggctaaacattaaatgctaactttttaactccccaaccgttggattggaggatactcaatcaaaataattggggttgttcagttcaaagggtaaggacttcaaccggtacataagtaaatttcaaaagttcatttgtcttaaaccatagtgagtttttcctatcctcttagaactcaaagctcagaagtttcaactcaccgtaccccttgtttggtgaaaacttacgccgctgaagttgtcgcaactagacgttaaggtaagcattgcactctcgagcccacagtacgacatccgccttccacctaacctattatttggtaaggaacttgaagctttgttgacttttacacaagttcatttttgatgtagaaatgctaagttcaagctgggttcgatacttactacatgtcgaacttatagaacacttattcatagaaatgcattattaaatttggatagcatgtgcatctttgtgctttgatcttgccagtcttattcagatgggttgattacagtcatgccacatttctaaacaagcttgcacgactctaagagtgcatccaggaaaccactatactgacccattccctttatttttagataaggatgtctcaaaggtggatccttccatgaaggatacctagagtctcctgcatgcacccgtttacgggttcattgttgcatgtttattgaccttcctgtgttgattgtgcttgcaggtgtttctctaacagtaaaaatgctatgccctaggaaagagtccgattcaacaagctttgggcgtggaggagattccataggaaagaggaggaggtaggatatccaccctcaatgagccaacactccaccctcaattgatcagtcgccctttgtaacatcctccacatcaatcgtttcaactgcggtgctagcgacctacctctttttctgagatcccttcaataggcttcaaatttcccacaaaaattagtctagtggaattcattgctatgcaaagggtaaatgatgtcgaacgtgctttgaataagtagcacgaggaagaacagatgattttgcgcatgagagtaaatagactttcttctttgaagagcgctgaaacctttgaaggtctttttgtcactgttccccctagcccaatggtggacattaaggccttagaaaagtgaatggaacctaaggtagggagggaggttgtgttgggttttgtgtcctaaataaaacccatttcaatataatcagatttattaagtaataaagatcagaaatcacattttatgttgca

SEQ ID NO: 298978 - DNA, 4324 bp, Cannabis indica
  modified_base (249)..(249): a, c, t, g, unknown or other
tcacttaatatatatatatgaatttgtcattttatattatatatttggttaattatgaagtaatctctattaaattgaaccatacatgaaagcacagcctatccattttgagctaattagcaaagcctagactaattagtacaactttacatttgaaaaaaaaaatcaaattagatcttcattatgcctcagtaatatttgtttggctttggctgtagcctgtaatatcgccaatcactttttttttcncttttttaattggtaatacaatctatctaaggtataaagcaccaatgcaactgtagctcaaaaaaaaaaaaaaaaaaaaaacaaataataaggaatttattatggaatgtcacttgagcatcttccttcctctataaaaagacaaaaaatctacatagacaatgaaaaaatatagggaaaatactgtaaaaacccatattgggttcaactggcccagcatcaagggtaagagattacatatgctcaaagctcaaaactatgataaccatgaggaaagaagcaacaatggaagcattatgaacaagccatagttcacataagaatcaatatcttcaattctatcaatgttgccgttgaggttactcatgaaacgtgtgaatgggcacggttgttcctgcagaattatgttccttgtgttaataacaatgtcaacaagagaccagggtgcacggatgaaaatctgaacggaaaaagtcaataagttacccctggttttgtatcaggaagctgatctgagtctgatgctgtcagttttctttcattgttgttggttgatttatctggagagatcttgatatcagatttgctagaggtttttcttgatagagctttgtaagctgaatcagtgtgtattgtttccatgactgaaccaaaaaagtttgtgacaggtacctatgcagagtaaaggataggttagtaggataatttgacctcatttatgcaaaagaaaaaagaggtttgttacatacatagtggaagcttcacaaaaacaaaagacaaccaaatatttgtcttaatcatgtgaagttcaacaagggtgacaatgatactcaacagagttatattagtttagattagataattaacgtatattctataaataaacatgccttttcagttacattaaaaagaagatccatgacttctgagatgcaaaaaaagcagggtctaagagaaacctttctacctcttccaattgtcgttggtacagatctgttcgataatatgcggttgacatcagcaagtttgggttatatgatttgaaaagactgcccaaaaagacattatgcccacagttaaataggaaaaataattgctcttctgtaagaagttttccttagaactttgaaaatggaaaaaagcattagtccctcaggaaatgaaaaggtatttcaaacatgtgatttctgcaaagaagatacatagcttaaatttcaagatctacgcaacagtgaagagataagagatgtgatcattcaggtaaattaacatcaacgtacctgctcaatgaggcattgtcatacatattcagcctctcaaaaaaggcaagggtataatatgtgaaacgatcaactacagaaacaccaacctgtatttgaaatagagacagagaagaaatgatagcatggtcagcccggtatatatgttacttagaatgatcaggaaatgataacacattcatacatacatcagagtccaagtgatgagagtatgagttttctcctttcatgctactcccaatagtcaaaactccaggcgactgaagctgcaagaaatatgatgttttgtataaaattaaactcaattttcaggtagtcggttctaaatcaaatattggatattcttgaatcaaaatgttgaatacagaagatttgaggacaagcatgaccaagacaaatatcaatataatacatagctcttgccggaaaataagctgaagagacagaccgcggataaagcaatcaccatcaacatactttaacgtagagcaagttgtgaaagcaaatggagacagagataatttataaatttataaaatcaggtaaatctatgcaggcaaaatatcagtgtggcaaaattcagaactgaaagacaaatcaaatttcaacctgagagaagagtgtggcagcttggcaagtgtccaccataatcataagctccttaaatctaaaatcaatacacatacatgaaacagcatatgagttcctactctaaaaacaaatattaataataagtccaataatgtaattgttcaatagaacataacagatatgtacaacaggtaaacaacatttttcctagcaaagtgcaaaaagggaatgcagaaatgccaaagccaacaaacctacgcttttctttcatttgtttgacggcatcagctaagtcatgactttggagctcttctgagtcctgaaacttcaaaaactcatctcccccatgtcctgtcatatacaaaagaatgtggcttccctcatcacttaaaagacgcttagaccttggaacagcattttcatgacgcccggtcagtactcgtaagaaattttcaacagtcacttcataacctcgataatccacctaaataatttaataaatactttacattacgcacacgaacaagtatattaattaaaagcaagtcatggaacagaaaactaacctcaacattgtccccatacaagttaagcttgtgattctcattgttgaaaacttgagcaggatacttgtttctagcattacaggccatatcatcagccaacataagtattatcctctcatcaggtattcccagtcgcttaacggtcctggaagacaaccatgcaaatcatctattaaaaagagaagaaagatgatcacctggaccaaagggggacaaaatctttcttacttacctatataaggataaagtatttgccatatgtcgatagttaaacctggacaaagacatgtcaaataagtcaatcagtcatgactcatgaactacaacgattaaatcttcaattgccctacgcttaagtttatctaaacaagctcttttgcacatttaacgctgcctagaagagttttagttcattcatattgtatgaattgttgccaatatcgcaaatttgatcaaacacaattccataatcagacatccagttcaaattctggcatgaaattacaacttaaagccagaaaattaaggaaactaaagaaacccctatcatctgaaaagtgaaattacccaagtaacagaattcagaaaattcaagaaaataaaaacacgaagaaatgagaaataatattaagatgcatacactagatagtaagaagaagaagaagaaactaaagttgatttggtaccagaagcgagaggtgcagactaaaacagcccagttgttagtgtgcatagtggtctcagtttcagatgaagaagacaaaccagatgccacgcaattggagaaattactcaaacccagaaacagaagcaacgccagcaccgccattgaatccaaaaacattcgcatcttcgacggcataagcatgaaaatcacaaatgattatggccacatacaactctggtcaacgtctaaatataaaaaaggagttatatttggtccagcatttgagtgtaggaaggaaaccctactcacgccaattccaatctacaccattacaattcacaacttcgatcataatgggggaaacaacgaacaacctccatagaagagcttgatttacatctattatgaagggatgaatcagaacggaatgtgttcctgagaagtgagaatgatgaggatctgattagatcgccagtagagataggctaaagaaccttcggattttagattttattttgagaaaatgtgaatttccattaggctagcatctatcggtttgatcggttatttttctaaataaaaatgaattcgatttttagtttggattagtgcaatctgagaactgacacataagttcaaaacctatctgttctacaaaatataactacaactatacaaattaattgggtcgagccttgtctgccctttagtttgctctgtggcagtttgtccgtttttttcattttaactgtcttgctttgcatttttccccctcattattcgaatataactgttcccgcctgcttcctcttgcaattttttcttcatttctgggttcaaccaatgaagaatttcatcccaaccatgtctgatgcattgtcaatccgagagagagagatcattaacttgtccaacttaaacatccctcctccaaggcctgtcagtaatcgactgatctgtaggatattttc

SEQ ID NO: 298979 - DNA, 2292 bp, Cannabis indica
  modified_base (60)..(60): a, c, t, g, unknown or other
  modified_base (153)..(153): a, c, t, g, unknown or other
ctagtgttgctattataggaatttatattagtttttctttttcttcttttggtcacgaanagtgagaaacaaagatctagggttacccgaaacactatacaataaagaagttattaattatagacataactctcactgtgctgacaaattaanaggtataaaaattattgccaatatagagaaaatgaaaatatactttagcaataatgagccactgatagatttttcgatgagctcgcttggaactgaaccgatgaacttgtttcctctcaagtctctgaaatggaaaaaatgtgtttcttcgctcttcatcaaataaaaatatatatatatatatatatatattcatatcattatatatttaaattaatatagtaaaaaacttacaaaacttttaagttctgcagtttggaaagaaatgcaggcaccgatccacttaagctattgtttgataaatctctgaaatgatatatagatatatataattattggtactaaatctctttagtaaaattttattatataaattcattataataatatatgaacttacatagattgtatcatagtaagatttgatatagaagaagctatttccccagtcaacccacttgaggataagtcactaatacatatgtatgtatgaaatagtagagtattagtttacaaaggaagtagatcgagttagttggagtagtagtatgtaaaaacattattatatggtaacaattaataactagctagttaataaaactaacttaatagttgatttcgtagacttacaacgaaacgattcaattggatcttgaccagtaaagctgcaattaagaccatcccagatgtaagttttcggagcacatggatctccttgccagtttttctgaacatcgtacgtagacttgatattgaacattgcaccaactaccaaacaaaataaaaagttataatataattagcttcgttgttactattttctgaatgcaaaatatgttcgtactacatactgcattatacatatattcttaacaagttacaagccaactacgaacacagatttttatatatccatgattttataagagattatcataggttgattaattagagcatttaccaaaaatcttctaacataaacataattatggggatgtttttaccatttcattttattaccaactaggtagctagtctagttaaccaaaaaataaatgctaattagaactttttgtcctctaaatttaaacatgtataccaaatcatgttctttcaatatttttggctattaaaaagttttgttgaactattgagattgttagatataaagatttttgtctaatttcattcaattttactactatttcaataattatttatgtactaaaccatacttcccatactttgatatatctaccaaatcatgtccctcgaattttgacatgtattaaatcatgcccccttaactttcattcatgttagatttttcttttttactaaaattagacaaaaatccttaaatccaacaatctcaatagtttaaaggtagttttaactaccttaaaagttcaatgaacataatttgatacatatcaaaattcggttgggcaaaaatcctaattaactaaaaataaatagtcaaattatattatatggcaacaaacagaagaaagagataaagaaaagattatatattgagcaccagtgctcctttatattttaattaaaaataaatgtaattggctaaaaatcaaaagtgtctaaagtgggttcattgcgcaactattttttcgttgacctaatcggaattgataaataataaaaaaaaaaacataggtagctaatattaaattgccaattaatttaatactgttacactcgctttaagatatctctattattattgatagcaattaagaagaaaccttttacattaattcattttagtatccaattatttgtagttgtgtgaaaatgattagaccagctcccacacagtagatgtaaaaaaatttatatgtttggcaaaataatagtttgtaatatatttgtatcgacttttagtattatactcgatcgtaattatgtaaaatttaaacttttcataaaagtatataaaaaaaattataactttatcattaatattattatttttatattatgtaaaataataaaaaaaaaattaaataatccatcattaataatataactaaatatattaatgaaataataatgtgccataaaatttaataataaaattatatatttatggtgatataaattttagggtgattctac

SEQ ID NO: 298980 - DNA, 759 bp, Cannabis indica
gatgttaatgaaacatacttgttagtaaatctggatcttggtaaaacatattccagcagaagccattttgatcatctctgatttggatagattgttcaggtggcttttgatgcctgctgagcatcgtcttctcctttcgcacctgttgcttggtggaaacttccttaacgacctaattagagtcttgtgcctctttagatgggtaaagatggtacaagtgaaaatttgcaatggtagctagaagggaaatgttccaaacaaattctaacaatcgatgaatcacttgggttcttgacctttatcccaaggtaaaaggaggacgatagtaggaggggatctgctggaaagaaaggtggtcggcatccatgtctttaacaaagtaatagtcttcaaggaagtcactgatcttcaaaaccttcttgtgtatggtactgctctgccattgatgttcattctgagaaaagtaaaagtaccccaacctattctatttcaagcatgacttcaagtcaaaaagctagttggtctcgtgggtagaagcctaaccccatctgtgtttggcgtacatcacaaacaatgcaaccaaatctttgatgcctttcggagcaaattagatcgagaaattttgtagtaatttgaaatattcttaaagtatggatgcaagggcaagattacaccctgtctggcatagggccttgaccgtgcagataaccctctctttgttgggttttatgccttaaataaaaccccatttcaatgtaa

SEQ ID NO: 298981 - DNA, 1312 bp, Cannabis indica
tatattatttcatgagctacttaataatttgttcaatatcatcattaattcgagaaacaacttaactataaataagtagtagtaattaattagcatcatcctcaactttaacaaaagaaacaaaaaaaaaaaaaaaaacttcctaccgcacataattaatttgtagttattatttaaataatttacgatataaatatttaagtttaatttttagcgataataatatttaagttataattctaaaacgtatcaaacttaagttttaagtaaattgtcacgcgacaattcctatggtgtaatttactcttattatttatcaactatcaattaaatttgttttttggtgacatatatttttgtgggccttgaccaaaatgactctgattaaatttgtcaaagtataattaatataattggtccaagtatatataattatatattagtataataataataagatggaaaaaagaaagaaatatatataagacctggagagcaactttggattgattgaaatgaccatttctccccaatctccaaccaccaaaatgctaagtgagccatcatctttgggtggatgttcaaacctttcaagctcaaccaaactacttctaattatcatacaaacaattaataacaatcaacaataatgaccactttctttgatgatcatgaacattatttcccaaattaaccatgaccttttttttgcactacttaagaatttgtagtagtaaattaaagtacaatgacataaatgtttatgattcctccttcatatatttttgtgtacatttcatgaccaagtctatgaattgtttctatatttggttatgggatatacatccacaaatactagggagctagtggtgtatttcttacttggattatgcttcacaaattgagtgagtgacaatgcaaagttcaaggaagctagatagactattttaagaaagtaaacatgatttcacaaaaataaataaataattaaactttgaaaaaaaaaaaatgaatggttatatattcaaaaatgattatcatgtgctgaagaagcaaagccaaatcatcacaaacaatattccattattatttaggtaaagaggagcttgtatatgcatatacttagttaagatcacttgtccaacttcatattaatattaagagaaatggtcaaagaattaatagtttctagcacttttttaattgttttattactattagtgcaattatatatgagaaacttacaaaaatactggaattttggttaatttttacaaaaatactgtcacacggaaatttttcaaaaatactg

SEQ ID NO: 298982 - DNA, 2852 bp, Cannabis indica
gccccttaaaaaattcttttttaatagaatgtgctttttaaatgattataattaagggcacttttgtcttactcttaatttgaaaagttgcatgcttcgaattttggcggtttatgattttgaggcacatcattagcattaattgtccatcttttccaattctctcttgtttttgagctgttagatctttacttttctaatgtagcagtgatcatccttaaagtataaagcttgagagaagatcaccatttcaccatttctgtgttcaaaaaccttcaagcttttctgcaaaaaccattttcctgattttttaaaattttgcatgccctctttttcattaagctattttctgcgaatttcttcagacttagtcttcaacttaagaacttctcagagttcatttagtggttcatctcaatcccagttacagaattcttccttgtgcaaacgtccatctctaactagtaagttgtttatttttttttcatcctagtatagttatttatttataactaattgcataattattctcttcgcttggttttggtagtttcgacttaattttgggtaatttctagggttttaatagagaaaaacttaggttttattgtgttcataggtttctagaattaataaatttcttccagggattgcgattgttctttttgcaaaaaatgtcccaatttggttttgatatttactctataaaattcgtagaagcagaatgtcctaaggaatcgatcgtcccattcaaacccaaaattctgaaacctcaatccaaacttgagataaatgatgcaaagattagggaccatttagaaaaaaccagtcaggatgaagttgctagttgctataggcattttctacaagagataactgagggtaaacgtcgttacttgcgagatgcagcatggcttgaacctcattctttatcttctattccattacggagaccaatgtttttacccaaagtcactattgctttttcaccaggtgaccttaattttgaaattatttctactaaacctcgtaagtcaaagaccctacaggatcctaatgtcacctttgaagctgaactcatcgaatccaaggtcagaaccaatggagagtatgtaggttgtgttttagagtcttgtggtattgaacaaaggcgaggatgtcatatcaagtccattgctccaggggaatttagctgcttccctccagaaagcgttattcgagaggagtgtggtggtaccagtattagtggcttgtctgggataggtgcttggaggctcaagcacatcaaggctggagcggttctccccttgagagattactacaaatagttcattaactatcttggaattgctcctttcagttggttccaatttcttacagaattcttgcaagtctaaaggttttgtaccacattttaggatgggagtgtcccgctcctcttgaaattgtatatttttactctgtcaaagcagtccccacgaggaagcaatgtgtatggggcttctattatctcgagacccacacaaacgaccataggattgtagtgaggtttccaaataagacagattttaaggagacttttttctggaaaaccggcctttctcctatcaacacaattgcatttcacatgatacgtaagtaaactttatctcaaaaacttgagttattttcatttttacggctttaagctcgctcacttatttcatttgttgtgttgacatcagtcactaaaagaccaattcctactcctaagatggtcgaccgccataaaatcctgttgggtcttccctttagattgggatcgactcattttctcttgaatgaagccaatttgagattgtcagccttctcggctcagatgagtacacttgtgactacaagtttctaaagtactcttcgtgggagaaggtcccagtttcagctgacaaagagagtcaggattacgtggcttgcatacactatcgccagggaataactcctcaggaagctaaagaaggaacctcccaaggtatataatcaatgtggatggtcactaactgtgcttagggcagaacgtactttgcaagtaacattctaagatagctgatataatttttacacttggaaccctttcctcgtaaactgtatgtcacagaggtttgatagttggtatcctaggtttcatgtctagcttagttgtactagttcatattatgggatcgctgagcagtatgggaccaacctagacagagcaagccacccatattaaaattggatttagatccaattactattatgacatattcatgatcacgggatctagggaatttagtaactataatagttcgtcctcgtcatcttttgatgattatggtaactctctttaagtgggagtttgttccctattttattttcatttattttttgattaagtgtctgatgtatctcttttgtctcacagatatggacctagacttcgagaatatgttcaatagcccccgcttgttgaaaaaaaagctaaaaaatgagctgccaggcaaacgaaacatcgagttctattaaagagcccagaaggacaaaactactaccaacaagaagaagacctcaaaccaacttactatcaagctagcagagtctccagataaagctgcgcctactgtggcgtgcgccaatgaacaacccactgggtttgtacatcaagtgaaattctctggttctaacttggagatggttcttctcgagccctcctgcccctttcccctcgaagttgggactgaaggttcataactctactcgctgcatgctaccaacagctggcgacactatcaaacctttgaatccaatgactgggatgttgggttttatgccttaaa

SEQ ID NO: 298983 - DNA, 6590 bp, Cannabis indica
agtcccagcgtaaaaatcagaaatatagtgaagaagaagagactaattatggattgatatacctctaatcatgaaagtcccacacaaaatctctgtatcatctttaccaaaaagaaatagtaataaaataaaaatttgaaatatatattatctcaaccaagcaaaattcaattttaacactatattataatttatgtttatttatttaaagaatgtcaataggatggacaaaaataaataatagttgaatcaatcaatcaaatcaatacagaaaagattgaattaaggcttccatagtttgattgtgcagtcctcagcatatgtggccaccaaatttctatgtgggtgatgagctataccaattacatctttgtcatgagccttcattattaggtggtctagtttaccagattgatagttgaagcagtacacattcctgtcttcaccaacacagtaaatccattcccctttaggtgacacacaagctcccacaaaatctccaccttcccttttacctgatgaaaagctcttcacaacctgtccttgaagtgtcatgatgtatatacacgacgtcttattacatacaatgatgtgttggtcgctattagaactagttttggggaaaagatgaagagaattgacacacgcatcatcgcctccccttagaggaggaggcggtttgaaggtgtgtagacattgcgtagtcttcacatcccacactttaacggtggaatcactagaggctgtaacaacgcgagctccatggtgtgtaaagattgcatcatttacataagatccatggcctcggaattcctttaacaatttgccagatttaataccatgaatccttgctgtgccatcaaacgatgtactcagcaactgcgttccatcacgacaaaagaaaacactggtgacgccatgagaatgtgcgcgttcaagacggcgcaagcactgaccacttcttatgcgccaaactttgatcttcccatcttgtgatccagacgcaagaacctccgaatccctactgaaattcacacacaacactggatcatcatgcatcatgaaagtttcatcagcctgatactgtaaatccttgttcaatttcccactaacacaatcccaaacctcaacaaatccatcaacagaggaggaaacaagaaactgtccatcaggggaaaaacgagcacattcagcatgactttttgtgccaaactttatggtatgtccaagagttgaggatgggaatgaaaatgtgtcttgttcttcttgtttcatagcagctgttcctctaaataagtcaaatttgtgtgtgtctgggggaaccaatccttggtgttgttgccacttcaaagactgaccaataagagccattagccttgaaggtggtacaacactaacctctgctgcaagtgcttcaccaatttcagctcttcttttctctttggttgactcttgataagccttattcggatcaaaatatgttgtcaccaacagacgttcgagcctcaagtatctttcaagttgttcttgcttcatcacacaacccattacctgagtctgtcttaagatagcacgagcggtatccaattcaccaacctcaatcatttcgaggacaatctgctcgtacaagtcctccaatttattctttggaagtttgagttgagcaatttgagggagtatcacatcccatcttccattattaatatcaccaacaaatgtttccatgttatctactgtgttcaaacatatttgacactcattctcaagtgtctgaaatgtttggtgcaatgaattttctttacaaaattgaagcacaattttgatcacatctatagcttcgatttctagactagacattttagagggaaatgggaaagaagaatgagctgagatccgagttaccaaacaaaattctttaatttctgagaaaagaaaagagtaatttatcttaatcttaaaaaaaaaaaacaactgatgttctttttatcatttttataaaaatttaaaaaaaaaacaaacaaacaaattactaaacaaaaaaagaaaccacccatcaaaaattaaaaaaagtaatatcaactcgtaggtacactattttaattacctttttatttttttgtagtcaaaaatcaacaactaaattcctaaactaactcattactgaataattgaaacgatttcagctattttaaagggtttatatttttttaaaaactaatactttaaacgaactcagctatacagtggcctgtaggttatatatttatatttaaaaattaaatgcaggtttcaaatgatttttaataaaaaaaatatgtttaataatttaaaattttttatacgagtaatttatttaaattcaatttatttatacgtttaatttttttttattttctattgaccaaccttttagtcgttctcaattcattatccttgagatctttctcatcatagtcctctagattcagagttgtgtatttcatagccatagcaatcgaaaatcaaaattcacttgattgtattctctttacacttatttcttagagatctaagactcaaaaattaaggtatgctaattatttgtacatgtgtttataaaaaagtatactataaatattgaaatttcgattgttatgtttatattaataggtgtgagtgtgaggtgattattttgaagtataaattttattggacaaaagaaggtttgataaaggggatattgagcttttttataagattatttttaacaaaattaaaaaattaaaataattttataaaaaggttatttggtaaaagtaattttgaaagagggttatttattttagctcaatattgatgagtacctaatttcaaaaatataactatatttataactatattttagagttagtttggagcttattctaatagtttttagagttattgttttaggctattccattgattcctctgctgaatcttattcaaggtcggtctcacaacgtcagtaaagattgattcataatgcccaaccatctgctgtcaatttattcacatgaaaatcataactagcaacttgttctctttgttccaacgcatacgaatcgataggacatgtcttatttcactgcaactgtgtgatatcctataccagttggcagcaacatgttcgaattctgaattagagacgataatatgtttgaagcggtctatttggatggagagatataaagagtttcatggttctaaaactcagcgagcagcggtttttacttcgcttgcaagactcatttgcgggtgattttaggaaagcataacttggaaagcaaaatcaagatagtttgggagccatcttgatgctgcactatcgaaatcaattcaccagaggaaatggaagccattagatgtttttaagccttaaaacattaatttctcatgcatactgagatgataataaagctgctgatagcctaaccaagacatcctatttggttactatgaagagaggttatacaaactatcatatattcaattttttttggaccacatatggcattggcaacatgccattaatcatctaaagagaaaaataataataataataataaaatatttatataccattatagcagcaaaatttgtctaagaaatcaaattataagaaaaggaagttatagcagcaaggtaagacaagttctcactctaacgaagctacaaacattacatataaattaagacaaactcactctttacatagaagccaaaagggttctcatttcttcaaccgatgggatgttctcagtgggataaatcttggcaaccagttgtgcaaaactttcatatttgtctagaaactccttcttacacttatcccataaagaaggcaaaagttcctctgaagtcaagtacttctgcaacttcttatacattaaagcgatagacttgtcaaccccggataaactagctttcaacatctttcgaagatccattttcgacaaaccaagctggaaagggatctcttcaggtgtgattgtgtacattaaatcttctattcttcgtgcaaactggaaaagcctttcgaattgactgtaaataattgtgctgatataacgagtgcaagcttgctcataagcttcacttgcttggtgatagaacttggctagtgtaggcacaacattggctaaatcatacaaactattctgaaatgcagcataattctctaaaagaatgatatcagcatatttaggatctgtttgagcaattttctctaaagtcacaaacattatgcttacaaattttgtgtatgcttgatcaaccaaatccctggattgtccttgaatgtactgctccatccgagtagcaagagttgcaaatcttggaatataggataagacacccatttgtcgtacattgcgttcgtttctctcaatttggtgacaggcttcatcaacaaaacgactgaactgcaaggaaattctcgactccaagtccccgagcaacaaacgcacaaaacctgctgcgtcggctttctgccccgagagatagcgctctgtaatcccatgcattgatatgcaacgtaaaggatcaatcttgtaagcccaatctactacagcataaaagtcttcctggatcccatccagcaaatcctgaagagattcattcagtgctgctaactccacagacgttttactggtttttccatcattttcatcaatgtccatgatccccaaatcatcatcatccccgtcatcattgttcccagatttattaccattaccaacacctcctggaggcacaagtgtaggaacttcaaagcacatgaagtgtgcgaaaaaggaactctcatctacaaggagcgggataaaaatcgtcagcattttagcataagcttcagacactgtagaagtatctgcagcattaacattctgtgaggatcctgtagaagcttcaagccagacagttggatttctcgacgcttttgtgctagcacgaagctcgtttgcaaattcacgagcctctcgacgaagaagcaaattaagggaactacaatatgctttcctcaatggccccaggcagttattatcaagactcttcaaatgttgtaaaagcctagcatatgtcctgcatttgtaccgcaaatcagcatgatcaggtctcttcaattgtcccttctgtgaaaagtaactcttgtcacttatcatgaaatcaactaaactcgcaaagtaatttcgcagaaactcagaagctctcctaacaaatgtagctttcaatttctcaagttcagctcgcttttctttgacagctctcatgttagcataggtaggatccaaatgaggtacttcaagaccgcgtaaagcaccagccaaccattcacaggcttctacattctgaaccatacgagcctcatcgaataaacctcctgttaaacaagctgcatactcagaaggaacacgcaatcgctcaagaagcttatctaactcctcaatgagagctttattatttacagattgcatctctaacttgttattacgagtttcaatcgattcaatatcttcctcatgtgtctaagcttcacattaaagattcctaaccattcatccatatcatcaacacaattcgaagctacctcaagcccttgtaatacctcatcaatcaaaggttcactttctaaaatggaatgcacatttgcagcttccaaagcatgaagctctctcttcaacctttccgaaaaggcctctgcttcaccaatacccataacataagtacccaaaagagcctccccaacaatatcctcttcttcaatttgagaaacaagctctttctccacagtaactttcgaatcaatttcagttactgttgttgaaacaggaccatcttgttgtacaaccctttgatttttcgtaacagcaggcttattttccttagcccaaagagccatttctacaacatctataccaacaactttaggaagacgatctaacacatctttgcaaatgttaagaatacacaacaaaagacgattcctatcatcgatatttcgcattgtccactgaggtggagcaacactctggcttctaagattatcaaatcccaacgtgaaagtacacccagtgggatcatttgatatgacctcaatcttcgaaagatgttttagtttatacaattttgcaggctcaagtactccccctgtggaatattttaaaactcgaagaaaagctttagttttctgacctttggattttgtggaaagcgcaagaaccctaggtttccccatgtgacggccaagcttgccggatttaccccagacgcctcgacctttgacgacacggatcgacatgaggatactctgtttggtgccttcgattgccgcctcacaagctcgcctgagctcatcgtcgtctgcgctcgatttcgccatttttggtgctccttggcagttagatctcaatcgagtttctcaaactgataatcatattgttattctctctatatatatactagtgggtgattgttacgtgacaagccacatagtgttagttttatttaatattttagttttttattttaattaataattaaaatagtataattatttgaacaatttgttttat

SEQ ID NO: 298984 - DNA, 2736 bp, Cannabis indica
aatcacgtaatacgcctatgttagttagggtgttacaacgtgcttcgagaaagcacttagatcttggggatgtgagatgacaactagtttatgttagtgggatttccaaggaaagtgtcatcattaattgacctcaatcccatacacaacattaaatgtgagccctctgtatacccagaccattagatctctttgtatttttcggaatgtgatatggatcgtcagattttgaaagcacgtggattgccgatttgatgtataaataaggcgagggacgactagttaccacctttgccatttcaaccctttgagtttaaattttctcgagagagaaaattggcgaagtgtaagcccctaaagtttttccaatgaatgtcctacattacaaccaagattctccaccttcttcttcgagtatgatcaaggctacacccatatgcaccacccccagttttcaccattgatccttcaaagccatcaagctcgttggatttccaagcaaaagttgatgaattattggggcgtgttcgagatttttaggtgaggctcaaactccataatcaaatacccttagctataatttttgttcgtaagtatctttaacttcacgtttgcaatttaatctttctcgaagtcattacatttagaatagaaattgtcggtgactagccatgccgtttaaggtttatatggacttctgttgcatgctctgtcttgatgggcggtgtttaggacatttgcttgtcactgaaacttataggttgactagagtggagaagtttagaaactttgccctacagtaggattacataggctctgtgaatactgtactttcctctatttgggacccttacggtgtcggatgagccattttgtgagactttatttcatattcttgtgttcttgatctcatcatctcgagataatgttccccgaagaacttgtttctggatgctaggtccggtggggacctctacaagtagttatccgggaggactctcccatacccttgctattatttgttagtgtggggcattaactgctttgtttttttttccttttttccagtttctaccatggctaaagcgagtatattcgcaaagtaaatgattattgacaatgtagataagatagttcaagaagctcgaggcatggagcgagaggcaatgactaatccatattagtgggagatggatcaatataccaacacgttccacaaccatctaattttgttgcgccgtggtctccagaatattcctaacttgttttggaaaaggttgtaactgtagggtgagtcgccctactctggcactgatggctttggagcctggagctaggaccacactaaagtaggagcccaccttgtgcttcggagttactttactcacttttacatagtgataggtgtgtctccattttaactaatcccgcaagtgtacagactacttccgggttggtatgttctctacaaggaccagctcatagaggtcccatctctcgatgtagtcttgtacatttaaagctagaatcaaatccaacggggaaggataagactaaaattcacttctactcactgaagaaacgatctaaagtgacatgcccaaccaatgcttgcaaacatactcatgacttccaagaatactggttttccatgtctggattccctccgaagtggcatctaactttctcactagacttctacattgctggtaagtactgaaattttcttaattgcctttctttaagcattctttcaggttcggtgaagtctaacacaatcatccatctttttttccttctaaatgatatccctcatcctgaactgattagtttcctatatgagagggtgaggctttatcacaacacgaatatggaggcactaaaggttgagggttttgttaggatgtacgctctgaaaagcttgtaaagacatttctgtttataaatataagttgaacattttcatgtgtgcttaaatgttaaattataaatatttaatatttaataattttatatctatataaatatcaaaaaatttcttattcatacatgaggctgtgtcttgtattgtatggagaagattacttagccatgaaaaaaacaatcagtaacatattaaagttttgggatctttaatcaacggttgatagtgcgattcactgatgcctattattcggtgtaactaacctcgattctgattactaatgtagtaggatatctaagtgaaggtgttgtatataatagagtttatatatgacatggaccaatatgtaagtaagttgtttttatcaaacatgtcgtttactataaatgcctaattcatatcatgaactcatgctcatgttattaggttctttgattcactcgttcaagtttctcagagaagataattcttacaacttctattttaggaatctaataatatggatggctgggaacatgatctataattatagaatcttgactttcctaacggatcgaatgttggttttgtttaagtgttaattctaaaactgaaaagttgtgcacaaatttagattggatctaaattatactttcactagtgaattaacagtactaaaggataaacaaataattagacaggtaaaatagtaatttgaccaaaacttattacgaaccgatacaaggagggctaatcactgaagttaattatatcaatggacattgcagtaaaactcagtaaatataattctataattattaagagtttaattc

SEQ ID NO: 298985 - DNA, 3283 bp, Cannabis indica
tgtgagtgttggaggtcctgggttcgagtcccaggtaaacaatgttgtatatataaacgcttaaatcaaaaaaaaaaaaaaaaaaaaagagatacactataatatttaaaaaatattgaaatgagacacccttcctgttaagagtcttcccactaggttattagcctggaggaatattgtctttaagttcatgatattagtacttacactaacatatgtttttcagtatatatttaatttggttcaacaatttttatttttttttaattaagcttaaattagagtttaggtgatttgaaaaaacagttattacaaatagacaatactattagtccttttgaaataaaaaaaaatcaccaaaaacaactttgggagactagctatttttattattttaattatgagagggtcctttttataatatttttaaaagatggtcaaaaatgaaatttgacaatatagaagtgattattttttttaaatattatcccagttttattcactaaaatttaattagtgattcttactcttttttagagagaaatgatgatatccttaagatgatatttttctaatcagaagttttattgtgacaataagtaatgtttacatgaagtgttattgggttttgcttaaacccatttataagtacatacttcattacacttacacatatgttttgcttaaatacccacttacaaacgtgtgttttcacatttaccaagttgcaactctactgttttttcaaataattattggcagtatttattttcaataacacgtattaaaatgaataatttgatgaaattaatttcaaaacaagaataattaaaattgaggaattacaaatttcatgggttttttactatctttgcaaaaatatgttttttttttcaatatatatattttatgagaaaagtttcaaaaaaagaaaagttaaaaaatattggaaaatttaagtgactaagagtaaccagttaccatatgtttctttcatatatttttaatttttttttaaattttcctacaaaatattttttttttcagaaaaagtcatatttttgtaaacttatgctataaaaaccataaaaattaaaattactaaaataccccttagtttatttccatatttactttttttttttttcaaaagtgtgaaactaaattaattatgtaagagagcacatgtttcttaaaattatttattttattattttttttttttgaggaatataacatttttattgattaagagtaatagacaggaatcacagaaggatttccctcccttgacaagaaacttcaaaatggctagaaactctaacactcttagctaacccatttgcaaaagagttcaaaccgcgattaatatagaagaagctacaaacagaaaaaagtttaatgaagtctagaatataaaaaaaatattaaaagacttccaatttgggggacactttttgttcaacagagcttgtgtaatcaactaggagtcaaaaagaatgtgaatcttttcccatccattctccaaagcccaaaagagagccatctggatagcacaaagttcagcctccataactcacatagctgcagttcgaatggacttataagcccatgaactgcttctcttgttcaccatgaaaataacgcaatctacatcagtacataccttctagcttaccctccacagccatcgatctttcgatactactacgacttcactggttcccattcctccaagaaatccttactcacccttccttagatctcctcaaagttcagcattcagctcttcaaacaccaacaattcctttgataccatatatgttcaaacatgcgcccagcataggtaatcatctctgatttgttgatggtagagattacagtgatcaaattcttgaaaaaatagatcatgttttctcctaggaagagctcgatttttactgggaatcgtccagaaaaccacaaagctcttgcaaattgacagtccctaaagatatgtaaacaactctcgatagcctcaccacacaaaagacagtctttgtctacaacaaagttgagtctatcttttgtaggaatttcttcgttaagaactctccaaagaaaaacaaaaattctgggatgaatttccgattgccatatccacttccacacatctttctttgagtcaaatcttatgccttgatcaactccataacccccttgacagagaaggatccatcttgagcaactttcgaaactattatatctttatgggaacttggtaatcttggtatgtctagaatttggttacccaactcagacccaaaaattgaagttaccatttccttgtcccagtgatgaccctgagatatatctgctatagttttgactgtaaacctcttcaatctcagcaatgccattagattcctgaattctggagtctccatccaaggcatccaaggttggttccctaaattaattgaactctcatcagccaccatagccatagaccctttcaaaagaacacttctaacatccataaggcatttccataagtaagagtcattagctttttttggtacctaccaaaaattttcatgattgcagtacttgtgaagcaaacaattcacccacggtttatcttcattgtttgcaacactccaagccaactttgaaagcaatgccctgttcatgtcctcaaacctcctaatacccaaccccccctgaagacttaggttggcagatactatcccatgacttcaaggctagatatctgtcattatccacatttccaccccaccagtactttcgaattatagcatcgtaatctcggcagattgagactgggactttgtttgttgacattatctaaatcgacattgaggaagcaaccgattttattagtgtgagccgacctgcatacgacaacaaattcatcttccatccttcaagctttcgcatcatactttcctttagcctttcgtaattttccttctttcgtctcttgaaaaaccaggtttccaaggtgcctttcttctccttcaatttcctctatagcaagagcctctaagatatctcttatcttttcatgaggcaggttccttgaaaagagagcattagattttgctttgctacaatgttgcccagaccatgtttcatagattctaagacgctcaagcaagtttttttcctctgttttgtttacacgagaaaatagaactgtgtcatctgcgaacattaactgagaaatacggaggggcgagatcttcctatctgatggcaattataccagcgggttagggta

SEQ ID NO: 298986 - DNA, 5365 bp, Cannabis indica
tctctctctctctcttcaattctctatctcaaagtagtgaaaaggaaagctatttataggcctagcataccactaaaaacaggagcaaagaacaactcctaatacccgaagtaactgactgtcatagttagttaagttagttgtaggctggtttagagaatcaacttccatagacaagttagcatcgcttcaactctatcctgacttggttagtttattatgtggaattgctccagaaacaattggccaactattttttgaatggactttcagctctcgatgtttagagaagctaaagcaatcattgggttggagagtaagtaacaaacctcttcctggattgctccactaggtctcctgatcaaagatctcaaagtttaaaaaataagttttggttgccacaatagctggttttgtgagatggatttgggtgaatagaaatgactacttttgaaaatagttaaatacaatattagacatacaattacaggtttctgaattaaaaagattacacatggggaaatagcatatttgttgctgtataatttttttttttagaagatcagaactgtaacacaaagaagaagcaattgagtccaagtaatgggatttaaacaagatttaaaacacaattgttccaaatatactcttcatttgttcctaatgcaacttgagcgagattatgagccaattggttgtgagttcttgggctgtgatggattgagacattaggaaaatgtgacaaagagtcgaggattttccaaaccaaatctgaaagagctgagtaatatttttttgttttaagaattcttgatactaagtccaagcaatctataatcaccaagataattggaaaatggatagctttacaccaaatcaaagctcggttaagagcctctgccttagcaaaaataggggaaagacctactattgttcgattgtgagagtcttgcataaccatacccatgcttgttgcctcgacttctaattgttgaatccacattaagcttgtaagttgctgaagtaggcaataaaggaggagatcttgactgagttccctccacgtcttggaattggttaattggctgggaggagaggttgtcttgtgttgatatgtattcctgtaaaaaaaagataaaaatatagggttctatatttaaagatatagtctcctcattagcgaatagagatttgttgcaaaagttccagatgctccaagtaataccaagaaaaactaccaatttgtctttttaaaaagtggctaaccctcttaaaagaaattatttgatgtgaaaatgcttatttttattgtaaaaggtcaagaaactgatactcttccaacattttcgagcccttgaacacttttacaaggagtgcaagttggagtcaagccggctaaaacacagggaggaattttttggaataaaggttgaggttagaagggagaaagttatgaaaggctctccaaatgaagtgttttattttgggagggatttttaaggaccaaacatttttcgaccactggtggaaaacattaggatttgaagagcttgggttagggttgttagaaaaggctaaatgatatgaagatttaacagtaagagaacctgaaggactatgccccctaatgagacattcctaaatagaaggagtaattgggattttgaggaaagaatctacaatgtccttgtcaaagtaagagccaagttttgagatatccttatgattttgatttttgataaaaaaggaaacagtatccccaagagggatattattattttttaatgggaaagatttgaagccaggaatccgattcgggcttgatatttgaatggatttaccattccccaccttccaaattaacccttttaaaagaaggtccctactccaaaggagacttctccaagagaaagatgggacatgtccaagatatgcttgaagaaagtcgttatgcctaaagtcttttgcttttaacaggtaggccacaagtgagttagggatagtgaagatttgccaagcttgtttatcaagcatagcctggttgtgatggacaatgtcaagaaatcctagaccccaaaaatttagattcgtaaatcgaaggccaatttttccaatgaactttgcgtttattattacccaaggttcccaaccgaaaattggatatcagcttcccaaaatgtttacaaatagaaaggggaattctgtagcaagacataacatacgaagggatagcttggataatacctttaagtaaaacgtctttaccagctctagagaacgctttttggttccaagctgaaagcttattgctgactctttaaataatgaaaaggcgagaggattttttagagcggttaaaacattgaggaacccccaagtatttgtcaataaagtgtttgtcttctatttggagagattgaaggaaagagaccttggcttggggcttggtattaggagaaaatagaatagtggatttggcaaggttgacagattgtctagtagctttattgtatatgtcgagcatagctttaatggaaatacaattatggttattgacaatagtaaaaagaagactatcgtgagcaaataaaagatggaaaatcgaaggagctaagtgacatatagctatacctctaaactgattgtcatgggatttggaacgaatgacagcaaaaagaccttcagcaacaaggagaaacaaataaggtgaaagaggatcgccttgccggataccacgagtagggagaatgggaggggaaagacaattgttaacaatgtctgatggaaacagtagaaatacaattgataataagggtaattatattatttggaaagccaagataaattagaaggtgatgaatgaaaccccactcgaccttgtcaaaggccttttccatatccaatttaagagcagccccacccactttgccatttttcctattgttgatggcaataatgatctcattggcaatcagaatgttgtcaaagatgattctattggcaagaaacgctccttgattatgagtgatgaagtcagggagaacctctttcaacctgttagcaatggatttggccataactttgtaaatggtagaacaaaggctaatgggcctaaaatccctaaccctgaccgcattgttctttttgggaatagagtgatgaaattttcattgatgaaagccatgctagctccgttgtttaagacattcaacacttctgaacaaaggtctttacgagaagtggactggttcttgtgatagaaaattgggttaataccatcaggaccagaagccttatcccaaaaagttggtaaagagtagatttgacttctaagagagaaaagggattagcaagaaagttatattgacattgatcaatacgtttggtattgcccctgagaatcaagttaataaactttaaatcagccccattggaagtgaaaagatcgaaatagaactggacaaaattgttggtaatatcagcatggttgtaaaccgtgacattatcatcaaggatgagacttttgatagtgttatttcttttcttagatgaagctttagtatgaaaatatttattgctcttatcaccaactttaagcatactaaccgtagagcgctgcttccaataaacctcctccttaagcaagagggtgttaatggaagattgaagattattagctttcttgatgtcatgagagataatggatagttgagagtaaatttgattaatggcatttagactgtcaataattttctttttaagatcagctttgtcattagcccaagatttcatgaaaaaaatgcagtttacttacttattaaggaaagagtcgacggtggttggagcattattagtggccctattagaaagccaactgttattaataaggtgggagaaacccaactccataatccaatagttttcaaagaagaaccttttgtgactttgaataagatggggagtaggattgtggaccagtttaagagcacaatgatcagatccataaatgggaagctgaaaaagagtcgcattggggaaaatatcaagccaagactgattgataataccccaatctaagcgctctaaagtgttgccatgtttccaggtgaaacagttacctaagtaatgcaaaggaaacatattgtatttataaagaaagtgttgaaaattgtggattgcgtggggcaggggcaaagtgttagtattacgatcattataacccaagtaattattaaaatcacctataataagccatggggaaaaaggaagcgtatcaaaaaggcgatccaacaaaacccaagagttagacttttcattaacatagggagaaccataaaaacatgagaggtgataataattatgagatttcttaaaaacattacagtcaatatggccaaatgagtaagataagatattcccattcataacatcatttcaaaagaaaagtaaaccacctcctaaaccatttctagggacctcaaacacattatcaaaagacaatctagctttaagcaaatgactagaattagcagctagcttcgtgtccatcacaaaaagaatttgaggttgatgttgcttgatcaagagggagagattttggaatgctcaggaattctataatccacgagcattccaactaatcatactcatttttctaggtggggttgcctagcaacacccgcctgttcatcagaatcagaaatggaaggaactatggcaaagttagaattagaggagcgagctggaactatgtcgcatgactagaactcgcccccggattacagagactccattaatcctatatcctccccgaccccctgctgcttggaacccgcccccaatactggatcaaaattaattgcgatgctagggttggaggggagcatatgtgcatagcagtggttgttacagattacctgagcaggttaatttgggtgtttacggccaaaatagacttctctagtgccctgtgtggagaagctgttgtggtttgcttggcacttgaggtcgctaaggagaaaggtcaccaatttatcctggtggaaagcgattcaaagatagtgatcaacactctcaacgacttggatccccgatgggaaattaaaaactactctttattttgtaaaagtatcgctgcttcctttgctttctgtttattttgtttttcggctagatcctgtaattttatggttcataatgtggccaattgggcttttacccataacttatatggttctattgacatttctactattcttaagaatatttgttgtaatgagcgcgaggtctaatgtcttatgaatgaatctgtatttctactattcaccattaatggcagaaaaatctgtattttcccctatttttt

SEQ ID NO: 298987 - DNA, 4353 bp, Cannabis indica
aaacaatgtaactcatagaagacacactattatattgtaagtattctttaattgttgaaaaatgttaatattctttttaataatatattagtttggtggcacaactttacaatggtatagtaattcagagcgctcgcacaaccctacagtgactatactttaggggggttatcttactacgtcagttcttttggacaagctggttcgatttggttgtgctaatagttaacaatgtgaaaattttgagagtgtgattttagggctcgtttggtacattgtattaggtatcgtactgtattatattaaattggattatatatcatatttttatataatactatattaaactttaatttatagtaacatattatatatttatgtgcccataccacatatagttttacataaaaatattgtatgaaataaaattcaatataatattatacaatatggtgtaatacggcataccaaacgaacccttaaagtgttagttcaagtgtgaaaatgctatttattctttatttattttttatttcttatatgtttttgaaagaattcttcctttaattgcgatgcaacatgattgtcggttgaaacaattgtattcaatttgtaatttgtctttcctttttgtgaatagccttctatatggttacgtgctattgtttccatctttcattactgatattgtatgatcaagcactctagagagtaatgcaatttcagtttgatatgtccttaaaatttgatgtgctaaataatgactcgtacacagagccgaaggggcgttaagatgtcaaatgaggcaaaggctaccgattgcctatgcatcaaactcaaacccttcaggtggtggttccattgaagaaagatcgggtgaaaagacgagcaatgccgccaaaggtcctcccttccttaccatcgttgctggaatagtggtcttttgtagtgtatgttgggttattggatcaattttaatatggctaattagtcttattgccaatttccttccaaagtagggtgccagaacacgggcactactttcatgttaatactcatactgaataagcctactttgtctccatttatgcatgtctttttaaccaattagtacttgatgatctattaatgatatgtgtataaataaaatctatcaacaaaaggaaaaaaacatgatgatctatttccagcattgtaactattttttgttatcacgcatacaaacgaatgcttgacatttatatattatatactgaataatcattcacattcagtaaaaacaaaccaagaaaatattgttttattgtattaagacaaggcaaacatacataaaaagaataatctaaaagaaaaaccctggagcagaggggatgactacaattagtcagaagaacctttcaattgagcatcatctgagctgtcaatttcaatagatgcagtgaaattacgacgctcatcagcagatgctgtgattaccggcatccatacatctgctgtgccgctcaagagggaatgcacttgaggatctgtagttattgctgaagatatcatctcatctacatcatctaacttggctgacaatttgtccaactccttggctatttccagctgttacagaattgatagtttaatgccacaaaatgttatgccaaagatgattgctaaattgaaaaaggttttcacattaaaaatggctgtgacaggaaacaatagttacctcatcaagatgctgtgttgactttgagggaactttggtaacctctagtccaagtgcttcgattttggaacgcagttcaacttcctcttggttgctcaatgattccacctgaacaaaatcaagttgatgagaatttctatttgggatcaaataaaaagacaacttgggaatatgaaacatccaatatcagattaatatttaatacaaattttttgtgctgaaatttacaaaatctgcagagcataattggttgtacaaccccccatatacgcagccaggacagaagtaacatttttttatgagcgtatataatttccttagtgttggctggattcccatttctataatctaacggggaaaaaggaatgaaaaaaacagagcaaattactttaaaatgcctttctcaaagtatcgtcaatatgctcctaaacgcgtctttttttctttgttcatagtgagaggccaatttaatattgaatttgtcataaaccaaactactaatcatcaattcttcaaccgccgcatccattattaggaagtaggatctcaatatactgttgaacagaagagttcattataagatagataaaaagaaaataattggcaaaatggcttatttttttgaagtcattttgctgtttgacctagttttgatagttttttgcataataacttctctttaaaaatttgaccagttgtgtaggccgaaatgcgaaataatttaaaaaaaaaacgttttgcagagagactaaaaatataaccacttcaactgtagcaagcaatcatattgtatttgagaataggcgtttacaacataatacaaatacttactttctattcttatgatgaatatatagctcttcttagaataaataaaagaatttgttaggacacaaagccaaggtagcttatgggaaagtgcgaaggagtattaccatttcaatttcaaagaaattgcagatggaatgaaacagtcaaatcttttttttttttaacgaaaatagtacaagattcaaggtcagatttcactacaagtgtgaaaatagtagaggggctggaattgtttgagacaactacaaacataatactactcaaacattttcatttatttggtaagaaaaaacgatttctcagaaaagtacagaaactctgtccatctgagaaggaaaaaaaaaagagaaggattttcggagcagatagaaggggtaaaaaaatgtaaaaactttccagtttcacgtacgcattgctgctagtactcaaacagtggacgatttcttcaatggacatatcattgagtcatcccaaaaaatgtacttgttgcccatatcccttagtgaaaaaagtatataggctatagttttgtaaaaaaatagaaaacaactgaagaacaataatgggtacattttacagcatttccaggaacagaagaagacaatgacaagacaacaatgtgatgccaaacacagaagcccagaactgaattatgcatagtacaaactaaaccagacaccattgacaattttatatatctatatatacacgttctcttacattttgagaaaacaaggcatacaaatttgaacaaaaagaaagcatacaaatttgaacaaaaacaaagtatccataaaatttccttttgctctagacgtgaataatatttggtcccataccatctaatctaatctacaacctagggaactgttgcattcttattcaatttagcatattttcttttcaatagttgctcctgtaataatctttggaattggaaatgagaaaactcttggacaaaaatattcactcttaagattttacacaggtacatgaatttgcaattctcacatcaatgtcaaaagtcttgaatgaaccagcatatcactaacaagaaaaagctcatatttatgcagcacaatccccgaaaatcctttatacatacaaataagagcgattatggtacctgatggagtagaccagagagaagctgaaacaattgttcatctggttttcctttttccgccatcgtttcttatgaaatcccccctgattgacagagagaatatgagctttaaattgaaaataaattcagatccttccaccggtgtttcgaaccccaattttttgcgatattcatctacagtacaatccctgtcctgaacaagggtctctagctatgtaaatattagagtaatttgcggtgaaaatagctatgtgttttgttagtagttacagataaatacttaagtaaaatatttagaggaaattatacttagtgtaggattttaaaagttttatgataaatatgacacattaaagtttggctaatttatacggtatttttttgtttttaggtttttttatgatatttgatatgccatatatatgtaattaggtttctaaatctcatatttaatgtttttatttgtttaggaagttttatttgtcattgatgccgaaaaaatcaccggagtttgctgctggtgccggaaaagtcgtcggagtagcggtcggtgccggaaaagtctcagagttgctgccggcgccagaaaattcgtcggaattggcattgtcgccaaaaaaatcactgaaaaatcaccaaaaaaccggtttcttgaagtctaagaaaccggtttcttggt

SEQ ID NO: 298988 - DNA, 6421 bp, Cannabis indica
atattttacaattcatgaccagatataatagcatagagcatttttgcagtccatgtctcttcagcaagacttggcaaaggacctgtaatatttctgccattgacatcaaaagtactctgcattctgctacaacaaacatatatacatgaattgtaatatttgtataaataatattgaataaaatattgtattaaaatatgaataatactttctcaaaaaaatataaataatattgaatttgtttgagaaaataatagagaaaaagaaagttattaaaaaaatcttaagatttataatgggttttcttttaatcctttacttttttggaatatttgtagaattgctctaaactttataaaatcatattaaaccttaataaatgaactcttacttttctttaaaaaaaaaataggaaaatttttatttttatagttttaaggtagtattttgcaaaatatagtttttttattcaaaaaagttattttacaagaaaattaaaaaattaaaaaaattaaaagatataagaaaaatatatatatatatagtaactggttacctctgagataactagttactcttatcttaactttttatttttcattgaatttttttccataaaataaaatttttgaaaaaaaaaagtcatgattttgcacacattttataaaactcatattttttataattttctcaaaaatattttttcctttcttatcttttcaaatgtattccttttattccaaacataggaaaaaagtacaaaaacattggtttttttttagtgcagcctaatgatattacatatttcaaataatttaggagtcttgaattcgaactatgcctgtagtttttttttttttaatattagaaggccattatataccaataaaataaatattcaaaaaaaaaatatgtataatataatttatatgacttttgtgttttgaatattaaagtatagtattttgttttgtgcatgattttataataaaactgacctggtatttttgtgaaactgagtaaagaagaggaggcaaggatcttgtgttcaattttgagaccattttccaaagtttgtttgagaatagaaatgagaagtgagaaggctgagatttgaagctcagaatttgagattgaagaagataatgaaaagctcaaccatgtcacagtgattaggcacacccttactaataccaattcctccatgtcttttgatctaacaacacactttgaaatcccttctaaaaatgaccttcttccattaccaaccaatgatgtgcacatctttcttaaccattcttctttcttttcttcctcatcttcctatatatattatgataatacaatatatgtggcacatgttagttcagtgacggactcaaaaattttgatttaatagaagtgaaaattgaataaatatgtgtatcaataaggacataatattagattgtcctacatcgaataaatatgtcaattcttagataagatcacgagttactttgcttattgtcaattaaattttgagatgaatctcgggaatcctacctaactagtcactttatagttgtggtttttgagtagagatatcggctatgtttggtaggagagagacagaaggagatgacaagttctcttgtctagaatttgacaaaagaaagggatagttggacggagagtaaattctttcaaatctccaatttagactcactttccatcatcatttatttgaaattacaaatatactctcataatatattttatatctttcatcaactctccattctccgaattcgccttttccctaccaaacatagtcttagtatgagattggtcaataatttataactaattggacaataccctctcataggcaccaaattttgtaatgttgaacactatattttgccatagcaatgattataggtatataatcaaagatttttggagcaagtaaaaaagaattaagtgagatgaaaatgtaccacaaaatatgtatcatcaacaagtgaattatcttcatcattctctggttgattccctttgaaataccctgcttggtttaaaatccaagtctctgtcattaattttccagaggaagaaaattgaccccctaacataagaagtgctctgcaacaattttctcttattttctcatcagccaaactgtgatcaagtgcatttgttaatgcatcaactgcctcttctctatatatgctgtacttactagtaggctctacctgtcaaacacaactttggtcattcaatttcattttcatttatgactaaagacaatgatttttcaaaatattacaaagagtctagacaagcaaatatgtttgacaaacatgattacttatggaattgaaagaaaatcattttcatttagttcattcttttgttcggttacaatttaatacatattctttaacacgtattaatacttggagtttatactgttttagaccttgtgttttgacgaactatcagtttggagtcctacaatttttaaaatgaccaaaatacccttatgaaaaagaattatactatttttgaccttgtattattttaatgaccaaatacccttcgttcgaattcccccttttaaagtgttttgctagaatggaattcaaaatgaaaaaagaaaaagaattcgtttataggtggaaacataccaagagatccaagtataacaaaaccacagcaactaaaggtctttgaaaaggtggagaaatatgaaggtagagaagtataatatgcattgtatcttctaatcctccattttcattctccaatccacttaaaaattctataacatcctttttcctgcaataacaaagaaattcacttaaaaaaaactaaatatccaacaaaatttgaataacataaaactatagtaaaaaaaggactcgagcctcaaacgttgtgagagcaaaccacatgcctaaccatttaagcaacctcgctttaaaaacatacctcttgaggcaaatgagttcaatgatcaacaaaaccgcgctttctctcgccttaatatccttgcaatgaagtagctcaagaagacatttcttgctaatatctctagctatttgattcctacatcttgattctacttcaatacaacatgacaacagttttattaaacatgtctttgtctcgagatttccataatcgagttgatgcataagaaactgcaaaccgccaattgagataaggcgtttagcattgttggttagctcctcttcgccaaaattagtaaaaagttgctctaagatcaaaagggttgtttcaatttcttgttttgttcccgagttttcgattacttgagaagctaaagcgaagagatgcctacaatgttgggttttccagctttctattactcgctttagtattaagtttgttgaagggacttcattgcattccaatacttttcctgttgttgggcatgttttgtttccttgatcaaaccaagctttgatggctttttgctcaaatgtatggccggtttctaaactcgtgggattttcgaatattcgtctagttagagggcaaatgaagtcttcaggaatacttgggagagaagatgatgatttttcttcaacaacatccccatgaaattctatgaaaaaaataaatatattttgacttattttagtatcaaaattcaaagggaaaatactatatagaaatattaaggtgcgtttggttgagagaaatgaaaacacacgaaaataaatgagaatggaaatagtcattctactgaaatggtaggaaaattattttattggaatgacattccgttacttaaaaaactaccaaacaaaccaaacgcaaccgaaaagttaactaaccttcagaagcatgcttttcattgattatctgcacttagaaacaaattaagtcagtaattaaaaaaaagatgaaaaacagaaagtaaataatgaaaataaacagaattttaagtacatttgtaagaggaatagtagtagcaaagtcaatggtattattgtctggttcaaaaacagattttgctagccttttgagtgtaataagctcattctcttctgatatttcatgacatgtttctgagttgacaaatttctcattttctgataaatctttctcttcaagaacactcaaattttcctttgatgttatcataagtccattatcctgaaaagggccataacaatatcaaaaactaacactaaattttccaagtaaaacagcttaaggcaaatattagcattagtactattacttacttctgttaatgtatgtttaacaacaggagaatcatcagaattctctatctctaaatcttcagaaaccgccttacttgctcggcgaaacatagcattatagagtgtcttactaaccattggttgaggcgaaaaaggattagaattaggactacttgacatctctgaagaattaccttttcgactctcactaaccaaaactggggcaagaatggaagggactggtgtggtttcaactccttcggttagccaatccttgtagtaaattgcaaattggtaagtacccgaatctactaattcgttgtacattttgtcaagaagcttcaattttcttggcttttcttgtgtgtcaagtaaagaatttgcttcttgattgtaccaaattttcaaatgtgagaggtgaggagaaaataggtaatcccataactcgggcaatagctcggttcgggcatgactaggcgaatcgcagaaaacttgcaagacatgctttgcagccactctgtctttcttttgaaacttatagataacacttaggtagagatgagcacaagatgataacacttttttttatgttatcatttgtgttcattcccacaagaacactaagttgcataacaactttcttcatatcttttgtgctcattgaagattcctctacagatttttctatggtatcaatggcttcctcaagtgttgatatgactctactctcagtctcacctctttttcgttcgagaaaatcaagaatagacaaacaactcccgcgaatcattactcgaaactccttttctttaagaaaccttttgatgtatccacttaagattgacaccattgcttgaatagcaacttcatcaagagcaaccttctcataactcaacttcttactttgaacttcttcaaacactttttttcccttaacttcatccgaaaatatgtcattttcttcatcttcatcttcgtcttgaacctcaacaatctcattatttgaatgtgaagtgattgattctcttgcaccaaatcttccaacaagattgtctcttgccctaacaccgtcgattcttggtgattcaacgcgcttattataactataccgagcaacatctgatcttgatctttgagttgttctaacaaaatctttcttgacttgttgttgaacatgataagttggcatacttggtgacttttctgatctaaatgaagttcttgaccttgagaaagattttcttcctttgaatccatcttctactagaagatcttccaatgaagctgccatttcttatttcaaaacctaccaaaatcaaactaatcaatatataaacaaaaaagaaaattatagttttaatatgcaaaattagtgtcatataattactcaaaaaaagttgttacttaccaatttatagccaaaaattctaaaccatatgaatttctatcaagtagagtttttgttgaataataactatatgtactaattagtattggaataaaatttgaaccatatcaatgaatatattcaactaaaacaagtttttaaaatataaatagggagaaaattttgttctcttaaccttaacaattcgaagagtttttaattattattagttagagttgaaataatacttatatttagagcattgttattgggcaccagtggtctctagcacctctaaacatgttgttttagcatttctttatatatattttttataactcatttctcttatatttaaattagaaataaagtaatttgagttgaaatattaagagggaatcttaggagaaaacaaaagagagaatgatgaagatgctttgctaaacaaaaacaatgagttggagttgtctataaaggactgcaaattatctaaaaagacaaaataaattaagattaaaaaattaaataaaataattaagtgaaatggtaacattaggcaacaaacaatgctaacttagtttgttatctttggatttagatttaaaatgtgacaagtgaataaggacaaataaaacacataatggcttttgttgtaaagaatatgtgaataaaatttgggtatctacgactatttcaatgaggtgttattattagtaaagaaattttattggcacattataaaatgataaatacattttaatatttaaaaaaaaaattactttatatattattt

SEQ ID NO: 298989 - DNA, 1670 bp, Cannabis indica
aaaagaaaaaggaaaaaatgaaaagaaagcattagactatagttacaaatcaccagcatagtcaatctgaaaaaggtcaatcggttcaaaaacataccttgttcccaaaaattcttgaatatttacatcatggtccagcttcttaaaagtttttttcagtgcctaatcaaatcaataagaaggccatcatggaccaactctcaaaatagaaaataaaccaaaagaaaattacgcagtcgataagatttatgatagtacttagcattcataagaaaagaagaaataaacaaaatatcattatggagaataggttgtaaatattgaacttacttcaagactttccaacttcctgttacaatcaaatgaaaacagtttaatgacaattctcctttatgtatatcaaacttgaatgaacgatgaaactaacatgtatttcaagtgagacataagcatctaccttttcgccctttcttgtggggtgagttgagcaaattttgcaataacctcttcaatactgctagactcagccaaaaataaataataataaaaaataaggtccgtatgaaaaattagcaaccatttaattaaaatcagtaattatattgtaaataaactaggcgatcatctatgataatcagaaagaatgaagtttacctgcgttttccactacacaaagaaggcttgccagttggtgagaacatgagaaggataatatctatatcacaaagtatagataactcattagcctttttcataattccatgcttcctcttggcataggtggcttgacgcccatttgtattctccaacttttttatctttaattttacccttcccattctgcaccatatactaagaacttctcaatctcaccttctatgattaatgttcccaaccattccaatgcctatcaaagaaaacaagagattgcccatcacatttctaacaattcaataagcttttctgggcaccatatcaacatttgtacctaaaattttcacactagtttccaaagacaacagaaaaatgaagaagaaaaaacaaaagatgcccatatgaatcttttctttctttccttccggatttatataatacatataaaacaaaaaacatgaatctgggtcaatctcttaggaaatgacagaaattcccatatgagcaacaacgctataaaaggcacttaaagataagagaacaacaatagccaactcgttctgaatgttgaaacgcagcataatagacgttaactcgtgcccttttcttttatgggcaaagacgtagagttttccttttccttttaaatgaaagaagttgaacacatttctaaatgcacaacaacaaaaagcctactctttatttaatcgagaaaattaaaaatgacatgaatgaaagaggaaagaaatagtagcgtaccagttagaaacagagagagaatggggaggaagggaaaggtgaggaaggatcagcgaaatgaggaagaagaaatagtttgtgagaatgaaaaaagagaagagaagggagggaaggagagggtgtgtcatgtgtgtgtgagcttacatatagctttacattacacgaccgggttaccgctaaattcggtcatagaagcaaccgtaagaatcgccaaccctctcaaatcccctaacccaaacctaaccaacctaaccgcc

SEQ ID NO: 298990 - DNA, 7228 bp, Cannabis indica
gaattggactttttagtccttcggcaagctttgtcctattcagtcactttatttttctcttttggtttaatcatttcagattgtaaacatttgtttcaaactcttctttaatgttgttatttcttttgttaaatggtctgaagacaaagcgactctcactggttggcttgctattcatgttcttcacctgatcgtctttccattgtcgggatcgtctccgatgggtgccattttaatagctgattgctaatgaaattgattaagttttgtttcaaaaaaaaaaaagaaaaagaaaaaaaaaacccactattaaaaatagaaaatacaataaatattcaaattaaatattaatatttttatttgactttgcttagagaaagagcagtaaataaatgtgacaaaatctcatttaacacaattctaaaaaacaccaaaaatggacaactcatcattcaagcaccaatcaattcataccaaccaaccaacaaaccaaccaactcatctcatctcatctcatctctcatatctcactttcaaattaatttatcgccacgtgtcattcaaccgcgtacgcctaacattctaaattatcccctacaacccaccacagaacgccacctaatcagcgtaccaatactcattctaccacctcactctgaaattactaaaaacccctttctttcacatccagaatattctactgtctcgctcacatccaacgtggcaggtttttactggtgggccagctgtgtacactgtacacgtttcactgaatcataaattcttaaattatgctttgaaagacgttcgatatttaaacggtgtgagaattgagaaatatcactttcgaggagagagaattttctcgagagaaaaagaaaaagaaaaagagggaaaaatatcactttaattttcctcttttgatggtttttcgtttcgttcatgatccggttctgaattttctcgcgatccaaacaagtcacaatgctttcgttacaagccgatcatcggctccaccatggacagtacctgaatcagcctcctcctccgccgtcgccgaagcagattaatttagtcccttacggcgatgaagttctggctcttcgttccgatgtggctgcttctgcttctgcttcagctcctttatctgttaatgtcatcaagcagtctcagaccttggattctcgcgaaggttactgtcttttcctgtttttatcagttgtaattgagttaggttttcggcctgatcgatgtttctgtattaggattttgatgcaatgttgtttttgtagtggtttagtgtttgctttgtacagaattttgtttttatggattttttcttataaaagaaataaattattgctccttgcagtgtttcgattatcaattgttatgtatttactttataaatgtatggaagaaaaaattaagatcacactgttattgtggttccgaggcataaaataataataattataattaaaaaaaaactaatttggaatcttactgtgtatgcttgttttgtaaataatatattttagtgatgcttgaaacttaaacaactttataaaaagttagtaatagtaatctggaggctgtagaataattgaacattctctttgtgactggtaataatagcattgatttcacttgtgagatgattgaatgaggagaagatttatgtttgaatttatactcttaactggtaaataaaatagaatctgggtttctacaaggtatgaggttaggttaggcggggatcctagtttcgaaacaaaaacaaaaacaaaaaatctggtttctgttggacgtaagtattagtgttaggaagaaattagtcagttctgaaggtttagagataaatatgtgaagggtttagtaggtacaagctttcttgtgaaatgtcttgtttctccacaactaaatattgttcacatattcatgtttgtacatataaactcttgcataaacaatatgtgataaatattaagcaattgattcacgttgtttataccatagaagttaaccttggtaaatgacacttctacaagggctccaaaatgcagatggtcttgttttgtaggcattctcatttttcttaacacatatagattaattttcttgtacaataaaaaactagttgagagtgccatcttttttcctgaacgttctgaggaaaaccaaatctattttgtaacacataatgcatatatcactttgtggtaagatatactgtaagttgtatgtgatttctttttcacagaaataagttatttaacaattttctttgttttagcttcattttttagcttttccttattagcagtgaggcgcgaacttaaaggtgccaattattttaccttatttatttggtcctttttctagttctttttaaactctcttttgcctaattttgtgtccttgtcgtggaacatcatggttgccatgaatttgattacttttgtttcaagttgttacaagcgtgtatgaattgaggagccaaatttgtttagataactttgatcctttgttattgaattctgctacatttgatttataaaaactttttcaattgttaatatatgtgaagatgctgttttaattcttttgcagttaatgaagacatgctcatgtctctggctcaccagaagtacaaagctggaaactataagcaagctttagagcatagtaatgttatttatgaaagaaatcctcggcgcacagataatctccttctcttgggtgcaatccattatcaggttctcaatgaagcttattagcagtcatttacttttcccaatatgtgtacgctcatcggtgtttttggcttccaagtgaatttacttgcatctgacacttaaatttcatttcattctgtttagttacatgattttgactcatgcattgccaaaaatgaagaagctattcaaattgatccccgctttgctgaatgttatggaaacatggcaaatgcttggaaggtaatctttagtactgtttatggttctgcacagtcaagtattagcctgcaagcatctaatagactgttattatgtttctgcttcaggagaagggcaatattgatattgcaatccgctactatttaattgctattgaggtttgttgcagccataaatgtagtccataagtgttttttttccctgacctgttgtgtttggaatatgaactaatttattatatatacttccaagatcaaatgatcttttctgtttttgccttacagtaatggttttattttgcagctccgaccaaattttgctgatgcgtggtcaaatttagctagtgcatatatgcgtaacgggcagtttaatgaggcagctcaatgttgtcgccaggctcttgccctgaatccacgtttggtaaaattttatttttaactcttgacgcttggatattcaatgatctgccagaacctttgaattgaacatgacattttttttattcttaatgttacaggttgatgcacacagtaatctcggaaatttgatgaaagctcaaggattagttcaagaggtgaggaatctacgatcttgtaggtgtacagttacaactacaagatcaccaaaattagtattcacaatatgtgtagttggttaaatttactgattcacttacaaaagtttgaaaatactttaagctgctttgttctcacacacattattgttcagtttcctatgaaacccttaaggtgctctcctcaaatggacaaggttgtaacatatatttttctgaattctttaatgtttttgttgtaggcttacagttgctatgttgaggctcttcatatacaaccaaattttgcaattgcatggtccaatcttgctggcctttttatggaggctggtgatcttaacagagctcttcagtattataaggtagacctggatcacttttcttgtgcacgtctgtatgagtggagtggtgtgggtctttacaattgtatattcatgttacaaaatttcatggacctgcatataaagagggagccctttataatatatgtatatatatttaatataaatgaaactttgtagtagtcaaaatagcaatgagaataaacctgaaaagtcaaaagacatacaataaaaagaaaacagcaacattatatgtatgtagactcatgttgctactcagtactttatttctgtgtatgttgtaattttttttttctgtatattctaatggaatacaaaatctttatatgatgttttctataatcttttttgattatgtctttttcaggaagctgtaaagcttaaaccaacattttctgatgcctatctaaaccttggaaatgtctacaaggtgaggtgttgtagattatacagatatgatacttaaaactgcctagcattatatctggggaaggaatttaatacttgtttctttttcaggctctgggaatgcgtcaagaggcaatagtatgcttccagcgcgctcttcaagtgcgaccagattttgccatggcctatggtgaggctatatatttgtatgcagtatacctagtgaatagtgattacctttgtcttgtgctggccttcctttttacttgatgtggctgtagggtcttaaaatgtaaaaattctcatgcacggcgtacaatttgttctaggataaagatgcaaatatattttacttattactgatttattttcctcttgtttggacaagtaatcttcactgagacaaacagatcaatttgtttttgaagagcttatataaatttatttcagcatgtcttacaaaaattaaaaactaaatatccctccaccatatttaaccattcatttccaacttgactgatctatggatcctaatttcttcattgacatagatatgttacaatggaaatctcctttgtcagataccttcaactttagtctctgattataagttcaaataaattttattttgcaggcaatttggcaagtatttattatgagcaaggcaacctagaaatggcgattttcaactataagcgtgcaattacatttgattctggattcttggaggcatttaataatttggttggttatcttacatatcttagttgtgctagattgtctgttaatcaattgacaatatgaataactttttcattattttcctcactcactaaatatcttggtgttctttcaagggcaatgcattgaaggatgctggaaaagctgatgaagctgtgcaatgctatcgtgtaagttcacaatattcgtgatttgtctccaatttatttctttatttttgttgggtaaattcagttttacttaccaaagttttcattatatacctgaagcaatgccttaccttgcaacctagccatccacaagctcttactaaccttgggaacatttacatggaatggtatgtatcaagtgttaatcatgtcaagccatttaggtcaatagagtgtatgatgccagattgatatcacatttacctagcataaatattttttctctggctgtacctgtacaggaacatgatgggtgctgctgcttcatgttacaaggcaacattgtctgtgacaactggactttctgcccctttcaacaatttagcaattatttataagcagcaggtaatgttatcttagcatcatgcaatccttgcttttatttgttttgggaaaatatttaatataaatatattttcttttctgaatgatggataaaggtcatcatttgtagagtagtcaccttgatttattatttttcttgctctgctgtgccttttccaactaacaacaagatggcatttgccgttttaaatttcataattacaagtatctttttggttatatggttggtcttggtgcttagtctgttttaccttccagtttcattttgtgattctttttgcataaaaataataccttctgctcttcacatttcagttttctcaattgattaaagtttgtttcttattaaaaaacaactacagggcaattacacagatgctgtatcttgctataatgaagttctccgaattgatcctatggcagctgatgcacttgtcaatagagggaacacatataaggagattgggagagttaatgaagccattcaagattacattcgagccatcaatatccgaccttcaatggctgaagctcatgcaaatctagcatctgcttataaggacaggtgttttttgataaagctttttatctgagtttttactgtttgttctttcatgttttaacattaggatttttctttgtacagtggacatgttgaagctgctataaaaaactataagcaagcactatttctacgtcctgattttccagaagcaacttgtaaccttttacacacattacaggtattgtgagaagtaatttactttgtttatcaaactatatttgaatttcggttttattttttttttctcactactgattgttattcaagtctttattttattttgcattataaattggtgcgctaaaagtcgggttgcatcgccattttctgtgttatatataatatgtatatagtacatgctcccggactacccatcttcggtaggagggcctcgttgattattgttttccaggtcttctagtctattcatgatgttccccgccaataagtgtggtgaaacaatcatcctttattctgcatgcactttcagcctatcatttgtttcttatatatttttacacgctaatgacttagtctgtagtttctctgctgcaatgtatctcttatgttgctatgtgaaacttggtctggattttataactattcgtcattggtttatatctaatttaatatttgaatttgtgccattctccagtgtgtttgtgactgggatgatcgtgaaaataagtttattgaagttgaaggaattctgagaagacagataaaggtaaaggtttagtgttgtttaatttgatgctaattaccatttaggttccacactttgacaccgctcattctttgcatttagatgtcacttattcctagtgtgcaacctttccatgcaatagcctatccaattgatccgatgcttgcactagagatcaggtaagaatctatggcctatatattgtataagtctgttctctttatttactttccttttggtcttgcagtattctctgttcagtttatttactgtctttctgtttatgtagtcgtaaatatgctgcacactgctctgtcgttgcatctcgttattctctccccgccttcaattatccagc

SEQ ID NO: 298991 - DNA, 1534 bp, Cannabis indica
atcataattaataaataaataagagataaccataataagaatcatgagatttgattttcttatttaagaaaaagaagaacctagcacataacatctttggaaaaattacaaattaaaattgacgaagacaagactatgactcataatttggtgaaaacttaactgaaatgatgaaaatgacattcacctactatcagtaatattgctagtaaacatggtccaattccacacttcaataaaagaaatgaagaaatggaactttaacgaaattagaaatcctaaatcaaaattttcaagtaacttgactatattagttgctagatttcaacaacccaactcctacattcacattatatgtgtcgtcttaaatattcattgatttgttcagttgttttagaaccaaattttgctgttacaattccattgccaacacttccatttgttcaacttattataattttaacatgattcaaagttcattttacatttttttttcttttcatttttaaaaggatttgcccttccaaacttcgtatagagttttaggaaatatttagcttcataatttaaaaattgttttcagttttaaaaaacaaaaaacagtttttaaaaactaatagaggtcgttattagccaaattttttaaaaatagttttttaaaaactcagttttaaaaaattagaaaacaaaaattattaaaatgttgttttcaattttaaaaaataatttttttttgtctaacatattatattttatatttatgctcacatactcagaacctagacttggaactagacccgaacccggaccccagactcagactcggactcggaccccgacccaaatctcgaccctagaccaagacaccgaacttgaactaggaccccagacccaagaccccggaccctaaccccgacctcgacccggaacctaactcgaacctcagaccctaaactcgggcccgggtcccggtccagaacttggatgcctacccctagaccccggacccagacccagatcctagaccccgaccggacccagacccaaattctggacccaaacccggacctagacaccggacccaaaccctagaccctggacccagactcgaactccaaactcagaccaggtcccgaacctcggactcagacccagacttggacctggaccctagacccagacccgaaccccaaacctcgaacctcagacattgttaggattttatgccctaaataaaacctacatcaatataatctgatttgttatcaatagcagattagaagtcatttatgtttacatgtggttttcatgtttatggtttaatgtgtacaaaatctgttaaatccagaacatatagttattcacaatttcagtgatgtcaacacagtggaaggtaattgtgattatatgcttcaaaagttaatgtcccttgattcatcagtgcactggatttacactgatgtgatagtcagcgataaaatatacttacaccctagataagtgttatgttctttccagaacattgtcaaagtat

SEQ ID NO: 298992 - DNA, 3989 bp, Cannabis indica
tagtatgttataagaaaagcctaataagaagtatgttagtagcctgatatctgaataggtgcattttttgttttctcaagtaagcgataattagaattgttcttaatcgcaatcaatccaggctagctcattattttacaggttgttctattagaatggatgccagaaaaaacacaagaagccagggtaattaggtcggatctagtagtggatagggagtttagtttcccttgaatattcatggccgaggtagaggcccaagaggtagggcatgcagacggggtgatgttaacccaccgcaggctgcgtaggattgggataataagtttgcagcaatgcaagccataattaatgagcaagataaagagattcagtgtttgaggtagcagggtgctcctacaatgcctgctcctaaggtacaagtggctaacgcccttgctatgcaagtgtgggatgttgttgttcctaaccgaatggaaccactatatgaaatgttccgtaagggggcgcctctagtccttctgggaggtcgagatgtgatgaaagccaagcagtggctaactgttatcactcggattttgaattttatgggagtcactagaaacgacagagtgacatgctacctttcagttccaggaagatgccctggtttggtgagctatggtagctcttacacgggatgtcggtacgattacctaggaagaattccaagagttatttaatgtgaagtactacaacaaggcagttcgtagtgcgaagagaaaggagttcactcagatgactcagaaagagaatatgtcagtcatagaatatacaacccagtttgatagattggctaggttgacctcgagaatcgtgccaactaattttagcaagaagaaaaaatatctggatgggctaaattcaaagattaaacatgatttgatgatcacaacagatgagaccaccacttatgctaatatggtggggaaaaattgcaagctgagggcgcagttcggtgtattcaggagtctcgggagactcaaattgtttgtggagccattgctcctcctacctctagttatggtaggggtggtagtgacttaaccactaattagaagagaaaggcaccttttacacctggtggctcgaaccagaacaagaggtttcagcagaaccaaggccgaggcaaccgacagagtggatttgaaactcgatacacttacccagaatatcctaactgtaagaagcatcatctgggcaagtgtagagggcggagatgtttccagtgtagtgtaactagacattacaagagagactacccgcagtcaaagaaagaagagaagaagattgaagcgaaacccgctctagcaagggtgtttgctcttaatcaggatgatgcagaagctagctcctcagttgttgcgtgtcagctctcagtcaacaactctttctatctgttttgtttgactttggggctactcattcatatgtggtagccagaataattggtgaattgagtaggccatgtgataattataataaaaggtttggaactctactgcctagcggagaattaactatgtctaaatggtgagttaggtctatgctaattaaaattgaaagtagagagttgagtgttgatttagtagaattgggtttagcgaattttgactttgaatagattttttgaccaagtattttgctagcattgactgtaagcggaagatggttatcttccaacctgagggtgaataatcatttatgtttgtgggataggttcagggatcccaaatcctagttatctcggtgttgaaggctaagatctattacaagaagattgcttatgatttttggcagtggtgttggacaccattcgagctgaattagtttggcctgaagacatcgaggtagttcaagaacttttagacgtgtttctcgatgaactttcaagtttaccaccgcaacatgaaatagactttgtaattaatttagcacctagagcgaagccagtttctaaggcaccttatagaatagctcctacagaacttaaagaattaatgattcaacttcaggggacttgacttagggttttttcaacccagtgtgtcaccctggggctctggtgttgtttgttaaaaagaaagacagatcgcttcatatgtgtattgactactaggagttaaacaagttaactattaagaataagtatcctctacctaggatcgacgacttgttcgactagcttcaagggaagacatcttctctaagattgatctccaaccaggttatcatcagttgacaatccagaggaggacattccaaagactggcttccgcactaggtatggacattatgattcttgattatgtcctttggactaaccaatgctcccacaactttcatggaactaatgaacagagtattcaaggatttcctcgatatatgttttatagtatttatcgatgacatctttgtatactctcattctgaagcggagcatgagcaacatctacagatgattttacaataattaagagaacataagctttatgccaagtttaagaagtgtgaattttggctatcccaagtgtcatttctcggacacattgtcagtaaggatgggatcatggttgatccaggaaaacttaaatccgttagggattggccaaggctgaagatagtcactgaagtcaggagtttttgggtttagctggttaccaccgtcaggagtacacgtgggacacgaggtaggatttagctcgcactcactgttactaaaccttaatttagtgcaagctaataaagattgtacatatcggagcgattagacctaaagtgttcgatctttgggacaacaggctgaattttgattagtcgctaggcataacttttgtagctaatattttgtaatttagttgaaactttttaaatatgggatcccaatttatgcaaattttattattttaattataggttaatgtaaagttttaattaaacacgttgtccatcaaattaacccattgaatagcaacatatagcacaattagctttaaatcacgataacatgcctaatctagtagggtgttacaaataattcagtaagtctttacatgtatcagtagttttaatttgatatgcatgattagaaaaacatgaaagcagtttggtagcagaataagagcatgttaaatttccatgtgtgcggtaattaaattacaacttttatcgttgcatgacccacctacttatgaaatatccaggtttgtcctatagaattaacacgcgacgtaatacgacaggtcagtgtatacggttacaactggtggcggtcaggaaaattagaatcccccttaaccccgtggctgaggtagagtgttggaaatattttaccaggatcttagatttactaacaagtatgttgtttaacatcctaaatctgaacttctaaaacgataataaacacatataaagtttaggaaaccttacattgggtgcagtggaataatatgtctccttccactcagatctctaacccttgtatcctttctgtcctggagtatcaccaagatctgagtctgaatgtccttatcttcagtttggattcttcttaatcttccagactatgattgagataccacttgatgtgtgtgggcactactctatcattcaaggttttcgaaaattagaagaagaaaagagaaagagagggggtcggctatagaaggatagtgagtggctcaattttttctgaaggcaaaaatttctgattttcaatctcttgttaagtgtgagccatcactatctatttataggtaaccactaggttttaggttagtaattacttggcattaaaataatgaaaataataattggaaaaagcctcatcaagtggccggccatagtgttcatgggccccacttggtattttgtaattttgacaattttcatttttattttctcaaaaacgccaattttttaattctaaccatttaaatgccaaaactaat

SEQ ID NO: 298993 - DNA, 4238 bp, Cannabis indica
taggtacctaagagggactcaaacctctgaccttatggtgaggaagcccacatacggcatgcccactcgtttgaggctgagcaacacctctgttgatacttcatttattataattgcttcatttatgcagaaaaaacaaagtgcaggaaaaattcaacaatacattgctagcataagatccaagcaccgttgtaaaagttaaaaccaaataaacatatttcacaaaccttcccaatgatggttgagtttgagaagtcaagctcagaaggttctatttcccagtcacacttgtttggcagtggaggtgcaacaggttttggttcaaaatggcttccagtttggccctgaaaagattagactataattagaaccttcaaaaaaaataaataacaaataattgaaggcaaaaatgaatcttgtgaagactaggataacagatgagatttcttctattgttattgtatactagaacaccacattgcaaaagtaaatttaaactgatcaacattttttaatatgcagtcttttttttagtgaagtgtttatatataaataagattacacaatttgagattcgatctcagaaccccccacacgcgcacccctcgtacctatatatgaccacttgagctagcctcaagtggtttttgtaaatatgcagtcagtcgctgtaatttataaccacatgcttattgataatatatcagaacagatggatacgagtgtgaagtcaatctaatctctgatcactgaagccagataacaatgaagaagttgtccctcaaagcttcctttcagtttccacacaagccaaataggcttcaaatgaggctacaaggagtctgtaaccaagcaacctcaccacttattttttagtaaggtacatgtgaaaagtatatcctactacagatcaaccctgcccaatatgtaactatttttaatataagttgaaggaataatagcatgagcataatcttcaaaatccatttccagctcatattcttaaatctgataataagtgctaaacgtatctatatcagggacttcagaaaaatacactataagaacaacaataccgaaatgcattcaagcaatgtagctagtgaatagccagctcataaaaaataatgaactgaaattgggggaatttacaattacataaacaagttttcaaattttcttctatgttttttcattcgcatgtaatgtatgtatttataaatatgttgtctaacgaatttactatcacaaaaacagaaaatggagagataaggctatgcactcacataggatgagccgccatatgattttaagagctctatcatggaatgtttcttggctccttctgcatctgccagaggctgtcattacacacgggactttgtttaagaaagcattcacagatagagtgaataagtaaagcttaaatagagagtaagcaacaaaaatttgtaacttaaatataagctctccaaatttgctaccaaaagagaaaacaacaatactttctaaaaaccaatcaaagaaataagaatccatccaataccgtattcttccatcgatcctgagcgttgacatcggcgccaaactcaatcaatgccttagcgacgtcgatccagccatgtagagatgccacgtggagtggagtacggctgtcgtagtccctggcctgaaccagggacggatcctcctcgaggagcttgcggaccgcaacgacgtcgttttgatgggcgtgccatagtataagcgacgtcctgctcacccttgccttctccttctgcttctccttctcaccagtcaccgccggcgcagaagaactacacagagagctttcctttgctccggcagtacccgccgtttctgacccgtcggagctcatcagctaagatcggatccaactttgcgctattatttttccaaataataataatatccctttctttcgccaatgggagctgacttttttttttcttattagagagaaggttactacgtttggtttgattaattgagaggattttatatttattattatatttttgatgaacgaagccttcccgatttggagagtgtgtgtgaaatgaaatgaaatggatcagattctataaagtgttattatttattttgtttatattattttttacaagttttttcctttcgattttctgtggctttactttttcaacagaatatggttccattcccttgtttattttctctctcttttttttttttactttaacatttacataagggccacagaggaatcatgacgcaaagatacgattcatatcaattaaccgttacaacagtaattatggtaatttagaaaggaaaaaacagtgtagtttatcattgcaaaaaggttaaaaaaaaaaattactatgggtgcttaccacataattgggggttcaatggggaaagggtctaaaattcattcttcaaagttttttggtggtcttgccttcaggtctcttgtttctcataatcaggccatggcgtgttctttcaactccaaattctcttctggccactattcttaaagccaaatattttaggcataatggtttccttgaggctaaattggggcattctccttcttacacttggtctagtcttttatggggtagggatcttgtaaaaaaaggcttgatgtggaaggttggtaatggatgctctatcaggacttttcaagaccgttggattcctgagataaaatttccttgtctgagaagtaatgatctgcctcttgttaatacggttagcttctttattgatgatcagggcttttggaatagagataggttatatcagtattttgatgattattcagcctcttctattcttaaagttccaattgggggtcctcaaagggttgatactttagtttggaatcatgaaacttcgggtatattctctgtaaaatctgcttatcatcttgctaatagtgtttctctccctccttcctcctctaacccttctttttttaccgcttggtggaaaactctttggaatttgaatattcaacccaagattaaaaaaaattcttggagagtttaccatcatatccttcctgtagccatcaatttatttgttaggaaaaccattcctcaaccttgttgttctatttgtagaaatccctcagaaactgtcactcatgccttgctagattgtcccagagctgctaaaatttggaaagcttctcctctttgaagcttttatatttctaatagacatgttgatgtgaaagaatttatgcttaatggttttgatcagttgaataaagaaaatttaatgcttttgttaaccactatgtgggccatttggaattctagaaataaaaagttatttgcaaattcaaacaggctcctgctgatattgttgcctggattaactcattcatttcagattatcaggaagctatgtgcaatgttaaaagatatagaacagttcagactctgcaggtttcgggcatagagaaggcagtcccacaaaattgatatcagcttagcacggatgcagcactaagtgcagagcaaagcaagatgggatttggggctattgttagggattggcatggtaatttggtggctggtttgtccattcccgcagcaggaaacttttaacctttgatggcagaagctttggctctgagagctggtctaatttggtgtcaaaacatcaaaatccctttggcagtggttgaaactgattcaaagctgtttgttgacaaagtccatggccaaaagaatgatctatccgctctttcagacgtggttgaggacattagaaattctttatctgttttccctaatgttggccttcgtcatataaacaggaaatttaattgtaaagctcacagtctggcgcgaagggcactagggcaagatgaagaattatgttggaatgctttggttccagctttgtagcttctttctccgaagccttactcgtcaaaaaaaattattgaatttcatataacaaaataatttttaaaaaatatcgctaactaaatgtaaaatgtcacttataaaagatgttggacaccactaatacttaacaatattcttacaaaaatcttttatcataaatgactaacacatatcatgaggaaaatttgacttatagtcaaggaggggcccacttgtgttcatgtgggggctatagtcccacttataaatatattaccttttaaaaaaaaattaatttaatttttttaatttgataattatagacta

SEQ ID NO: 298994 - DNA, 5122 bp, Cannabis indica
tttgaaaaattaaatttaaaaaagaaaaaaaaaatgggaacatctcaacacaataattaacaaagattggactttaattaattttccattattaatcaattataaatttattacaagaatcaaattcaatcaataattgcttcactaaactcacaatgtgcttttttttcctttttttaacaaaatcatacaatgttgtattatctaatatttatgacgtaataattaaagtaagaatataaaaatgataattagatctaatattaaccgacaataataactgtttaaccaattttaactaccttaataaatatcctaaacacaacaaaaaatatcataaaaaacaaagacttttatttcaattttttttaaaaataagactcaaaattaaaaagctcaacatagtcaatgggaccaaataaaaaatctaaaaatagaaaataataaaataatttttttaaaaaaaaaaaaataaagtaaataattctcttatagcaagttaataaatgctattcactccttcaaaaaaaaaatgctattcactgacttttattttataaatatatataaataaataaaaagtagaaaagctaagcaaaaatggaaaaagcaaattaagagaagagaaaaaaagattacctttttatatgaaaatggaagaaagtaaagaatgtcccaatgagaattagagatcaaaatggaatccaagttgagtttttttgaagattaagaaaatacccagaaactgaattggattcagatttgatcccaacactgattaatcttcttcttcttcttcttcaaaactgaaaatggggtttgttgagattcaatttggatccaaaaagattgaaactttattattttttgaatcaaatttgatttggatttgaaagagaaaagaaaaatgagtttggccggcataagaaattgggggagttaagcactatgcttaagcaaagcttagaaaaatagtctttggaagtttcttcgaaagagagtttcttttttttattattatttttattattattattattattttattatttatttttttgagagtgacggtggacccttttttctattaattaaatgtttttttttatttttattaagattagtgttaattataattttttagtttgagttcgaaaataaatattttttgtatcggtattcgttataattgtaatattatatatgttaagttttgaatagtatcaaaaatagagttcataatattctaatttactatgtgtgttcaaaaaactctaaatatatttttgtattgtaaattatttaaaaatttaaaaaaaaaaattgagtaaagaaagttattaagagattgtataaattgtaatgtgaggttgacggttactatttttaaagaattattaattgatttgtttgaaccaaaatggctgttttattgtatagttttttattttagaaaataataattattaattattaaatttattattgatttttttagaagagatattaataaagagaagggattttaccaaagttcaacttttgaaattaaaataataataattgttatcatgaacatgaagaagggacaactcatgtgactcctcactcactatcttcctaagtttaagtttttattgatgaataataatattaatataatacctaatcattaatactatgatcaataacaaaaaacacttaataattaaaatagcattggtattaatagttagtgatttttgatgtagtactaataattaggttcggttctagatataggaaggttagatttatatttagaatttatttaacttagtggctcaattttttttaaattacacattttttttttattaattttgaaaaatattatatttttttttaaataagagtcgaaaaatatttttttcctatgacccataagatttcaagtcagccgtgtcgataataaattatattaaggaaatatatttatttagtactttgtattttcataaaaaaaaatatatatatatatatatatatatatttggtaccctatgttttcaataatacttaatcagtacttcatatttttaaattgtacatatttgataccataaagtaaaatttaatcaatacaattttatcaatttaatcaaactgatctcaattatatgtaatcaaataattaaatttgaatttgaaattcataaaattttaaacgacttgattgtattaattaaatttataaatttaaggtattaaatatgtatgattttaaaatacaaggtagcaaataagcattattgaaaacacaagatacttaacttatattttgataaaacacaggatactaaatgtgtagatacccttaaatcaaaatggtaagatacttttttgttaagatgccctctttgtatttttataattcaaaagatttatacaaatttttggttttgtattctttaatgtagttttagtttttggacttgataatgagttatatcaataatgtacattatttgtttattgtatattgttctctttatggtgtatttgcttatctttttttagagttgtttagtactattttatcttaaagatgtgctaaaagatttatggtaagtagagaagtgcaaatatggaatatgcagtagcttgaaatttctctagtaggttcaacaaaacatattttttcattgaattataataaatctaattttatgatgtaatattgtaataaaatcctatttaaattctattatttgttttatatattgtgaaaaaaaaaattattgaatgcaatattttcgagaaaataaaataaaataattttattttttcataaattcaatcaagatatattggctaatttataggcgaaaatatgtttatttttttctcactaatttacaaaacaaattatctcatttattatgattttaatcttgtgtgtgtgtttttatttttttgttgtaaaaagaaaaaaaattaaagctttgaaaatttataatataaaaatatgaatatatttttcaactattctattacaaaacacatatataaatgtagttcaaaaggtagcatctcatcaaaatttaacttaccctcaagtggtgatataatgaagatatcaacatttttttagagtgattttttgaatactatattagctatctagcaacgttgagattgttctatagaggataatattattattaagatatccaatactttatgtatatttatcaaattggttcatgccattttgtttctcgtgatgatgattgaatgactcattctttaacaaaacttagcctatacattatacagtctcataatttttgttatgacgtgggagcttaattattataaaaaagaatatttacattttcgaatggaaattataattattttatgaggttttttttttactattttattgtataattatttaattaaaaaaaattaactcttttaatgggagctacatcctccacaccataagtctacaagatagctattttcatttgacaagagatgtaattgatcattatattggtcattttattgatgtagatatctgagtttggttaagaagaatttccttttcaaaacacaaaaccaaacaaagaaaattatgcacacaattgtatagtcttaaataggtctttatattttagatattttaataagttagttttcgattatcatttttctttttatttgacaaattagtctctacactttcaatcgtttgtactttgctctcttgcattcacccttaccctctcgttgtcgtgttctcactggtaatctctcaaataagagtattcataaattagtcaaaccaatcataatccgcaaagtgtgaatatccacatttgtggagattggattgaactaaaaaattcaaaatacacacttgtgtgaattagatattaattgacatttaaaaataactgataaaattcaatttacagatatttatataaaaattttaaaaaattatatgtacaattaatattttaatgtaaaaaaaaataatattttataatacatataaaacaaatatattttataaaacacttccacatatatattaagacaatactaaacctaattagtttttgtgaaatactttgatacacattgcattactccaaaaaaatatatatatttttttttatcaaactacttcaaaaataaattatttgacttcatttacacacatagaggcttgtcaattgcaaatgaacatattttcttatattcttaattacaaattagtataaatcatccctaatcattactttacttttccattgaaatttcaatcaatagtttctaataaaagtttacatatcaatgcttacattattactaaaaatattaatatttatatttatttttgttgatgtcatacatttcttgtcaatgttattcaataactttaaaaataataataataatttggagaagtaatttcaatatgttgtaatgacttttggtattaaaattctttattttcttttgaataagtagttttgggaaaaatatttgaccaaatttgacaaatgaattattagattaagtcaatagaaataaatattaaacacctttgtttatttttttcttggaaacttaatagcattaaaaataacaaaaataaaaagtaaacacagatggaaatttctataaaatttcttcatatttatttggttgaataaattaattaaaatgaagaaaagaaaataggaacaacatcattgaataaagaaaaaataatgtagttttcgtttttttttttttttttggcctttaatattatcaaatcaaatgcaatgcaaagccacactttttttccacataatcaaattatatataatatattttgtaaggacataatcaaattatatttatttcaatgaatggacctacacaataaagtgcaaaacgaaaaaaaggaaaaaagaaaactaaaaacatcatttgtcacttcattactacaaaacataaaatttatgtcatgctataaattttaaaacattattggataacaattatgtcaatgaaagaaaaaagaaatcaatttttggcagatatgtgtcaccttaaaagacctaaataccctcca

SEQ ID NO: 298995 - DNA, 2272 bp, Cannabis indica
taagagccattcattccgtgggtgtaagggcccaatggaggcttgaagcggggacgttacattttgtaaattgcagcatagttattcctagcttctagttttctcaagtgatacttaggattaagaggttgttgttggaggtttgtttgacattcttctaggtggattcgagcttccacttagttgccatggatatcagaataggattgggcatttaactccctaaaagccatcttcatattcttcagcttggtgataatacgatacattttggttccttgaacctgttccttccacagactactcttttatgaatagaaaggacatcatgagaatgatcaaatctccttcattcatgaacactacttcagcagtaggaaaacatgccatccattcttgattagcaaggacacgatctattttagaatagatcctatctacaccatattgtttattgcaccatgtataataatttccactgaatttaacatcatccaattgaaatttagcaatacaattaataaatttagtggaagaattataccttactggcttgccaataggttcatcctttgcgaaaatgtcattaaagtctcccataacaatccatgcttccacagtagctagttcttggagatcttgccataatttcttccttccttcctcaatattgaattcataaacaaaggtgactttaaatctgctcttattgtccaatgtttctacttcgaggtggattaattgactagaacattttaaaatattcacattgaaacaagaaggtctcctacttactattattcttcctcctaaataccatgcattattagaggtaaagcaccatccatttaacatattatagtataaggcaccaagtttgggagccttaactcttgtctcgaggagccccaccaaactaacattttgagttgcaagaaattgtttgaccagttgttgtttgtgttggttgttgactcctccgacattccaacttgcaattttatccattaggaagaggaggtactccccctcttcctgtattcccaatgttttctatttcatcactctgctcttgtgccttcaattgattggcttcatcataaactgttggctcttgaagagaggagaaggaatttgcaacagctatatcagtaacagctgttatttctttattcacacctttcttcaccttttagactttttttatggtttaaatccatcagcctctaccacttttgcatcctgatcttttgctttggcttttttaatgatccattcagcctttttcccttcatttctttggcagtcactggtatcgtggcctacacctttgcaatgtgcacaagtggtgggcttccactcataagtagcaaatactgtcgtggctacaccattctcatcttcaaaccaatttttctttgggaattcctacttcagtgatacttcaatgagaatgcgcagatagtttagcttctctctgtttttgtaaatgaatcaaccatagcaggctcacccccttaactaatgatcttgaataacacctgttcaccctagtattttagttcaaggttctccaggggaacccaaattggcaccatatggatatcttctttcttgaagttaacattagggtcccaagcattcattattattgggcgtttgttgaaaaagatatatcctccatagaggaccttatctctatctattatggtttgaaaacacaccaaaaaaattccataagacaacataccaactttgtcgatttcatctctccaaacacgtcgaacaaatccatccaaaatcgacattgggggatttgccccaagaacgtagcagacaatggagggggtccaaaagtctacttcttcctgaatatcctcctttgtgattttgattctctgtttggaagtagaaccagcaaacttggtttctagatttcgaattatgttcctagatcttaggataggaggaatagcttccttacctcgtgcgactgcagttgctgtctggctttgagcttccccgaactgtttagcctgcatgaaatgtgcgaattccattcgtatttcgtccctctgtacgttttcattcataggcaatccaggagaaagttcaatcttagggatgtaaacagggcgggacgggtgcggggattgctcctccacccccatacccgcttcttaaattcacccccatacccgccccaatacccatttaaattaaagcaggggtggggaggggattacccgacgggggaaggatttccatcggg

SEQ ID NO: 298996 - DNA, 4733 bp, Cannabis indica
aaaatagctggtggaattcgcgctgatgatcttaaagggaggaacatggagagctccagtgaggaaggttgcataatatcacatgctcctggaactggaaaaacccgcctcaccattgcttcttgcagtcgtatttgaaactgtaccccatgtgcttcccagtcattatagctccttgcagcatgctccttacctgggaagaagagtttcggaagtggaaggttgatataccatttcacaattataactcaacagatttatcaggtaaagaagatgaggtagctgctcggttactactgagagggggtgttcgccatgaccctgaggctgttcgggcagtgaaattgagatcttgggcaaagggtggtgccatattaggcatcacttacagtctctttgcacaacgtgttagaagagcaaatgacgacaaggctaagcagtctgccaaaatccttgttgacagacctaatctagtggtgctcgatgagggacacactccccgaaatgatcaaacccgcatgtggaaagcattgtcgcgccttaaaacaaggaagcgcattgttctttcgggaactgttttccaaaacaacctaagcgaactgtataacacgttctgcctggtgatgccgaggtttgaagagggagagccttcgacaatggacaatagggacaaagaagctaaaaaagcttggaatgcactgacaaaatccgttgaaagaatggaatacgtcagcccagagttaagagcattggtacaatcttatgcccatgtacatgaaggcaatgtccttgatagccttcctgggtttaaggtctctatggtgatattggagccatctacattgcagaagaacctacttaaggtaattcatgaaaggagaaagaaccaatttgaattcgaatttggagtctccatggtctctgtccatccttcactgttccttaagattaaatttgaggcactgacagcaccaacaactgacaaggacgagttaaaaagactgaggctgaattaccatgctggtgtaaagaccaaatttctagtagaactgattcggctttgtgaatctataaatgagaaagtactggtgttcagccaatacatttcgccattgcggttagtgaagaaacaactggaatcccatttcagctggagtgaaaaggctgagatttcctatatcgatgggaaaatggattttaagctgcgacagtccataatcaacgtcttcaacaatccttccagcaatgtgagggtattgcttgcttcacttagaacctgttctgaaggaatcaaccttgttggggcttcaagggttgttttgcttgacattcattggaacccttctgttgagtggcaagcaatttcacgtgcatatagaattggacagaagaaaattgtgtacatatacagactctttacacatgggacaatggaaagggaaaagtactctcgccaagatgagaagcacaaaatgtctaaacttgtattttccaaatcaagctgtcacagtaatcctcccaaaaccaaagtcagagaagatagaattttggaagagatggtccaacatgaaaaaactgaaggatatgtttgtggatatcgtttctgaaagagagaagtagtgaatttggagaatgcagccagtggcattcccagatatctgattcgaaagcttctaaggttatgtgtggtttcctttgaaaaccatttattgtttggtttgtgcatttcagatattgatctgtgaaacttggtcacaccaatccttttgactttttgagggctcaagtgttaggtaatctaactttcatacttggatatagccataatataggtatctctttttttgagtaaatactacaggaactgtttgcaagaaaataaaatgaaaatattacagcaaatataaaagtgagattgataccaccctagaattgtaaatttcaggtggttcttaagatgccattttattcatatcttttgtttatgaacagaaacaattgtttttttggaaaactctttcattctcaaagaaagtaatgagaagttacttacaattgctagcactttacattttgcattttgtatctgtactgccaacactggaggaaatcagtatactggttatacttatagtcagacaaactcatatcattgctacaattggtaattgatgtttaggatttttaagcttattttctaaaaagattattgttaaacatcaaaagaaaaaatttaccagcttaaaagaacaagttgagcctttataatcccaaatgaactatatttacaattatgtaaggaaggggaagaaattgaatagataactgcatgttctccaagtggctactactgttctgggaaaggaagtcttcttggtgcaattgctataatctgtggtacaatagtgtaataaactgtgctgaactgaaacaatggctatgaatattaatagagaaaaggtttgatagtttgacagctttgtttttagttgacccttgtttgatatatcatcttcactcctttctttctactgtttttttcttcattctaacacaacactccaacaaacatatcaactggccattgctttaggtgacacagttctgcattttgggctccttacttgggaatagacattttctttcagaacaaggcctctctgcatggctttactatatgcacactcaaattttgtatgaatatataatagaactcctgatggcctgtcatgtcaagagagtgagagagagagagagagtaaaaaatatatatatatatatagggacatgatttggtcccgtgattggacttttacggaatgtattctgtgatgtacgacagccgttagatgaaggagttatttgatctgagggttgagattgatctaagggtaattagggttaaaaaatagtaacgtatatcctgacactcatttaatgtaccctgagacccatttaatgtatatatatatatttactgaaagatgaaaacttgaaatgataaacgcttgcctcaactacacctcatgatcttcagcaagatgaatacgaaataagcaatacaatagaacatgttgatgttgcttgtgcatgagcaacaaagtaagaaaaaaaaattaggaaaaatgatatactttgatataaaattgcaaaagtgagttatcaaaaaaattattgtaaaagtgccaacaaaaaattccgttgccgggacttgaacccgggtctctcgggtgagagccgagtatcctgaccaactagactacaacggatttgttgtttcagatcattaaaacctatttatctcaataacaaatgtaaagaattttataaattttttgtttctactgaagtaaataaatagcattttgtccagataaaaggacccctgttgtttgaaaaagaaaaagtaaaataaaaggaatcctgacaatctttataattttttggtacacaatatttgttaccatgctgaatacaactatttacattttattgtgcttgttggaggtactctctagcatctctactaatactatctaaacataattttgagctaaaaaagaaaatcaatttaactccaaaaaaaaaaaagttgtaagtttattagagagataagagagagagagaaagacaattctttatttatgaattggatgattacaaaaagaataaaacaaagccttatataggcaagggaagtatcaaataacataatgtaacaaacttaattgaattacctaactaaatgaactaactatcttgacagcccccttcaagacgaagtggaaatttttttacacccatcttgaaaatgatctcattgaaatgagtaggaaataggggtttaatgagtatatcagcaaggtttatttttgagggaacatggttgagtttgatgatgccattagtgagtttctttcgaaaaatttccacatgtttcgccgttcatggaacactggattctcagagatatgtattgttgcattgttgtcacaaaatagaagagcagggagagagatgtcaacttgaaaatctttgacaagagatattatccattggagttcacaagtgacattggccatagacctgtattctgcttcagcagaggaacgagatattgtttattgtgtttttgacttctaggaaatgagagagtctcctaggaaaacacagtagccagatatagatcttatggtgtcaagatatgctccccagtcagcgtctgcaaaggcttggagggtgagttttgatggtgctgaagcatgaaaaaaaaaggccttgaccaggagagttcttcaggtagtgtaatactctgtatgcagcatataagtgaggttgtcgagttgattgagtgtattaactgagtttgttgacagcaaaggtaatgtttgtccgtgcaattgtgagataagtcaattttccaatgagacttctatattgtgttggatgttgcagtagtgttttagagtctttgtgcagtttgatgttcggtatcatgggagtagaggctagtttagagcctagacaacctgtttcttcgagaagttacagagtgaatggcctatgagaaacatatatgccttttaaacaacgagctacttccagaccaagaaagaaacgaaggatgccaaggtctttcaatttaaagtggtggaatccttgctgaataaggtgacttttgaagatgaaggtttcgtatgtgttttagggtgtgtacaatataaaagaaaaaa

SEQ ID NO: 298997 - DNA, 6289 bp, Cannabis indica
tataaataagatagtgatattaaacaaaaattatttttgtaattattgtattttactttattatttttaagtaataataataataataataataataagattaattattaaatggggtagtttgggaatattaaaattttatttatattgagggtgctaaagtagtagtttttgtaaatagagaatactaattgatcattatctaaaataaagagtaccaagtgtgtatttaaatgaaacacagggtctcaaatgagtatttacccttctttttataaaaaaacattacacgtgacttaaaataactacaatatacatcgtaaaaaaaaaaaataaactaaactaaatttattcttaaatgctgaactagatgggaatttactgaaaaactctctagagataaattatagactcatcagtcatcttatactattaaaagtcgagtaaagcttcagataaaaaaactgagtaaaacgaaactaatgatgcaactctacgcagatttactcatgtgacattttaggatactcgtaaatttgtgagtgtaactaagagcacttataagattctctatttaattctttaaaatattttattaaaattttactttttatttattttatcttagagaatctctaacggaaatataattcactttgttaacaatctactccaatgatgtaccaaattataatgcaactatttcacataataaaaagtgatctaaattttgatcaccatatagcatgaagcaaaatttgcatcacaataaatactatagtttttgttgagcctattttttttatcaaaatacgtggcaagtgtaagaggctccatgtggcttagaggccccactcatgaagagattaacactcattatgcagtaacttcttacatggactcgctaagtgtaagatgcatctggaaacgggtttccatttttgagataggcaattgagagatcactctttggctatctaggaggcgatgagctcccagatcaaaggtcatctgggaatcaattatttgtataacacgaattctaaggtggatcactatagatgactagttcggtacatgattaatatcattaagaagccatactgttctgacaatctatttacctaagcaaataaagtgacgtttatgcattacactgtcacatcagccacacatgggacaaatcttgtctcactaaactcctactgcgaaggctaggtagtgcttagagactggagggagatgtacatttctctcctttgacttttatttttttcctataaatacctgagattgtaatgaataatggactctggactcacacacaaagtgaactctgatactttaacttgaatatgctctgatcaagagaatgtttctaccataaataaaagtaacgtgtggactatagttcattaatactgggacaacgtaaaaaaccattctctatttttcccaaattactattacttatatttaattaatggttgtcaaaaatttcagtgaatattttggtgctttcattcagagttatagaaagctttcacgaagaagaaacttgcacttaaacggtattgacaagaaacaatcaacgacctccacaactgcctgatgacccggcacaaccacaagagggagtagcctctcagatagattgtgccttaccactgaccctgattattcaagggaagaagaaacttatgaaggtgatgacgaagacgagtatgcaaaactcgtgttgctgagaaaaacaggccacgaagcatgatgcagagttggcataatagaaagaaatgagtatgagatgaaagaggcattgaatgctatgcggcaagccatggctcaggcaggcctcaatgtagatcttgctgctgtgtcgccagccgtcaacgatgctggagaagatccctcatggcctcaagaaataaaaaatggaaggaaaaggtccccagtcctatcatatatccctctgaagacccttctattttgaaagataacccttcacccagggggaacgatacccatcgggtccctcgcaaagtctgttctgatctcctacaagagaaaaatccattggagaatctgtttccttgaaagaaacacagaccctaggagagtatggaatgtcaaagcgtgtacatcagggacaaaaggtaaaaggtggtcaaagcaaaagagacccactagtagacttgagagaaaaaaaaaatcaatgctaaataagggcaccttaaagctcgcatcaactcctataagaatgactcaataaacgataaggaaattttgagtgaaggaatcttggcggagctggctgttctcaggagatatattgccaaagtgttccaaaggtagaaaggagatgattctgaatctgactatgaagatcaggagccatgcgctaggaaagtcctagaggttcagctcccaaaaaactttaaaatgatagagatgactcaatacacagaggacacggaccccaacaacaatttgtcacagtttaacagagttatgacagtgttacgagtgagtaatgacataaagtgtttgtgcttcctgttaaccttaggaagatccacaagagagcaggtggagtaagttgcaaactaacttccaaaggcaatttgtggctgctaggaaaataaaccttgaagtcagtgccctgaccaatatcaaggagctccccacaaaaaccttgaagacttttataaagagattcaaagaggaagcatccaagaccaagaaaggcaatgacatacaccagctagcattgctccaagatgatattagagtaggaacccattcttggaacgaacttcaacaagaaggcgcagccagcctgtaggatttctaaaagtgggcctagaaatacattaagcttgaacaagcacaaatcacagggtttggtggatattacccaaatggagggtcaacttacacgtacgagatacaatattctgaaggggtacctaccggatcttcagtattgcccagaggggtgcctgctctaagtgtacagttctaagtacccccagcttactcacaaaactcagtttcaacacaaacttattcttaatacagaactcttacagcagtaagcgtagcactaggagcctttgttcaccatccggctcccgtagcacctctagccatgagtgttacacaaacacaccacactacacagagtaaaagtcctgtgaaaggaaattcccagaccaaaaataagaaaggaaagaagccattcgagtatgaatcgcaatacatgtaatacaccaaaattagggacacctaagagcaaatgtattcagccacatgccagaatgtgtgaatatcatagcgaaattggacacgataccaacgagtgaaaatgcctcaaagatgagaccgagaacttaatacaactgggacatctccacgactgggtacaggaccaattgtcacaaatgcaagaaagacacgctggggtcaagtaccccagaaaggtataccccaatctcctaaagcacaaatacccttgccaacatagaattcgacgcaaccagacatgcctcctggacattcccctcaacccaacatgggagtggtgatgatatctagagcaccccataacagaggaatggccaacaatgtgttgaatcggtatgtagaggaattggataatcgtgataaagtatgagaagtgactcaactgcctgcccaaaggccaaggctcatggatcaacccatcattgaagaagatgctaagcttgtgcatttttcgcatcatgatccattagtcattgaaacacccattgccaacaaggtattagcccgcatcctgatagacaatgaaagttttgtaaacatactattcaaatatgtgttccttgccatcagacactcaaactaagacatgtccccagtggttcataactcacaagattcaatggagattacttgatcccaatggttaagatctgactacccatcacgttgtgtccagacaccttgcaaagcatcttgaagtattgtacttttattattgttagtttcccgtctgcctataatgccatcctaggacgactgagcttagtggaattttgggtcgtgaccttaatccaacatttgtgtcttaagttccttactccgtctgcaagagtgggaaccatccatggaaatcaaattgaggccaggaaatgctacaatgtagttacaaaaaaatcagtcttggcagtcgatcagtgaagggattgggaccaacattataaagaggatgagttagatccatgtgtagaggcagagaaggtattagagcccatgcaagaaatagaagaaattcaaattcacaatcaggatccaacaaaattcatccacataagaagaaacctcgacccaaagtcaaggaagagatcgtgaacaccctcaccgagtctctggatgtattcgcctggcatcatgaggacatgacatgcattgacccaatgagatctgtcatggattgaatgtgaatccaaatatgtccatcgtgcatcataaaatatgccccttaaagaaagaagtggaaagatgttagcaaacattttcatctgggacgtgtattacccaaaatggttggcaaacctagtccttgtcccaaaacccaacgggacctggtgaattcgcatagactttaatgatttgaataaagtgtatcctaaagattgcttacctctactaagaattagctagatggttaacgcgacatccgaccaggagttgttgtctttcatggatgcctattttgggtacaaccaaattaagggtcatgtatcagaccaagaatacagaagtctttgtactgaaaaatgggtatattgctacttggtcataccaatcagactaaagaacgctagagtaacatactaacggttagtaaattgaatgtttccaaacttgctaggtcacaacatggaggtatatgtagatgacatgttggtcaaatccatgactccaaggatcatgcaactggccttaaggagtgttttgcggtagtgcgaaaatatgggatgaagctaaacccaaagaagtgtacttttggggtaaaatctgggaagtttttgggattcattgccaatcaatgggggataaaggctaatccttaagaaaatacaagctttgctagacatgttgtctccaaggaagcacaaagacgtacaaagcctcatgtagaaagtagcaacccttagtcgcttcatatctaggttaaccgacaaatgcatcccattcttcaacattctaagaaaattttaaaaatttgaatggatagatggatgaagagcacatgtccaaagctctaattttatctaagccactggagggtgaagatttgtatatgtatttggaaattttagaaaatgcaattagcgcagccttggtctgcgagacagacatagtttaacaccctgtttattttttcatcaaaaggatggtgggagccgagatacgatacccacagattgagaatttggcttactgcctactcagtatctcccaaaagctgcgaccatacttccaagcttaatgatcaaagtgtacactaatcacacgctctgactggcactttagatgtctgaatcatttggtttactcctcaaatggaccttggagttaagttagtttaacattcattatgttcctcgtgtctccatcaaaggacaagccctagcagactttattgtggaatggaacgaggccaacgaggattttgatgctgtaaaagaaaccttgcatgtctagaaagtgtacgtggataatgctgccaacgagaacaagtcagcgactggagtcatactgatatccctggaaggcttaaggctctaaagtgcattacgaatcaagtttaacgtgtccaataatgaggcagaatatgaggccttgctagctaggtttagactttccaagatggtgggggccacgtacatcaaaatatttagtgactctcaaggatagtcaataaggtaaaagaagaatatctagctcacagagagcgcatgtcttcctatttgtcgtctgtttgggagctactccaagaattcaagggatataaaattcaaaagatacacagggaaaaaacacccaagaaaacttcttagctaagttaggatccaacaaagaaatggaaaaactgggagtagtccctattgactatctctcggagcccagcatcatgtctaagaaagaagtttaagtaatcaatcaagcatcaacttggatggattcctattaggctaaaattagtctaagtttcgggtcatattttcggttagttttcact

SEQ ID NO: 298998 - DNA, 1013 bp, Cannabis indica
ctccggaagtgctggttcgaatctacgattaggacatttattcataattataagggaaaaaattatgaaaacgagcgtgcatatatatcactaatttgaacctatttgtttttctttcaagaccaaaatggtccaatgaatatgcttttggactatatataaataagaatctcatttttagttacttaaaataagctaaaaatgattggtttagtgagttttagctttttgtatatattcaatttgcaaatctccaccccttatcgctactttattttgagcaaatattttattttactttttgtatttgatttacttaatgaagtgacactttccaaacaaactcaaactagtcttcttcttctattttcttttttaaaaaattaaagaaatatatattttgaatataaaaattaaacttaaactcgcttagttattaaaagaatataaattttgaatttatatataatctttggtaattcaagaaaataaaattatataacctcatttgaaaaggaaaaaaaaaacataaagaaagagatgatataaatatggttggatgagttcattttttgaagacacacttcccattttagttaagatttgtaattaaatagtgtggtcgaagatgttctaattaggtgcgttattagatgcctgctacatggcaatcttggaagggtgccattttgaactatctgcaattagtatgtactttccacttgaacaagtggtaaactcaccaagagtgaggtcgttcccacaagaattgtagttaagtacgttaaaattaaacttttacttttatttaattgaataaaaaattaaaaaaaggattaaaactagaatataaaaacagtgcaagaataagcaattaactaataaggaaattaacagttaataaaaacaagggctttgacttcaattgtttctattgattatggcttaatatgattatatctctattatcaatttctatgcaataacaggtttactaaggtaatttatagtct

SEQ ID NO: 298999 - DNA, 4191 bp, Cannabis indica
gtcaaacttcaagaactttaggacaaaaacaatatcataaagggactgcaggctaaagttgactcagctgaggcactttgctagctcgcagaagaccaggttattaccttgaatgctggtattgaggagaaggatagactcattgagacaaatactaagaccatataagatttataggacataaagtcttagttccaataaggccaagtccaagccctaaaggaggtcagcaccttgcataaggagcttgcgaacaagaaggaagagcataaacagaagcaaaagtctcatcatcaagccttggtttactcagtaaacctagcccatgtcctcatgttagcgcgcttatcggagagtgttaccaacatcttctgctatcctggtgaagatgtagaggacttttctaattgggtcaaattttataagagagacatcaatgagtacttagatacttatgacggggccaaagatgaggcattagaaaatggaaatgatgaagttgaaactaaggatgctgaggacaaacaagctggagggaatcattctacagaggtcatggggaggtttcttttggggaaggtgaccatttctagaaggacaattctgaagagaaaatccaaaagcaaaaccttaagtctaatgtccctccccacccgtgatcattccttactcttatttttaacttactatcctttttaagacagttcttatttttgcagaagtatttttttcatgcctggtccgcggggctatttgtaatagtatatgacattatctttttgtagagacattttattatgcccagtctgcagagcactaagataaacttaggccttttaattttatttgcttgttctattctaagcttttattctgttttatttgcatgctatactattttaagggttgctatcttaggttgtttagaggtttttggttccaacgaccaaaacttcgaactcagaccttggttaacttttaatccctctactgatttaggaagtatttaggggccaaacacttgtttcctatttttaggtaggattattcttgttaagaccctttttggtagttataaatttaagctagttaaataccctgacagcgtaaaggggcttttagactattcccaaattgttgagtggtcgcagagtcttagcgccttttgagtgccttcagtgtttaactacttaattgtaatgtcacacaaaggatgcagatcagggatggttttctcgcaaaatggcgagcttccatgttttaagcgttccttgaccaatgctcttataaagttgggctttgggaaaggtgtttgagaatgttacaaatttcaagtgttgccccttgttcaacgattggcatttaactgtggtaacatttaggtgactttccctggcctggactttatcgaatagagtctcttgccactaaggcaatacacaaactagggcacaagccgcacacgttatggattttaggcaatactctttgaccaaggtaagtctagaaacacataggagttcaggcgaggcttccccgtttgcacttttcaaaacatccaacatattaaactttaggaaacacactaaaattcttgagaaggaattcaagcgaatttttccacttgggaaatttggctaaaaacgcatctcattttagggcttacactaatttttaatctcaagaaggaattcaggaaagtctttcccttgggaaatttggctgaaaacgtatcttgtttttgggttaaatgcaagctacattagaaaaattgacatgtataaataaagtaaatagatatagcacactgtacattttttaggggtatacaaagctaggtatagtaacccctaagtgtgctgggaagtttggatgtctccaacttcccattcacttgttaaaaacatagcttgtggcttaagaacaaaaaatgtaaatttaattgtaaacttcttctattttcatttcattgtacccaaaggtttacataaagaagagactttctaaaaatattacacaaaacttaagagatacatcaaggcttggtcacctcagcatattggtagtaccaacgcaagtgttctacattccaagcgtgagggaccctcaatccatccatcatcttaagttgaaaagttccttcacccactttttgaagtatctcatatgggccttacgaatttgggtcgagtaccctcactcttggttcttgcaaagttggaaatactcttctcaagatgaggtctccaacatcaaatatacgatttttcactttggaattaaagtgtcagacaatctttcgttggtgcattttgagctgaacatgtgactgttcttggagtacctcaattaggtccaatgatacctggagcagggaatggtttcacaaagggtcgtaggtatcttgtcgatgagatgggattgcgtcctctattggcattactactacaactgagaaaattttcacgattccatactgggcacaaaatcagtgaagtgttcgctctcaaacaatttttcgctattggagacaatcttgtatgaaagtctataacaacacacgatgttcttgataacaaagtctaaggtcttctttgaggtgacagtgtttattggttgtgcctcaacccacttagtgaagtaatcaactgggactattacatatttgactccttcttttcccgtggggagggatcctactaaattgataccccaaactgcaaaacgccatgggctactcatgagtataatttcagttggtggtgcacgtggaaccttaccatatctttggcattgctcacatttctgaacatactctatacaatccttcttcattgtggaccaaaaatacccatggtgaaggattttctttgataagttaggtctggatgtatgatctctgtaaaagccaccatgaatcttgtggattacagtgatgattttagttccagtaatgcacctcatgtatggcattgacaacctcttcagtaaagcttcccatccattatcacataacggggagcttggtactaaaatttcctagaggtggctttatctgtgggaagctctctcgaactcataaagttgtaaatgggtgccatccaagaatgagagttgttgactatggcatttatcccctagatctcaattattggcttttgtaggtgaaaaattaagactacttcgtgttggatgatctcagggtctgttgcaagtttggcaagcatatccacaaatgaatttctgtcccttagaacatggcggatgttgtagcctttgaacccttgtagtagctcctgggacattatgacttaaacagccattttaaaccttccatctagtaccacctaatctttgatttaccaccagctgggaatcactatgttcttcaatgtgctgggctctaacttccctagtcaattttaagccttccagcatagcttcaagttcagcctaattgttggaggtgtggaaattaaaacgtagggcactctagagttagtgccattgcggagagatcaaaatgatccttgctctagctcttttctcattcgacgctctgtcaacatagaccttccagatgggtagtttcaggactggctcttctgggaggtcatttagggtggaacactctactatgaaatcagcgagggcttggcctttgattgaaactcacggttggtactagatgtcaaactggctaagttccatatcctattttaataggataccagaggactctaacttttgaagcacccgacgaagatgatttttcagtacttttatggtgtgagcttagaagtatagtctcaacttttaagatgcggtcagtaagcaaaatgttaacttatcaatcatggggtatctagattctgcacccaccaatcttttgcttacgtagtagaccgggtactggaccttttcttcctctcgcacaagtgtgacacttatagcatgaccaaacacttccaagtatagatataaatattccccctccacgagcttcatagaattggagcttgggtgtaatgaccgctctagtaatttggtttagtaaaggcaattagcactaatttttattattttattattatttgtgaattaatttaaatgtgtaccccaatatttagaaataaatattagagttataatttctcaatttcggagattttattaaactctaggggtatt

SEQ ID NO: 299000 - DNA, 3231 bp, Cannabis indica
tctaccccacaaatggaagatgaaaatacccaaaacccccttcaaaaccctacaatcacaaacccacaaaccctaccaatactgttgtcgccacaccttcttctcctcccctgcatttttcaaactcatctactccacccacaaatttctcttccttcaatcaatccatatcagtaaaactcgatgatacaaactatttagtttggaggatgcaaatgcaaaatatcatcatagctaatggtcttgaaggttatattgatggcaccattgtttgtcctcctcagttcaccgattccacctcaaatcagatggaacctgagtttaccgtttggcatcaatacaatcggatactcatgagttggctttatgcttctatttccgattccatgcttggacagatagttggcttcattacagctgccaaaatctgggtttcacttgaaagaacttactctgctgcatcattcgcccgaagctccgattatcgcactgctctacaaaatttgaagaaagatgggctcacggcttcagcatatttgcagaaaatcaaaactctctgcatcaccttggcctctgttggtgaacctatatctacacaagaacacttaacttacttgttgaatggtctaggaccggagtacaatgcttttgtgactctgatcttggctaggcctgtaaagccgactattgaagaggttcactcacttcttctcagctatgaacctcgcctcgaacgccaaacagccactacaacacttagctcccttcaagccaatttcgccaacctctctttcccaaaacagagacccaaaacaccttcctcacagccttcgttcaaccctcgttactcaccccaaacacaacaaagtcgaccaccattttcccctcccttccacactccacggagttcatatccaactaacccacgccctccgaatccttggattccttctggttcacgccctcaaaccagaccacctaagtgccaaatttgtttcaaattgggacatactgttgtgatgtgctatcatcgcaccaaccttcactaccaacctgcacctccaaatcagcgtccattcaatgcctactttacacagcaacaaccacaacttaacccaccaccacctctaccaaatccatcctcacaacaacttaatctgctctcgttacccacccctccaactcccactgttgtaactgacccggcgtggtatatggattctggagcttctcatcacttcacacccgatctcaaccttcttgaagccgccgcgccgtaccatggtaatgatcacattactatgggcaatggtaagtttgttcctatttctcatgtgggttctgcatctttaccttcctcttgttttccttttcttaaactatgcaaagtttatcattcaccaagtctatctaaaaatttactcagcttttctcaactttgtcttgacaacaatgcttatgttgaatttcacccaacctttttctttgtcaaaaatcaggacaaccatcaaattctactcaaaggtcttcttgatcaagggatttatcgagtcactccaacttccactctcgctgcctctcctcaacttctttactctttcaagacttcacttgatctgtggcattcgcggttgggtcaccctgcttcggatgttatttctcgtgtttcatcaacttgtaatttttcatttccaagaaaagattgcctataattttgtacttcatgtcaattaggcaaatctcatagattaagttttcccaactctgtatctcgggcctcaaaaccctttgaattaatacattcggatatttggggaccggccccggttactgctattactggagtgaaatattttcttttgtttattgatgattttactcgtttttcttggctttatttactcattacaaaagatgaagcattcaacacttttctcattttcaaaaatatggtttccaaccaatttcaaagtagcattcactctgtgcgtactgattggggtggcgaatatcgctcactttccacattcttcactcaccatggtattcgccatgaactatcttgcccttatactcctcaacagaatggccgtgttgagcgcaaaaatcaccatgttgttgaaaccggtctcacattacttgctcatgccaatttacccctacacttttggccttatgccttctccacagccatctatttaatcaatcgtcttcctactcgtgttcttcggtacaccagcccttaccaacttctctatcacaaagcgcccaattatgatctccttcgtgtttttggttgccaatgcttcccttttcttcgtccctacaatcatcacaaacttgaattttgctcttctccatgcacttttcttggttacagcagtaaacacaaaggatatctttgccttcaatcaaattctgggcgcctttttgtcactcgccatgttatttttaatgaatcttgttttccctttgttgttgccactgccccgtcttcaccatctcaaaaacaacattctattatttcatctcttcccttctcggttccttttactgcccatattcccaacacatatcactctcatccaactccatctcacactgctcaacccgtccaaccagcagcagtcataacctccactcctccttcacccgattctcatcattcaccatttcctcctactccacacactcatgcttctacttcatcctcttcaactacctctcctcctactatcccacccttggttgatttgcagggccctcgtgaactttccattgcccctactgatgtgcaccccatggttactcgtgctaaatctgaaattcataaacctcgtttgttttatagtgttgctgcaggtacaccgaatgaaccatcttcttttaaagaagctattgctgaccccaaatggcatcaagctatgaacactgaaattgttgctttgaagtctcaaggcacttgggttttggttcctccccaattggcttctgtatcattggctgtaaatgggtgtaccgaattaaacttcttgttgatgggactattgaacgctacaaggctcgcttggtagctaagggctttcatcaaacacagtgccttgattaccatgaaactttcagccggttgttaaaccgaactccattcggttggtcctctctttagccatctcttacaattgggtcatcaaacaacttgacatacaaaatgcttttcttcatggagatctt

SEQ ID NO: 299001 - DNA, 6262 bp, Cannabis indica
ggggagtttgttaaagagatcaaccagacttttatagttctcattccgaagaaacctggggctaatacgttcgatgaattccgccctattagcctatgtaatttcacctacaagatcatttcgaagattttggctaatcggatgaggcccctcctccatgaaatcatatctccttaccagtctgcttttgtcccggggagatggattgcggaaaatagcattatggctcatgaggttatggattcctttaaaaagatcaagggccgcgatggttttatcggtctgaaattggatatgtctaaggcctatgataggattgagtggagctttctggaaaagaccatggtgtcttttggttttgcaagcaagttcatcaaactggtgatgaaatgtatcaactcggtgtccttttcgatcttgctgaatggtggtcccctgaaacagtttaaccccggtagaggcctccgtcaaggtgatcctatctcgccatacctttttattttgtgcaatgaggtgctttctcgattacttttacaaaaggaaacggagggttccatctccgggtttaaggtcagtcgtcttagcccgtccatttcgcatcttatgtttgctgatgatctgttcattttctgcaaagctaaccgggctgaagtaagagctgttatggattgtgtgaatttgtatggctcatggtctggccaacgtctgaacattcagaaatctgcctatatctgttctactaatgtttcgactaacacccagcttgatttggctcactacctgggatttcgaaagttaaataaggaggatcgtttccttggaaacccgatcatttggtctaatagtaaagtcaatgatttgaagttcatcaaggagaaggtttgctctaagattgaggggtggcgatgcaaactactctcccaagcgggtcggtcgaccttgatccgtgcagtggcccaaagctctccgatctattctatggctactttccttatccctaaaactatttgcactgaaatggatcaagcggttcgtaagtattggtggacgggaaatgcggataaggagaggttcttggcgctcattgattggaattctctatgcttgcctcttgatagaggtgggctaaacttcaagaagtttgaagacattaaccttgctctcatttccaaacttgggtggaagctcgcgtcggaagatgactctttgtggtgtaaggtcttcaaagcaaagtacatgagcaacggggacaagtccttttggtcgatgaaggttccaaaacatgcctcctttggagcgaaaggaattatggcttcgagagacttgattagaaatgaaacttgttggctaattgggaatgggagaagggcggaagtgtggaattccccttggatcccttggttggattggaatatgtttagagctgcctttaatccattaattgagcaaagatcggtcaaggtatcaactttaattggtgaggatggtgagtggagagctagctccattaacagatggtttgttcctagtgttgttaactcttggaatctcatcaagcggctgcccaattctagaaatgatttattggtttggaaagatgcaactaatgggttattttccccaagcgttgcttacaaatcgattatcaaaaatcgatggggagagccggattcgttctggaaccgaatttggaaactcaagatcacggagaggctgaaaatgtttctttggaaactttgcaaagatattcttccttttggaagtcggcttagcaggatctttggtaataataacagctgtgttatctgtggtgaagtggatgattcggctcaacatctcttctggaagtgtcctcttgctaaagcagtgtggtttgcgagccgatggtccattaggagcgaaaacctccagtttgattctccgagaaaaatggttgagtggattttaaatcctgatttcttgagtggggtggatgcaggagacttaggcgaattcaataggtttggtatctgtttgattgacgagttgtggacagcgaggaatcgagcttttcatgagagggtcattccgtcatggaggggagttttggctcgagttcaaggggctgcatcttgccttttttctgcctgggataaccggccaaatcgggaagtggttcaacatgatcatagggaaatttatgtggataatctggttttatttgtggatgcagcgttcaaagatttgcgtgcctcggcggggattgtagtgtcaaattcggagggtcgtttcttggaagcacaggctgtgaattttgatgcaacccagccgctggaagcagagtcctgggctttaattcacgccttgtactggtgtcaaaccagaggttggaggcaggctgttgttgtctctgactgcttgttgctggtgcagagtttaaaggcgcgcagggcccccgactggaggttcatggatgtcttttggaagctgctggagctgttggaggctctaccggaagtagaggtagtttggaagcctcgggctatggttcagccggctcatttggttgctcaatgggcctttagactctctttttctggttttttaactgctgaggagctggtccctcttgtgaccttctaaaccttgattgtttgttatgcttttgtgttgtttaatagagtttttctccagacaaaaaaaaaaaaaaaaaaaaaaaaaacaaataaaaaaaaaatatattctcattgtgagccactccggccaaaatagcacaactcaccttacaaaatttccaagctgcttcaaataaaaacaaactaactgtatttcttactttattattatttattgatgtgactgcaaaaactttaattaattacttaatctcgtttttggttttatatgctatattttggatttcttgcaaataattttaattctaaaatccaaatccttaaaaaaaatataaataaaacttttgaacttatattaatcaccatggataacaacttttaactttaaataagattaatgtatgtgctggttgaaataaaatgattgatgttaacatttatctataaaaaaattgagctttaattaattaacttaatgcctataattaattattatttactgcatgtatattatcaaccacttatcaactcttgtttttttttttttgaaagatatcaactcttgttcaatttcattaattatgataaacctggataaatattggtaattgcaagaagaaatagtaccaataattttctttatcaattcaaccgaataacaataaatgaaatgaattaaacctccctgaaatagtaataaattataaattttagagtttttggtggctaaactctttcaattgctatttcacttacatttaaatctctaagctcaaattttggcagtaaaactctccaaacgtagtaaatttaaggtgtcatccaattaagtatcactatatatagattgtttatgtatacactcatgtacacatgatacatttatattggtacacctattttttaaataattatattaggtgtaccaatatagatgtgacacatgtataaaagtgtacacgtaagtaatttatattgacagtttactgtgaaaaaatagatgataccttaaatttgctatcagttcagtaatttataaaattttactgttaaaattttaacttagaaggttaagtgcaagtggaattataaacttatatagttgagagagtttaaccacaaaatactcttatttttataagaaaaataatgatggggatattttttttaaaaaaataaaattataattacctctgtcttttcattttcttaaaattaatttgatccatgtataatttttcatgatttttcttataactattatattgattaagtgatagtgatagaaattgacttgcatagttgcatttcttccaagtaaactctatttttgatgacctaagaatagatgtatagtacaatagggattttgattaattgtgtaatagtagtttttataacacaaatggagaagagaacttatgggaggtttgacaatatataggtagtgttgtgaatatataaatgacttagatttcgcttatcctactatagtcttactctcacacaagttattttatgtcaattttgtagtaatatatatgatcatcgattgtaaaactcacattttttgtgcatataaaatgttatttacttatatttcgattatccgattaacatttcatacaagttctattgcaggataagttctgaaatttagtgcgtcatacgaaaaaaataaatatatttttgggctcttgtttagaactaaatgtggtatttttttaaataatagaaatataatatttgaaggagaattttttttacccctgatgggtcttaggtacaggtttagctcttttatgttcagggtcgggcttgattctatgtcaattctgtagtagtgattagacgttttttttttttgagttcttgggtacctttttgtaaataaacaattttagagttcatactagttcattgatcgatgatgaccttgatgttcaacccttaattaagcatttaatttttgtaataatatttattttaaaatatcacaatagtcagcaaagaattagttaattagtagtaattagatctcaactagtacctaacaaaagtaataagtaaacctaaaatatttgacaataatacatggtactttaaattttcttattggaattttttccacaaattttaaataatttatatttctttgtttgagttttgctgtatatacaaattaatttgtgtctttactataatgtacgtgtcgtattaattaaccaaaatgaaagattcaacccaacacaaaacttcaaaacagaaacttatattacttgtttatttttcgaaaacacattcactcacatacagttgaattgattacataattgaaaactacatgatatatatttattaatatgcagcaagctataaatttatatatattattgtaaattaatcaacgtacaatactaagagcattgctattgggtatcagtaatgtccaacatcttttaaaaatatcgttcgattaatgaatgatattacatatacactaataattctttttatcccaatatactttccgtaatttaggtaaacacttcataactaataattagtatcactacacaaacaattaatgagacaatttgtcatatatatgtatatatatatatgataatgaccttataatgtataggtcgaccttcctctcttaccgaacccatgaaaagtgatcccacaaatgtacaagttttttaacatatgaaactcattattaataaaaaaaaaatgtaggtggggataaatagctatatatatattgatatatatagagaaaataaaatatactcatataataaagagtatatatataaaattattttagatctcctctttaagtttaatttcatggtaaattcttctttttaatatgtactttgcccaaggagattaaaaatagtccatcgaatcccaattcttctttttctttccttttttttttcagtacacgttgaatccgaactcaatcaaaatattttggtcatcatgctctatagtatcgatttctacaggattatatttgataatttgacaaaacacataatagtcaaaaaaaaagtattgtaatgcgaatttttcgcctaaaaatacaagtacagcctcgtaaaagttgacatgtggacccaagtttcaataaaaaaggatgatgtgtcaataatatagctctcgtaaaattgatatcacatgatttgaacttgcgagaagatacaatcaagacaaagtctagtcgcatatacccaacataatcaaaagataagtaagaccaaaataaattaatattagtcgcacatatcaattttatacgatgagcaagcatctctcatgtgataagtaaaaatcgactctttacataaatttggtccgaatgactagtgtgtttgatgacttgttaagaactcgcaagttctaaattgtcaatgctaggaatattcgaatatgcgaccaagaataattgcattcattcattaattaaaccaaataggcccaaatgcccattatgcgagttcaataccatagaatcttcaaacttgcgtgtttggaatattagagattttataacaatagaagaaaatcaaaatattacaactctattgcaatataatacaaggactaacaaagagattaaataaatgtta

SEQ ID NO: 299002 - DNA, 3213 bp, Cannabis indica
ttagtatacacatttatcaagaattcacagtaaatacacctatttatcttacagttgtcttttttgataaattatgtgttctctcatcaaaatggtagtttttttttgaaattttgtccatgtacatataaaataacaatgagatttccattttttttttttatttaaaatggaatgagtcaatgagatttgctaatttggaacaataagattcaattgagtaagtatgatctagcttttcctaaaaaaagtttaaaaatattttattgatttggttcccaatgtctgaatttttcctgttccgtatcctgtcaaattgacaggaagtgtcttaaatgtggtcttatcttcttaatcttaatttgtcaattaaaaaataaacaatagacagggctagtttagtcattttgcgtctactaccaaaaaccatggaatggaaaagagaaagggaacgaataataaagtaataaacaatagaattatcaaaaaaaaaaaaaagtaataaacaatagagggggctagtttagtcattttgcgtctactaccaaaaaccatggaatggaaaagaaaaagggaacgaataataaacaaggggccccacatgaccgccgagtttccgattaaaaaggcatttgtttttcaaaaagcgccaaaaaaggtcaaaatcctcgtgtacgtttcccaacgctaacacatctctctctctctctattacatcacccaaaagaaactctccttattcttctctttactttctctctctacaactcgtcatctatggccaccgctactcgcctgcggcggctcggtgccgccgccgccatagctactgcctctggtggtgctcttatcttcaatcagccttcgttcgccgttaacgatcgtggtggtggtccggcactcgccactgtcagacagaagatcgccgattcgaatgctgtcgttcctccgaggtcggttcaggagtcggctctaatcggagccagctctgccaatcctttggacgttctggtgattggtggtggtgccacaggttcgggtgtcgcattggatgctgtcaccaggggcctccgcgtcggcctcgtcgagcgcgaggatttcgcttctggaacctcttcgcgctctactaagcttatccatggaggtatagtacttacggttatatctttgtttcatctaattgatcagttgactctgtgtatttttttttttgtggggtggggggaattgcgttgtttttctttcctggctctcttatttgtttcaaaagaataactttattatttactgttgatagattatttgcgagtgtctagaatttttgacactataatgattacaggggggaaattggactcgtaaaataatggaatggaaaatatcaccgtttttttttatcatggtttagattttactgggcataatcattgataccattgcttttaaatagtcggcgattaccggggtttcagacgaaatgtcatagttatatgatttagtcatgttagttttctcttcatcctttcaggctttcagcgtttgtgcctttgtttttcgtttattttgttaacattttgaaaattgttttcagtgaaaaggcattatatgtattttttccgaaacgaaacttgtagtgaatatatagtacaaggggtttgaaaagcacataaagcaaatatgttaacaatgctcgacctcattgaacaccatacttgactatgcaaaaggatggtttttcgaagagctttaaagtgtagatcttttccaaattgtgtaattgtctttaattttttttttttacttttgtttcattctgtatcttttttctctttgtagactgcaaactaacacattttttttctttcaggagttcgatacttagagaaagctgtttttaattttgactatgggcagctgaagctggtttttcatgctcttgaggagcgtaaacaggttattgagaatgcaccacacctttgtcatgctttgccctgcatgacaccctgttttgactggtttgaggtagtgtacttctggagtggattgaaattgtatgatttggtcgctggggcacgacttttacatttgtccaggtattattctgcacaagagtctgttgagctattccccacacttgcaaggaaagggaaagataaaagcctgaagggcacagtggtgtattatgatggacaaatgaatgactctcggctcaatgttggtttggcctgtactgctgcattggctggtgcagctgtgctcaaccatgcagaagtagtgtcgtttttgaaggatgaagttagcaaccggatagttggtgcaagaattagaaacaatctaacaggtacagtgactgcccatttgaaaagtggtacttgaataggtctcatattgaagtacatcatcacatatattttccacattttagaattaatttctgtttccattactcctgttaaaagttcttactttcttgagtgaaccaggtcaagagtttgatacatatgctaaagtcattgtgaatgctgccggaccattttgtgactctgtcagaaatttggctgacaaagaggcacggcctatgatctgtccaagtagcggtgtgcatattgttcttcctgattattattcacctgaaggaatgggtttgattgttcctaagaccaaagatggtcgtgttgtttttatgctgccatggctgggccgaactattgctggcaccacagattctaacacttccattactttgcttcctgaaccacatgaagatgagattcaatttattctggatgccatttgtgattacctaaatgttaaggtatgtgaatattcataaggtcccccgtttccttttggtgtttgcatattttattgcacagccttattttttgcttgggatagactcctatgtagttgatgtgttcattaaattctttcttgtgaggttgttgaacgtcttcaaagagacaaatggtcttgtttcttagtgaatataaaataatgacaaacatgaccagactagcatgcactgactatgtttttggcgttcccattctttttatttgactgctacatttgatgtgtttcttatacgcaaaatgtttccatcacctggacagattgtaaagtttacattcataaaagtcaaataaagacaagacaggcagcttattttcagctaatttgtttgttatttttttgacaacttactttaaa

SEQ ID NO: 299003 - DNA, 1398 bp, Cannabis indica
cgatggaaaattcagtttttgataagacttggaaaagaatcagtttttgattttgatgaagaagtagaaaagagtgtaaaccctaatgcacctaaatggattaggggtccactccttgcaaaaggaggatttggttcggttttcttagccgaaatgattgaaacaacacatgttctaagggggcgtgcacgctttcatcaacctatggttgtcaaaactacgttattttctaagggtgaactcgttaatgagaagaagattctagatcttttcgtaaattgtccttttattattcagtgttatggagatgacacaacaattagcattcttgattgtggtaatggcattgataaagaagttacattgtataatgtgttcttggagtacgcttcgggtggaacattgtttgatttcattaaggattctccgctttacaatgagtccaaacaaatcaaacaattcttacaagagattttaataggtgttaagtgtattcacgaaaaaggaattgttcactgtgatctaaaattagagaatatactattggtcaaagagcgagaagaagataatatttttgtggctaaaatttgtgatttcgggttgtcgaagatgtcgggtgattggatgactcccattcaaggcactaaggcgtattgggcaccagagtgtgtaagtgaaaacccaattcaagaacaatactcagatatttgggcaattggtgtaatggttctctatatgttaacaaaaaaattagagtggagtgaagaattaagtaagcatatttctgaagaggcaaaggattttttgatgaggtgtttcgaaactaatccccttaagagaccatcagcaaagatgcttttaggtcacccattcgttactgggaaaaaaattataaagaaaaattatcgttcgaaaatttgaagattttataaatgatgagaagatgtgaagagaatttcaagaattttaagttagatgatctcttttgtaattttattttatacaattatagtgatactgtgtaaaatttatttataattttttacatgattttttttaatttgtagtcataattttttaccgtgttaaatttgtaatctacatagacttaataatttttttagagataaaaatatctaaaattagaaaaaaaaaaattattcggttagtttttgtccattaaattcagttagataatgactaaaacaagagtcttaacatttaattagttcatcatgtaactattacttttaaatggttgtaattattgttaatgtaaataaaataataaaattgatcggataattttatagtacaagtctaggcatggcaaattgaagctttttcgcggatcgggtcggggctgacccgattcgataattttttttttaaaaaaaa

SEQ ID NO: 299004 - DNA, 1881 bp, Cannabis indica
ttaaaaaataaataaatcaatgaaatgaaattattgtagaattgctcataccttccaagtggattttgagtctcctgttttggctgaccggagcatctcaagcaatagccctgaaacgtaacaccaattacaatagaagagtgaaaaaattaatcaactgaaaaataaccagaaaactatagccctgaaacataacaccaaatatggtaaatgtggaaaatgtatctgaggaataagaagaccaaagcagtcaaccagccatttctatttattttttatttatcaatataacctctttcaggaaaccgaatcgtccccgaaatgctcctataaacctcgactccaaaaactcaactaattaacaaaaaaattcccactgtccattatttcctccacttcctaagtaggcatcccagaaatcacaatgatcatcagttttgtactcctcattatatgaagaaaacttaaaaaacacataatggtctttcatttcaaggtctcaattcaaatccaaactttttaagttttaaaatggtaaactacttgtcaatgcgatgcgtacatcgccaatatacacaagctagctcactttaatcagttaaactaattcaactctaaccacaaacacagctgccacgatttctaaatgggcattgtagtaaagcataagaaagccccaaagacatcaaaattatcaaaacccatcaatatcttaaccaggttcttctcttgtatgtaatttcaataattaagttcctcccatgaactcaaaatcccacacacagacacaaaattaaatagtaataataagctaattacaatctcaagcaaaattcaaaacaaaagtactgattattgctcaataagaaaaagcccaagtacggaaaaagatgaacgagactcacggtcacggctgatttgcttgaaattcttgtagtcgccgccatatgaggaggaatctgaatcagagagggagaacgacatggtccaagtccaagctcgcgagctttctctcccgattgatccaaaacaaaaacaaaaaaaaaagaggggtgagagaaagagcgatcgcgaagtgatcgacggtaagagagagaaagtggtgggactgggaggttagagagagagagtggaatccttcgtttggaataataataagagagagagggaaatgaaatggaattttgtaaatagagagtaattaagtaattaattagtaattagtgtcgttattaagttaagttaattaatctaagaaggaaagaaaagtaaaaaaatgatgacgtgttgacttggatttggattgggaaagaatcatagaatctgttgagaaatgaaacagccaaacgtggcgttttgcttccgcttttgcgtttcgtctcagaaacgcggtggatgaactagcgatggatggaaaagtaggagacgcggaggacggaaaagttgactggttagttagtccttcataaaagctttcacttttatttttcttttttacaaataaaaactttgaataatttaaaatttgtttgtaactgtttttcgtagtcgtacaaacattttgtaactgactaattcgaaatttgagtgaaaaaattgtagtttagaattttataataatttattattgttgtgttgtaaggtaattttaattaaaagtaaggggcatgtagagttgtagattggatgcatatgacaaggaaagaatgtttggttgcagacaaagataaaatgtgtatttcaaatataataatgagataattttattatattagggaaatttgaatttgtatgcttgcatttaattaaaatttgtcctcaaaactcataataccccatatttaaaatatatgaccattttttctattatgcccaaaatac

SEQ ID NO: 299005 - DNA, 3231 bp, Cannabis indica
gcatagaaaatcaaatttcccaatgacattcactcaatggaacccaaagattatcttatttcatagaaggacccaaatgtatttagtcatgagagcaacattctagtttttttttttccccttctctaaagccaatacctccaaataccttagataaacacacttttttccaagaaaaaaaaatggagcttgcttcggtttccagaggaaccccaaagaaaatctctacaaagtttgtcaatatccttagtcagtttttgaagtaagatgaatatgcccatccaataatttctaatgcccaaaagaactgaatggactaattgaactctgccagcaaaggaaaagttattactactccatccatgaagacttttctaaattttttcaattaagccaacacagtcagtatatttccatttagtaggacatagtttaaccccaaggtaattcaaggaaaacgaaccttcttccgtatttataatgtccaaaaggtgctttttgaaattagtcgagatacctccaaagtaggtggaagatttagacttattgactattagaccccgtagcatcatataaattagaaaatgtcttatgaacaatatgaagagaggaaggattactcttataaaaaatgattaaatcatcaacaaaacagagatttataagtgtcaacaatttacaaagggggtaaaattcaaatccttttgtatctaagaaatagcttagaagtcgagtgaagtaagttatgactagcacaaaaaggaagggagagattagatccctttgtcaaagcccttttttcccttgaaaaaagagccacgaaatctaccatttagcattagggtgtaggatgtaccacaaagacacaccaagatccagtcaataaatttgacatggaagcacaaacccttgagtaagtgtgagatgaagagccaatcaacagtatcatagactttactaagatcaactttcatcaagcagcaagctgataagtttttcctcgtgtagcctttgagaaggtcttgaaaaataaggatgttgtgagcaagaactctattcttaatgaaagctcattgattgtcatgaccaaagaaggtagaatctcactcaatctagcacacatcatcttggaaatgtatttatagagtgtgttgcagcaagctatgggtctataatccacaacgaaagttaaagaaatagttttcgagattagcgagattaaggtcttttggagtaattccttattcaaagaaagtaagaactacctttgttatttcagctcctatctcagaccaaagccccttgaaaaaaccagctccaaatccatccgatcgaccccagattttttaactggtgaatactaaacattgcatctttcacatttttcctaagaaaggccttataagctggacctattgaagaatattcaatttatgaccataatccaaatattcctcattcaagcttttagtggtcgaactattcgcccccataaagttcttaaaatgttcaaaataatgagtgataatactatcatattcatctaccaccttcccattggaaactaaagtggtgattctattttgctcattccttttcttgatgctagcatgaaaataatgggagttatcatcaccattagggctgaacatcgggcaggtttaccaggtttcgggttcgcgggtttcgggttcaaaaaaatgaaaccgaacccggacccgaataaggcacgggttggcgatttggcgggttggcgggtttcgtttggccgggttgactgagttggtgggttgacccggtcaactcggtcatatcttaaaaaaaataattttttattcaaatgattatttcttttatttttttatttattaaattaaacatatataatataacaatttgttcatcaaatcaattgaaactattgaagaaaagaaataactaaaaatatttcaacactaatactaaaaaaattactaactctaatctccttagattcactctcaacagcctgtagagaagtgttcgaaagattagcagtaaggaaattctgggtagagatgtaattctccttagctttaaaaaagctttgagctaaatcattgatttcgactttgttaaaaccctttaggcagtgttttaatctattgagtttactcatgatcttgaacaaccattttttaacaattggtttacacctaaaatccaaaggaggcatgagattctagtgaatcttccatatggaccgagagctgctgactttttgttgcatgataacaatttaaagtcatgttatcttctcggtaaggaccaatgcaccatggactataaggattccaagtaccctacttgacaacaagttttagtgcctaaggatgaagaagattgcgactatgtcgctcgcatctagtaacctaggtgtttgcttcatgtagatttcttcatccaagaactgttcagaaaagcagttttgacatcaagttgttcaactttaaattctatttgtgcttccaaagatagaatcaatcttaccacagttgagaagatttcagtgtagtcaactccttctacctgagtaaaacccttaaccactaacctggctttgaaccgtaccggttcattctcattgatgctctctttcaccttgagaatccattttcactctacaatcttttcgttctccaattttggaacaatcacccaagtcttattcgttcggagtgaatccatctcctcattcatggcctagagccatttagacttgtttccacctgaaatttcctcttcatagcttctgggctctttaattttagtctgttgtaccgctaccagtgcaatagctattaagtctgcttcctcaaaccttgctagaggatgaatttctctcctaactctatcccaggccaactaataaccttccagaccttcttgttcagattcatctgaaacatctttttggtcaacattatcttccggctgcgcgatagcttttgtctatgtaataccaataactttcagttttttatttcgtgctccatttccatgtgagtagtgttctagtttttggtctttcctacatcacataaagatactctacctttctagattgtcaagtagggaaattctaattcattaaaaaccatatttctagcaattactacctttgttctaccctcgctactacaatgttggcctttagaggctgttttttcacccccatttataaaaagggaa

SEQ ID NO: 299006 - DNA, 2502 bp, Cannabis indica
caacttcgtcccagcttgctttttcagttgctgatcttaattctaactaccctattcacaattccatgtaagtcttaatttctctctctatatattttatgtatgtatatgtatgtatatatatatatataaagttaataatgaattatatataacatgttgtgttgttgttattattatgtaggaaaattgaagatgatgatgatgggtattcgaataaaaatagtaatatgatgatgaacaacagaagtagtactacaaatcaaaatcagccacttacaatcttctacaatggaaagatttgtgtttgtgatgtaactgagtttcaggtacttcatttttattattattattattattattatttcttgagatcataaaaaatgaaattgatttgagggaattctgggtttgagtttgtcattttaataataataataaaaaagaaaatagtgttaattattgtgcttgaaacagtctcacgataaatttcgtgagactgttaaataacagactttttgtaagattgttaaactgattaacaatcttgcaaaagtctattagacataagctttctaattttataaataagaaatttcgcgaaataattagtaaaattacacataaaaacctagactttctttgttatcatagttaatctgttacttttataattttttgaaagaaattaattaagtctttttttattaattttcaggctagagccattattcttcttgcaagtagagaaatggaggagagattaaagacaccaaggggggcggcggcggcagcaatagagacaacaccggtgtcagagccgtgctcaccgagcattcagtcaccgatttacagcccaacggcggctctttcaatgaagagatcactccaaagatttctccaaaaacgcaagcacagagctcaagccacatctccttattaccatcactagaattaattattgatcaccattatatattttaattacttttgttaattaattatatataaaattattggggtcttaattaattttcttgtaacaattttcttaattagaatatgataaacaaatttttcttttattattttttttttcttcttcttttaatatatattttgagggctgctcttgtaaattattaatcttcattaatcatatatagaatttcaaattttagatttcaaatggattttgttttatttttgtggtctttagatatggggcatgatttggtaatattggtaggtatatgacaatgttagatcgaatgaaatattgtggtgtcgatttagtgggtaagatctaattttaacaataattaatgtctaagatctattattatcgtgcgatatatataaattttaacaaactatttatatcacattatataataataaataataataatcatataataagtgagctatttatttagtacatcactatagcagcatatatattatatgactaagtgttttttaaaacgattactattaatatgcatgatacacattattagttatatttagattgaattttttagcaaatttggagacatgagtacagcacgatacaaaaaatatgattttagattaatttgttgagagaaattagttatagttattacaagccttaatttaactaagcagttagtgttagtaacagaattagttagttatttttttgttacatttcttgtaactacctaaacactatacataagtttgtaatcactctttcaaatcaatgcagagaatataatttcagttcttgaatcttaacatggtatcagagctttgattccaaaaattctgtcttcctcattcaatcttttctttctctttgtattttttttttcatcagcttccatggtcgatcaatcgtccacctccgaaaaatacaagtttgaaccaatctccttcaagcattcgttgtcttccaagcttgatgaaagtataattttttctcatggaaacaacaaatcctcactattgttcaagttcgaactacattctgattcacgtttgacacaaaaacaaatcgcatcaacaatatcatttttgaagcttacctaggaagctcaagctcaattactttttacatggatgatgtactccatgaatgatcaatgaacactcatatgattggccatgaaactttagcggaagcttgggcagctctttaagaattcttcactgctcaaacaagttcaaagataataagtcaatttaaaactaaacaatacgaaaaagaattctctttcattaatgaatatattttaaaaattaaagccattgtcgatctcttgaatgccattggacatgttgtccctgtcactgatcatagtgaagccatcggtttaggtctagaatttttatgctataaataaagcctaatttcaatttattattattttaaatcaataaagttcaaaaattatatttcgcttggttaacattgttaatttcatttttggcatatttaattgacaaaaatat

SEQ ID NO: 299007 - DNA, 4095 bp, Cannabis indica
taagtatgtttttcttaaattaatttcaaaatatacgaatgaaaagaaaaattaaagagggagattgaattccttataaggaagaacgacccccatctttgtcgttatgtgaagaacgaccagattcaggcacaaggtgcccaaaatggagaccatataccaccttcattggcaggtcacttagtcattatctacgaacccatattgcaagaatgaccagcaaagctagagagggctatgctcacacactccgtcacgagcccaaaaacgtcatcctggttgtccaagaaaggggctctaagcatccaaagctttaagagcccactatctctttcccagaaggagatgttgctcaagtcagtatcccgcacaacgaccctctggtctttactgcacaaattaggaatatgactatggcaagatgcttagtggacaatggagcctccttcaacattcttttcaaattaacatacaaaaagatggggctccaagtaactgatttggcactgtgcacccaagtgatgtatggcttctttggccaaggcattgcacccatggggtacattagattggccctcactgttggagaaaatccaactaccagaactctgatggtccagttcgtcgtaatggacgttccctaggattttaacacaatgataggtcaaccagccctatatgacctggaagtggtgacatgcatctatcacgtctgtctggagttcccaacaaggcatgggataggatgtatgaggggagaccaacagtctgcccaacattgttacaacttggccctgtctaaagttaagaaagagaagatgcccacaaagagatctaaagaaaagcccaacaaagggcaatgaagtccagctcaaggtggggatgtagacattgatcctcgctttgggtatcctatagacagctttggacctatagaagagctcaagaagtggaggtcgatcccacttctccagctagaagactgaaaattatctaggaagggtttagcactggaaataaatcagtactaataaaatttctaagggtaaacttggacctcgttgcatggaacatggagacatggtaagaattgaccctccgtgatgacccatgccttcaaaattgatccaaactcccgacatgtgaaacataagaggaggtttttggacaaagaacacacctaaacgattagagatgaagttgagaggctacgagcccaagacttcataacaagaagcattctatcaactttgaccagctagtggatgccagagtgggccatgaaattttatgtttcatggatgagtgttcaggttataactagattaagatgcatccgctagataagatgcatacaggcctcatgataaacttaggcctgtactgctacaaagtcattcctttcggactgaaaaatacaggggccacatatctaaggcttgtgaacaaaatgttcaaagaacttatgggttgaaacatggaggtgtacgtagatgacatgctggtcaagtccagaaaggctggggcatgtggaagacctagacaaatgcattcgagtcctccacaaatacaagatgaagctcaacacctctagtgttcatttggagtaggcttaggcaaattccttcgcttcatagtcaatgctaggtgaatagaaataaagctagacaagatccaagcccttttggacatgaagtttcgcacaacaatcaaggaaatacaaagcctgataggacgcattattgcacaaagtaaatttgtgtccaagtatacagacaagtgtgtacccttcttcaaaattcttagaggaaacaaaaaattccagtggacagaggaatgtgaaaaagcattctaggagttgaaacaattggctcaaccacttgtattgtcaaaaccactagacaatgaagatctaggcgtatacctagcggtcacaaaacatgctattagtgcagacttaacaagagaagaagatgttgtacaactcccttatactttatcagcaagagactaatcgatgttgaaagtcggtacccactcatggagaagctgacctacaacttgctcttgacctccacaaagttgaggccatacatccaagcgcacccaagaaagatgtaaaacgatcaaccattgtggaaagttttacagaaacctgaagcatctggctgactactcaagtgggccattgaactttgccaattcgatatcacatatcaaccaaaaatagccataaagggtcaagcccttgcagactttgtggccgagtgtacaaaaaaatttcatgaaatcgctcaagattcaaaaaataacaagagtcaaagaagaaggaggagcaagagaagcagcaaaagcctgaagaattaacatggaaactccatgttgatggaagatgcaatgaccaactgtccaatgcaggcattgcccttataacacataggggcaacagatgcacatagtaatcaaattcgacttcaaagcctcaaaaaatgaggttgagtatgaacacctaatagctggccttaagccgcctagcaagcagcaccattactgaaaaggaaaaactggtgccaatatagttcctaaaggaatgaagcattaccatccctgaagaagttgacatgttggatgatagttcaacatgaatgtcaccagttgtagctcacctccaaactggagccttccttgaaaatggcaatgaggtaaataagatgagaagaaatgctacctgttatctaatcctagacggagtaacgtacaaacaaagcttctcaaagttgctcttaaggtgtgtaaccaagggtgaggccgactgaatgatgatagaagtgcatgaaggcttctgcgacaatcttgtatttactattttcgcacaatagaaatataataagctagctactagtacttgtatttaaaatatcttaacataaaacattagtacctaaaattcaggagttattcaacttgcaacaaatttgagccaataatctttatcgatttcaggatggtttttagggagcatgccaattgctgcaaatgatttgaaaacaatttgtttttttgggacaaattgaaacaagcatgaagaaaatataataattcacctttttttttcaagtttcagatattatctgatacccattgcaacaagatctaaatgactagataaattgtctttagtttagctaggaataccaaataaggtaccaatattactctcagacatattttttcaatatgcatgatacaatattctttgaaaacaaccatttgtttttttttcttcatttttttgtctctccatacttaaaatccacttgttctacttcttggagaatttgttccccttatagtggtaaagaagccatatctctcactttagtaccatgaaatgatttattcttccatctatcaagattatctttatgcaagtactatctatgacctatataacatatcatgtgtccatttggctagagaagagcccacgggttagtgcaacaaattggagaaccttggtaagcttttgttcttaagctttataaatcactgtaacctagaaaatagcaaatagtcaacaataatactgcctttaaattataaaattatttcttaaaaccatcataggcctaaacactattatcatacaaatctattaaattgtcatttaattgttcaaaatatacatcgatattatgtccaggctattgtgggactgaaatcaattaagaaagcatattaaatttcattttcagtactaactatggaggaagattgtacataacaaggaagacataccatgaactatgactactacttagaactctatgtgaatttactccatccgcagatagaacgagacgaagatgtcttggctcaaatttgaattcttgatttatgtagtttacttttttctaggcttgtgaatctacaagttgtttgagttttttatctttcactctcttagtcttgtgccaaattaatttttagaatgttctccactacaatataatcgtctgagttgcaaaattaaaggcatgtaccacattactttttggaggataagtttcttattctccttactcttatttattt

SEQ ID NO: 299008 - DNA, 2089 bp, Cannabis indica
tgttcgggacttatacttaaggaagcaatccttggtgtagatcgtagagcatcctttatgtattttttacataaaaaattacaaatgatcagacgaagtgatttgatgtcactgcgacaatccaatcattctctgtctttttattccaaaaaaaaaaaaaaattcattctcctgtctttaattacttttgtgtacgtaaagtgtggtgttttggtatatggtaattaattattaatatgaaaaagtatatgagggtgcatgaaaatacacaaatgcaaagcaagaaaagaagtgtctcgtatcgaaaccttctcagtataaagcaaagtggttccctccatgtcacgttcgaaaccaactaagcacatttctatctttctctctctgtttccctctctatatctacgttcgagaaaagtaaaacagaatccttcaacctaactataagaaaaccaactcacccccttaaccccatgaagtaaaattaaaaaaaaaaaatcatactacaaatcaatctctctcttgagacatatgttgtctttgtttcttttcccttgccttattattaactaactctttcaccaacaatttacatatataatccgagaatttcattctctattttatataatatataagcatataaatctatatttttcatgatctaaatcctccaagtacaagggcatctcttctccagcaactagagaatatatatatataattaaaggaaaaaggaaatatgggtagtagtagcaataatagtactagctgtagaagtagtattagttttcaccttttaaagattttggttcgagggcttgcagtggtggggcttatgtggattttgttggctggaactacgccggaggggacaacagggaccaccaccacacgcactactactactactacaagtactacacctcatactaaatcaaacttggcaccaacggagtccgctggaaaaatcaaaggaaacgaccacgtggtcgttgtaggaaaggagaagcttgctcatccaaagttggatcttattaattacatgagcaaacgaagagttcctaatgggccagatcccattcataacaggtactcctactactcgcttcgttttacacacacacatttatatttgtattttttattgtttcacgtagctccctatcttgctatataattgatgtacatctactgtgtttaatttggacgtctacatatatatatgtacacacgcaatttatttatcaaatttataaagctatatcttgttttggtatatatataataaaataaattattttcttatttttttaatcaggaaattgtataacaaacaaaaagaaactaattatcataactgaaaccattctctttttttttattgttttaatggtaatatttagaccggtatttctatgctttatattcatttgtaccagtttgacacatctttcaactgtttgcatcttgttattctaaaagtaattatttctattaatccaaatttgataaacctaagcttgctcttatccacataattgccgtccttagtaacaagcagtccctcggcatcccaaccatgttttgatttcatcaatacgtgctactaaaaacacaatcaaaaaagatatgttcaatagtttcacataaaataaaatattatttcctaacaaaaatataattctttgtttgttcaattatatgtatattgttattaagaaaatgataggccatggaggttttcggtagtccgataatttacaattcatagggactgatattaagaaacggaaacatagaaattttacacataagtgatcacgcatatagctaccaattcacgcatataaaatagagggatttgcggcgaacccttcttatgttttaatttttatagacttaacttttttattttattttatggcaaactccctcaagtttacttttctttgtaaatttaagatgtcaagaaaatattctcgttaaatacaaactgagttactgctgtatcgatttcgaagttttactattacatataagtgtatatagtggtcatccagttaatatttaatagtagtatttaact

SEQ ID NO: 299009 - DNA, 13283 bp, Cannabis indica
ttattattgcatattttatgaatgataaagaattttaaaaaataaaacaaactatttgaataatgatttcgacactatatcctaaaattctaggattttcatataaaaaatgaaattataactaggtaatttttttgaagtggattatagaactttacatacatatttttcaatcataaattttaaaacaaattaaattggttaaaaaatatccttaaacaaattggtaaataaaaagtaattcctttaaaaaatatatatttatgatacacaattcacaaaaaaaaaaaaagaaggttgagttaaaagaaaaaatcgttatcaccaaaacttaattttaacacttccctctcttttctttctatttctgtttctctctctttcttcattgttttctttactcccacccaaatatttcggctttaatatttttctccttactgctaagaatttttaattcccctgatttgctgccccatatctatctcttgcctgaatttaacaccaaatatcgaaattcccaccagacctaagatctcacgcttccacgctggtcaccactggaatacatcaaggtcaaagatctgaaatttaaccactcaattctacgaatctcatatttttcctttctgggtctttgcttgctcgccccttgtgatgggttggaaatacaaggctgggctgttcctcatagttaccgttgttgttatatgggttatctcagctgaagtcacccaggtgattcaagtttctagttttctgggtagactattcgtggtttaatgttttgttaaaaaaatatgtgtgttggatttaacatttgactaagttttggtaaaagattcattctttgcaatgatgcatatgtatttgttgtgcatatcctttatgggttttctcagtttcagtttatggttttgacttttgatttaaagtttggaactggatgtggatttatacgtatttgttttaatttgtatatctattgtgtatgcctactggagaaaatgctttatggaatttataggagaagtggtaaaatttacaaactcttaagatgtttgttataaagaaaggcatggatttcagacattaatttagctctcaagcttggttctttgctaggagagaagtattgataagggtattaaacttgttggatgaggtaattttaaatggattcgggttcacataatggttaaatatagtaatcgtcggagaaactgtgatcagtttgaaatgttattcttacattgggggtttataactgcgaataaatctgtttctatgaaacctttgaccattgttgtttttgttaagagctattgtagaagcataaattgaactaatttatctgttttaaaactttatgggtggtttatgtacaatggtttttattatgccaagtcctgtattatgccaaagttttctttctaagtgacaattattttgtttgtgtaggacatatttacggattataagcagccattcgcagtaacttatcttggagcttctcttatggtagtttatcttccagtatcattccttaaggattggttgtgtagtttactaagacgtcgttcttcaaaaggtggcaaaaatgcagaaagcatgaacgaattttcttctggatttacttctcctttgaagtatggagggcagaaagaatatgaactggaaatgcaagggatgttaactagaaaagatagtgaagcagacctttctcctcttgcagaaggaagacctttggtttctagacacaaagatgaattgcatgtgctgaaacaagagagaaagcttacaacaagggaagttgctacatatggattctacatagcccccatttggtttattactgaagtaaggaactttctaagactactcttttaaaaccagtcaactactacatatagctttcgtgttcataagtttctgcatgttggaaagagtagtcttttcggctgattatagggtgggaaaggaaaaccaattatacctgctttgatgcagtggcgtgaaattattttttaatgaacagatcaaaagccttacaacaatattagaatttctaacaattgctttatttttgttatcaaattaaaaacatctattaaaattttagttataaatgggattcctttgtttgttgcagtatttgtcaaatgctgcacttgcacggacgagtgttgcaagtacaactgtattatcttctacttcaggactctttacacttttcattggagcatttctcggtcaagattctttgaatgtagcaaaagttgttgctgtttttgttagcatggctggcgttataatgacaactatgggaaaaacatgggctactgatgattcaaaattaggatcctctacgtaagttctaacttacctcttggatctggattatacaatacatcttcattattgacatacaatttagtggaaggtgaacatctctgccatctcatatggaagcagttgttttgcttatttgttttggtgctctgcatctgtgatttggttgtagtccttagaagacctcctgatggagcaaagatcagtagttttaagttgaagaaatgctggatttgtattactatttactgagttttgaaatcatttcaactttactgatgcttctcatgtttataagttcatgtacagatagatatatgctacctttgtttttacaatttgaaattccttagttggatactaggattaactttgacggttgatatgtatgtgctcagcaatggggaacgttctcttgttggagatgtttttggccttctctccgctgtgtcatatggtctatttacaggttgccaaattttgatcaaagatgtatacatatatgttattaatttctagtacagttgtaatttttcaaatttaaatggacagtaaaagtcatactcccgtttattttgctgttcatattgcagtgcttcttaaaaagttttctggtgaggaaggagaaaatgctgatgttcagaagttgttcggatacattggattgtttacgctggtagcactatggtggctcggtaagtgctcagttgtcacactgaaagtcattacagggttcttcatacttgtttgttttatcctacttatgcctctagaagcatcttgctatgctttgctattaaattgtggtgttttaaactctctctcagtcacccttcagattaagctttattctatatgtgaaagaatcatgcagcattgttttgcttgattgaggaatatgtttgtttatgccttatccagtttggccattgactgcattgggaattgaaccgaaatttacgatccctcactctatcaaactggacgaagtagttcttgccaatggctttgttggaagtgtactctcagattacttttggtattgtcatctaatagccttctattcgaaatagtgatttgtggtctgcttttattgcctcctcttttttttctctttcttatttatgatttctattccacacagggcattgtgtgtagtgtggacaactcctctggtcgcgaccctaggcatgtcactcaccataccacttgcaatggtggctgacatgatgatccacgggcgtcactattcagcagtttacattcttggctcggctcaggtgcgctctctgaattataaaaatatagttgacatttatttaggctatctgaaagactgaatgaactatttgtatgtgtttgtttcatttgtggtgttcaggtctttgctggatttgtaattgccaatatttcggattggttctccaagaagttgggcttatagcattttgttcaaattttcaaaggattagtttggcaaccttgattcttatatgggggccatactctctatctgccattgatcagataccaaatccttgtgtcaaaaaaaaagaaaaaaaaagatgaacttgatatggttctagattgtgaaaaaaaattggaacaacctaggcttgtgtttgtcttctcaccaaggtctggtttgagtgttgaccccataatgtaataaattttttgtttattttttcaagtgtatacaaaatttgttcaaactggactgatattgataaggataagttcaatttaattcacggattatcaacgtttacatgaccttttttttgttctgctacagtgtgtagtatattattcggataaaaaatattctattattattattattttccaggaaaaaaagtctggtttgtttggaacagaaaggtcatatatattaattaaagatcattactatgtagtacaaagtgacaccttaagatattttataacaattattatattaaatgatgtgaaatttgatatttaattatattgataactgtataatattttgggtggtgttagacactattaacatttcttttaatcaaactactgcgatagatttggaaaaaaaaagtaaatgattaataataacagaaaaagaaatgtattatgatatggtatctgattaattcaaaaaaaaacataaagaaatttgcaagattctgttttctttaataaaatacataaaaaataacgtttcaacacgacatgacgacaaattatgaacccctctatttagggctctaaaatgtcaatgagattacaaaggtattgacgtcttggttccaatgtagacactgcaaaaagtaatattttttattttcacataaaggtcggacaatgctccgatcattatccatgtaagtggcgttgtgacgccactttaaattcaaacgactcttttttagactttttcaaacactagttgccaccttttttcactcttttatcattctcaagtataaataattgttttgggagaagattaaggattcttttctaaacgtgattaaggactttttattaagaagagattccaattagagaattataaaaatagattacacaataattgttctacacgcgacgctacgcatgttaattctcatcattttactttttcttttgattctctctttcacgatataatttaactttttatcttctctatcatttgtatgtatcccctatttttctatccaaaaaatgcatttatttttcatttctccctatttctttgggaactttacaaaataatcttcatatttatcctactattgtaacactatatgaaaagtcctaaataaccattagctatctcttactcacaaaattctagccatcatctccatgaaaatggcatgcttctaatcatgtccaaaaatagttcatttttgaatcataaggatacataattaattaaaaatatgtaaatgtataaatacaaaaaattaaaatgaaacatactgggaactcgaatctcggcctcaaccctggttctagtcgccttatgtggtaggccaaacgaactctcaatgtatatatatatttatatatttttatatataaatatatattggatttatttagttttgttgttaattttttttttcgatttccaagagtactactgctacttgttattaggttgtttaagagttcagttaagatataacattacttaattaatgcatgcaatgtgcttgttgattttatgggttataatttgcattttaattgcttttagttattttataattttagttttttggtttccaaaatgcaataactagatctaaaatagtccaaaattgtataaatcaattattggaaatttcttcttagcaaaaaaaaaaaaataattgaaaatttctacagtagactaattcttatattttggtagacctttatttgttttgacatttagaaaaaaaatttagttgtagctatttaggaccgcatgcaaatttttaaaaaattctaaataatttatagtgtcgaaaatagggttcaaacagttacttgtcacttaccatgcgtataaggaacaacattcgctcatgcaacaaaatatctaaaccttattttcggtattataaactattaaaaattttcttaaaatatacaggtagtcctaaataacgtatacgatcatgcaaacaattagattgaaaatctctttttgaatgctgaaataaataaaaagtctaccaaaacaccattttagagggtgttgtataaatttaccctcaatcatttattatcctcaattaatactcaaaatcttaaagtttgaaactaattccaataactaacatttgctcccggatctggattagggtggtgatttcaacgaattgttctgcttagcaatattagaatgaatggtgttgggtctgtttatgctcgatctatgttagtgctcgactttattagtagctttcattttttatagtaaaaattacacattggattttttttagtatttactttttaataatggtatgttttcattgcctgattattttagtaggaattattattggtctgaagattagagaggaatttgtgtactgttgttgggttttggatattttgtcaaatggctcatgttgtttctattagggatgtcatttctccttgttattttctttatttatgatatgtataataaaattatttcttcaaaaatcattgatccataatgatagctattgatagatagattttttttcagatactaatttagttcagaacctattatatttcacacctttttgatgattaatttatgaagagtgaagacttattaggattttattttatttcattgtaaacgctttgataaattttttgtttgaatttgctgtatggactatatcttaaaatttatttaatttgcctaaatattttcaatcctcaattgagattcaaaatgtcaaagtttgaaactaattccactaactatttttttttttaattcaatatcattaatttcaatatccattcaaattaaatatcattaattttcatttattaaaaaaaatcattaattttcatattttttctataaaaaaaaaatatcttttatgaaatgggcctggttttttcttacaactaataataataaggcccataaaaggcccaaatgacattcatcttactttcccagtggaagaagttgaacgacttcggtactgaacattctgagaaagatttgaaatgttgttgtcggaaactaattcgttcatttgcagaaatattaataattaataattaataataataataaagagagtatttggtctattcgattctattactgttactttgggtctctctctctctgtgagaagatggagagcttgccgacgacgaaatcagagagacgatggaggtcaaagcctcttcacacgtcaaaaccttctctactcatggctttgttttcatgcattgcttggctctatgtagctggaaggtccgattctaccttttctcctctctctcatatttttttttatttctgttcagttttctttatttccttgtttggctcgcgagaaagtttaggaaattttgtattgttgaacaagttgaaactaaacagataacaaatgtagatttaggaaattttctatttcttaactgtgaagtcgttatatgctgattttggctataatataaaatcaggtcaatttcgaggttcttaatacacatatatggatgccttaaggaaatttaatttcattggtatttttgttgttatactactacactcaatactttgttttataatgcttcaggttgtggcaggacgcggaaaacagaatgttactagctgatcttcttaagaaaaatgctggacaggtttgtctggggatctatgtggtgtgatctgattagtactaaaatgatgagaatttgttgtaaatggttttcctttttaaattactgaaaaagagtttggactagttactagtgaagatcaactgtgtaataagatttctttgtgtcttctttatcttcaatataaatatcctttgtttgattatgatgtccccctgcttttgttaatagagacccagagtcctatcagttgacgataagttggcagtccttggctgcaagtaagttccctgtctaatcggttttcatgaaattgcatttcatcaagtatttttttatatggattaattatattggtctttagagatttggagagaaggattgtagaagctgagatggatcttacattagcgaagagtcaagggtatctgaagaaccatttgcaacaaagtggctcttcctcatcccgaattctagctgttattggagtgtatactggatttggcagtcgattgaagagaaatgtgtttagaggatcttggatgcctagaggttagttgggatcagaaaatatgttccatgcttgatgttttaataatttaaaatatgttaagcaggtgtgaagtacaaattttggattagtctgaagaagaaaagaaaactaaaaaggctgattattgcaaattacaatgcttttgcttcaggagtatgtttgtctttccataacagtaatatgttttaagtgtactatttggtttttgcaggagatgccttgaaaaaactagaagaaagaggtgtagtcatacgttttgtaattggtcggaggttttcctcaaactttaatctctgttattaattgatttcgtgctttcttattcttatttatgtaatttgtggttttatttgttgaacagcatcaatgatgagactatattattttacaaatttctctcattctcttctttttttttttgttgaaatgatagtgctaaccggggtgatagcttagatcgtaatattgatgtggaaaatcgttcaacaaaagatttttttattctggtaagcattataatttcagttgctgctattacaacttcacagcttttattctctctctatatatatgagcatgtatttgtatgtggtattaatatttccataattttgttatgtaatgatattgaaccaattgttccagaatttatagtgtaatagctttgcaaagcgagaaaacaaaggattctaaaagacaaaaagattctttgtgaatattacatgacaatgtcttatttaccaattaactattatttgaaacagtaattaatttgttgattttcgatggtggaaaaagttcaatattctatttagagttggttattaataataattgttcgattgacttaaacatagaagtttatagttttggatatgtttgattggtattaggaaggtcacgaggaagctgaagaagagttgcccaagaaagctaagttcttctttagcacagcggttcaaacttggaatgcagacttctatgttaaagttgatgacaacattgaccttgatcttggttgagcttttctatatttttcactcttgcaatatatattgtaatgtaggccttctttattgatcaataatttttttatcatattatttacatatttttgttaacatgacagaggggctaattgaacttcttgaacgtcgccgtgatcagaacagttcttatattggttgcatgaagtcaggagatgttgtagctgaagagtatgtattacgttataccttaattaaactttattgttgtgtaatatcctattttccttgtgagtctatagtgatcatgccctcatcgagtaattattgttatgatttgtcaatataaaagtgaacaatacacaaggagctgtactattattgagaaaaattacacggaggtatataaaaacatctaaacattggcaaatttgacaaaattgagtttgaatgaatacattgaggtatataaaaacatctaaacatgttaggagcaatttagcagtttcgggaggatcaaaattcaggtgaaccagcgttatgtcacctgtccctaggcgataatatgtctcgggttcaaagagatgatactgtcgtatgagtggtgatgtttcgccacctagtaggcaacgcatcgctactcgcttgaaattttggctccaaaagttgtgctttgaaattgtaacatgttgcaacaagcttaggttggtgctaacatgtagaagtctaatagaatagatcctctctattatgtgtattaaaagactaaaattgtttctgtttatacaaagataaaatggcatattaaaattgaccactttttgttattgtgccatatcctgttatttacccgcttcacttttgcatgtgtagatttcttgttttctagttccgtcatatttttttattaattattagctgtgaatttttcagatttgttttttgcttactacaacctaaattaatcagaaggttttattgatttgaatttaggggaaagccttggtatgaacctgaatggtggaaatttggtgatgagaaatcgtaagtgatgttatatttgattcagtgtgcttctaatgctccttatatatgcatttatgtatgtacgcttataacacttgtgttctgcatcaactgtaatcgcctttcttgatttttcttttcttcaggtacttccggcatgcatctggttctcttttgattctctccaagagtttggctcagtatgtctacataaacaggttagtcatcaacttcttggcaagccaagcagttttactatttataaacagccaaaccttgtaaaattgtgtgggatattgtatcaagtacagttatggttaatactccaactgaatgcaccagcagttattaactcaaatactaaattgcatcactttggtatcaaccaatagttccaagtcacagtctaatatttattttgtttacttgtgaatacagcgcttcgttgaaggtttatgctcatgatgatatatcaataggttcgtggatgatgggtctacaagcaacatatatagatgacaatcgattttgctgtggtagcattagacaaggtaaatttgcttcttgcaagtttttgctcaaatatgtgggtagaagttgtgatttctgcttgacgaaattgacatttaactcttttatcagacaaagtgtgttctctagcctaattaaggagatgcatatggcttgtcaagaagacatcaaatcttagttcattggtagttcttgggcgtcgaactccttgcggtgaatgatttgtgagaagaaattgacaaaatggttcttgtagatttatttagatattggcctcaattctttttagggtttacccatgtttgactgcctatcctttcatcccaacgattcatcttatgtagtggcctcaatgctaatctgaattgatggaagtagttaatagaatatcagtgatctcaataaaatggtttaaatagaaggcatttgtttgttttaatgttcttaatttataaatcgatttatatgtacacggatggggtgaggaattggtggggcgttctcccacgatctccatcttgttaagaattttaaatcccatttcccgcatattgtccgtacagggaattctacaactactttagtttatattttagtttctccattacaagtagacctccacaggaccatctccatgggaaaagtgtggataatttattgataacgccttaaatatggtgaaattagtaactaaatactatcaactgtattatattgttaattagaaattaggactaattagttttcattattttcctagtttgttacaatagtttacctaatgtgtataaatatatattattttctcaataaaatacataagaaataattctcttcaccgttgtttttaacatggtatcaatttaagtggcgttcggttggatgaaataaaaatatatgaatagcaatgagaatgagaataagaataagagtagaatggaattaaatttgaaacacataaaaaatggtaattaattttttttttcattttacattgaaatggtcattcattccaccaaaatgaaagaaaaattatttcattgcaatgatattttaatactttaaaatacaacgaaacaaatgaatgaaataaaaattgtttcttttctatttcattacctccaatcaaggtcttaaggattgacaatggccttgagtactactcaaatgagttcatggaattgtgagccaaaatgggaattcagggacatagaaccgtgaccaaaaccccttagcaaaatagtgttgctgagaagatgaatagaacattgattgagagggttaggtgcatgttactaggagttggtttagacagaaccttttggggagaagcttttaaaacaacctgctacctaatcaacagatcaccatctgtgccaaacaactttaagatcccacaagagttatggataggtaaatccccaaacatagatcacctgaaagtgtttggatatactgcatttgtgcatgttagacaatataagttgcagcctagagcattgatatgcatgtttcttggctaccctgaagaggttaagggatatagagtgtggtgcttagaacctggattcaagaagtacttgataagtagagatgttgtttttaaggaagatgaaatggccatgaaaaccaagagcacttccaaagacagtgaagctgtttcagatgagaatgtccagatttaggtggagccatttgatcctacaacatcaactaatgttgttccagatggaactgaggtaacaaaaggagaagacaatgaagatcagcaagagctagacagagaaaagctcctgaccattttggttatgatgaattcattgcatatgcacttatgattgcagaagaggttgacaatttagaacccactagctttcaagaagctatgagaagtaaagatgctgaagcatggctgcaggccatctaagaagagatgcagtctcttaggaagaatagaacgtggattattgtgaagaaaccagagttctacaagctggtaggatgtaaatggtttttcaagcataaagaatgttcatggaatgagcctaccagattcaaggcaaggttagttgccaaagggttcactcagagggaaggtatcgattacaatgagattttctttccagtggttaagcaagcttcaatcagagccatgatggcaaaggcagaaagcatagacctagagattgaacatatggatgtaaggataactttcttacatgggtaattagaagaggatatctatatgcaacaacctgagggctttgacaatggaaacccaaatggggtatgtctactcaagaagtctctttatggcctgaagcatgcacctaggcaatggaacttgaggtttgacacctatatgtagaatattggatacactaaaagcaagtatgactcatgtgtgtatttcaataatcaaatctgtaggaaatttattttaccaggatcttagatctactcacaagtatgttgtttaaaca

SEQ ID NO: 299010 - DNA, 1745 bp, Cannabis indica
aatagaaatatatttccaaaataaaatattcttataaggctttcactccgagttaggcctttagtaaggcaaactgtaatttgatctgatgagggaatgtagcatatttccaactctttcttcaacaccttatcacaaacaaagtgaacatcgatttctatgtgtttggttcttacatggtacaccgagtttgaagctagagcactagcactttgattgtcacaccatgtaatgggagtgcttggaagcttgaacttcagttctttgagaagagattcaatccaggtgatttcaaatgcgacatgagtaagagctctatactctgattcagtacttgatattgacacaaccgcttatttctttgatgaccaagcaacaagtgtttccccaaaatagacacaataacccgcaattgatcttctatcatcaggacaacatgcacaatcaacgtctgagtatcccacaagacctaagtgatcactgaaaccaatatgaagaccatgatgaatggttccctttgagtatctcaacacttttttcacaacactccaatgacttgtagttggagcttgtaagaattggcttagcttattaactgcaaaagcaatgtctagtcttgtgtgacatagatattggagagcccctatggcactcctatagacagtgggatttgataaggcttctccatcaaacttcgacaggggtttccctgaaacaatcggtgttgggcatggttttatgttgaccatgtcataccactacaacaaatctgatatatatttggattgtgtcaaatataacccggtgttgtcttggcaaacttcaattcccaagaagaagtgaagttgacccaaatctttgagtgcaaaagtcttgtttagcttggaagtgaactcacttaattttctttcatcatttcctgttataatgatgtcctctacatataccaacaccatgagaatgatttgacgtgtcatgtagatgaatagagaagaatcgacttttgagttggtgaagctccattgcattagagttctttttagctaatcaaaccatgttcttggtgcttgtttcaagccgtacaacgacttgtgaagcttgcacacatgatttagtttttctggatcttcaaaacctagtggttgcaccatgtaaacgtcttcttgtagctgtccattcaagaacgcattgttaacatccaattgtttgatcttccaaccctttgacacagctatggtgagaacaattctaattgttgaagcttttatcacaaggctgaaagtttgataaaaatcaacactagggctttggtgaaagcctttggcaacaagcctcgccttgtacctttcgactgaaccatctgcattccttttgatcttatgagcccacttattgccaaccacattgtagttgtccaacctgggcacaagtgtccaagttttgttgtttttgagggcggtaatttttgagttcatggctggattccagacaggtgagttgagcgcttcttcaagtgtttttggttcttcacttatggattccattgagcctgtcccaaatacactttcgtttaaatattccggccttcgatcgtgttatcatagggtgagattgcctaggagcttcagtaggaataatttcatgctccggttttggtgttggctggtctgcaatatcagattctaagctgagttatcaatgttatcattagctacattgttattgctggaatttattttaccagg

SEQ ID NO: 299011 - DNA, 3503 bp, Cannabis indica
ccacaaatgaaattatatggaggtaggacagattccagagaccaattgtccaagtataattgcatgatgcaagtctccaaggctattgataatgcaaaatacctttgctttcattaaatttaagctaatccgcggaagactcgtggtagagattatctccgagatcaatccacaactagaagcaagcaatgttcagaaaatagttgtagcgaatgactttaatctggaagccagttctctgactagtgtcaaatagcaaccagaggaaagtttgaagaaataaattcaatgcatgatggatgtttttgctaaaagtaaggttactaatgatatgaaaatggtggctttgacatcaggattaaccataggatccttgctatggggagatctccaacgcaaaatggcatatactttaactgatttcttgacgagagctcaaggattcataaacttagaagaagcttatgctgaagcttatggagtacttccaacaccttccactaacatagcagtagcccaaactttagatgactactccatcaattttcttccagcaactgcctttaacactcctaccgtttacagactaagtgcttctacgcagccagcttcacaggctagtttttccagatttggagtagtacaagctggattcagtgccgctcccagacaaatgaaccaaaaagtggaaactctagagtccaatgtaagccagtcacagagcaagaggatttccaaggctccaagtcaaaacgattctgcgaagaaaagaaagactcaagagtatagatattttgggtatacatgccttgtagatactcgagagaatgttataagacaacttgtaatatggtctattgcaagaaagctccgccgatgtacaagggtgaaagacaaaagagagattcaaacaagaggtgcgactaccacattgatatagggcacaccaccagtgagtgtgactatctgaaggatgaaatcgaaggattggtacgaaataggcatttgtctaattggataagaattccagtcatttatcctaggtaggaggttgcacatgaacaactttttatttctggacaacatggagccattaatcctcctcagggagtagtccatccacaggctcctggaattcaagctcctaatgcacaaacccttcaagggacacaaaatgctccaacagagagaattgatgtagctcctagtctcagaaacccaatcttccttgagcagcctagcctgcattacatggtcaagtggcaaccatttttggtggaccacacattgccagaagcatctaaaatgcacagaagaggtacttgaatgagttggatcaagatgagacttgcaatttggtacaatcacctactcaacatcctcaaatgatgaatttaccaatgacttttatagaagatgatgccaagcatgtgcattttccctataatgaccattggtgatagaagctcacatagcgaataaaagagtttccaagattcttgtagatgatgcaagctctatcaatattaaacctaggacgaagtctctctgtcatctctgatctatttatgatgttaggaaaaggctcgtcccacttatcgtaattagcaaactcggcactacgcttggtagaaatattgatggccaactttctcatctcatcatactcgctgccacgccttttcagataaaattgctcaatggcctccatgtgcgcccttgcttcttctaacagtgacataggcctgattggaaggttgaagtgcggaggaggtaatggaggcaaggtcgtcttttccctaaacagttgtgtggtagtggcaggaatgcgtttgggtgttaggggtggtagaggcgcatcttgattgtccttggttgtgcgagtgctccttctgattggctttctgccctcggagacatcagatccctttcagaagtgagatttagtagcttgtctccttgtggcagccaactgttggactttttctttagtctccacccttgcctttttattggcccctccatctgtagtactggactacttcttgagaaccaagacttgtccatcacaattcgagctgtcttccttaatgttccctataggcacttgttgcaatgctgccatattaagaacaacttttatcaggtcaatgacagaagtagacaagtctttcgaggctaaagcctttggagtagcctcctggctcgatgccggaggtattggcttatgagatccactcccagaggtttgtctcttcttgtctttacttttgccttccttggtcacctcacagacttcatcagatctagagttgatagcatctaggatgttgttgagcagactcatttggaatatagcaggttactctgtaaggaacaaataaaaatacacatcatgttaaattatatcaaatataattacaactacaagctattagataatattccagatagatccaaaccgtttatcttagtataattgactttccctctaccaaaaagggcatatcctctcggtctaagttagtcttgtgctggaagaatcctaggaagtaaattttactaaattcgcccaccctaacgtgatgatgcactggtggaacgaaatggttgagactccttataatgcaatctactttatttatgaaatcattgcaagaatatctattttgatcaaaatttaaaaaatataggtcaaagcccccttggtcagttttatctaagtttgttaaggaaggagccctaattatatgaaagggtgtctcaccactaccggaattacttgctcccggtgcaccctcatttgggactacgtccgtgaagcgaatagtgagctcttcaacctcgcttaaatcttttaaaaatatttactcctccagtcagctagctagtattcatcatccttcgcagcttttaaggcctcttcagcagtaatgactgcaacaacctccttcaccacctttggatcccctttgaggactcctaaacggtttccttcaccaaaatgtggttaaatttttgatgaggcgcaataagtcccaccttctagagattctcagtagtcacaagctagcccacttgtaattcctcaggtagtaaagacttgtaaaaagatatttttcctccaattccaaagtcaagggcaattggggaaggaaatctagaagaaacagaacaatcattaaaaaataaaaataaaaggaagaaaacaggaggtgaaattaaggaaaagaaaaaacacttaatggttgtgttaaagtccaggctgagtgtagggactctcttcagtgggaagccagaggtatagaactagtagtcccagcaattagggttgtacataaatttttgtaaactgtccaacctaaatatcttgcctaaaccaaaccgagataacccactaaacaatacaaatcgaaaaacctaaccaaaatataacccacccaatctttatattgggcgggttgaaaataataccaactagcctaatcaacccgaactaaccc

SEQ ID NO: 299012 - DNA, 1724 bp, Cannabis indica
gggttgctgatgttgttttcaccttctaaacttctcaaaaatatacaggattcccaataaaaaatatattaatttatctttataagaaaattaaaataataataataaaatgcttcaattttatttctattttatacataagatgatgtataggctcctcaaatatgagggtctatcctattgaaaatatttatgtataccagtggcaattataaatgtcatatttataatcatatattttgaactactttgattattatttctaattatgtaaatggcagataataacatgaattattagttagtagttagtaagagtaagtttatcatttctcttacttgatcattaataatcatattcatacaatatggtcataaattaacaaaaggcaaaacacgcaaggtttataaaatataattaagtgactgaagatgacttagtgacttaccagttaccacaaactacacatcatacaaatatacattttattggcgaagtctagaaacttcaaactcaatctagattttacaagcattcattgttacgttaattaacacaaactattatatattattataatataacttcttaaaattagtatacaattttacaacttacatttccacactcaacaaatttatagagctagatttgaaaaatcaaacaatcaattacaaatagcaaaagattgagaatactctcgtaaacaacaataactatacaaggttttttttgataattaaactacacaaggaattgggaaaagcttttgaactaggtctttcgttttctttgttctagttgacttgccagcttctcatccttcgtggtgtctaatatgatccttttaagctctaaattttttgatttctttatagttagaagatgttgttacttagtaatattagtgtttttagtcatttttggaataatttggggtttaaaagaaaattaatttttatgagtaaaaagtgacggatttgatgtttttttatgctagggaatattggtagatggattgacgcgccaaaacaatatttttctagagtttcagaagtccatgaagtgcaaaaacctgtgggttgccactgcagcgagggtggaagcgagcagagaaaaaaaataaaacataaaggtgtgttgggccccgctcttccaccttgtcgggtcgctacctcaccttgactcccacattagtatgatattgtccgctttatgcctcctaagcccctcacggttttatttttgggcaccttcccaaaaggcctcatactaatggagtagtgtacatccttatatacccataattcttcccattcctagccaatctgggactttggttgcattcccaacaatcctcccctcaaacataggaccacatactcgtggcttcccctccagcaaaactaccatatgccgccactatcaccaagggaactcgccgcctgatcatcacctttgtcgggaagactttcgacacatgtcctaacatcgatctctccatcttgtaccgccgtaatcatcaacgggacacgccacctgactacctcaatatcagctagactttcgatacaaggcaccatatagatcttcaatcgcgaggtcatcacattgagggtatcttccagacatcgtaaatgcatcccactatcccagcacttgaacctttggctctgataccacttgttgggaaaaacaataaacttcaagcgcaacgaaataa

SEQ ID NO: 299013 - DNA, 4222 bp, Cannabis indica
aaaacttattttaaaaaaaaatgaagttcggtttggtcggttcaaaccgtggattaaaacggtcagtttttttacatttgtataatggtcggttggttttcagattataaccatgaaaactgaaaaccaaattttggattttttttgtgtaaaaaactgaccaaaccgaccattgctcacccctaaacactagattgtgcctactactccatatgggtgaaagtagcgtgagatatagctcgagtctttattgatcaatggacaagaacaataaccataatttagagtatagagaatcaaagttcatttttgtcacatctcaaatgagagctcttaatcaaacatacaagaaactctattacaaccttgattaagtaactttcactaattcaatctctggtgttatttatatagcattaaataattataaaaattttttaaagtttatgcatgtgatttttttttttttttattgaataaggttcttgtattactcaaatcaacaattacattttataattttgtatacattttccatctgactactctatctaactatacaaacaacaaattttagttacaaacaattcctagatactcaataatcattcttgtcttcctctttggttttactagggagaacttctaatattcttagcttgctttcatactgaattctttgcactattaccctaatttgccataggatctgattccataatacattatttttagccctccacacatggcaaactaaaccagccataaatgccttcagcagactctttcagctaatgaaaatatcttggcccaattgatactttacagccacaatttgatatccttcaagcacctcctgctatattcacattcaaaaaatagatgttcaattgtttccttgtctttcccacacagtaaacatgtgttatctatgttggcgtcaaattttacaactctttctctagtgtttaatcttccccaaagggctagccacaaaataaatttgtgtttgggaatgattagtctatcccaaacaactctactccaagggattttcacactgttgttgaatagtagtttatagccttgctgaattttgtatttctgtaatataaaaccagcaagatcagtcttctccttcagcatattcttgacgctaacaagttcccttcaataccaactgcaatcaacaggagcctcatactcccaccactgctgattttttaagtatacattatggatctatttcacaaacaagcaatctttcttacttgctatatcacacacatacctacccaatgttgcaacattctaattctgaatgttcctaaaacctaagcctctagcagccttgggaagacatactctatcccatgccaccaatcctgggccagcacctttcttgtattcatttccatagaaatgatctacatattgaatctatgtcttttagaagtctctttggcaatattaaaatttgagactagtatgtgtggatagagatgagcactgaatttatcaatgtcactctcccctgtaagaaaaatttcttgtgctccatattctgatcttgctaaccatcttttcaagaaaacattgacattctaccttggagattctttttgaacatatgggtattcccagatacctgaagggtagagagctccttgtagatttagaagcttctaatattctggtaacttctatttctggcatgtctgaacaataaattgttgtctttgttcattaggaagcaagcgtgatgttgaagagaacaacttcaatcctttaagaaagagcatgattgacacaaagtcaccattgctgaacaccaataaatcatctgcaaagcacaaataatttagttttaagcttgagcatctatcatggaacttaaaactggccaaccaccaattctcttaaaaattcaagataggtattccatcattaatacaaagagaagacgagacatgggatccccttgtcttaatcctctctttgcattaagatccattgagtaaggagaattttgggattctaatgcagttcattatgaattgaataaactggtttggaaatccaaaggccaccaacatttcctcaataaaatctcattcattggtatcatatgcctttctaaggtcaattttaatcatgcaactcagtttgcaattctttctcccatataatctcaccaaatcttgacaaaataacacattatgagcaatgaaccttccatgcacaaatccaccctggttttcagcaattagatctagcagaatattcctcaatctattgcagatgacttttgttgcagtcttgtatattacgttgcagcaagatatgggcatgaaatctgcaacattctttggacatgtggtcttaggaatgagggtgatagtaatggtgttgatttcctttaagatttttcttgagtttaaaaagaataagatagcttcttcaacctcaggttcaatcagctgccaattatcctggaaaaaggcactaccaaacccatctggtcctggtgatttaataccaagaattgaaaacatagcttctttcacttcttgagcagtatattcagcattcaacacatttttgttataatcattaagcttaggcccaagatctaccactatctaattaactctcctcctatccttcaaagtagtccccaataatccatgatagtatttctttcaaggctcatcacaccagataccatgctcatcctcaatagaaaaaaaaatcttattatggattcttctagctttaagagaagcaaggaacatagcaaaattgtcatccccaagtttaatccaagagactttagcttttagtgaaagaaaagagattaaacattgtgtacctctgtgtatttcttgcaagcctcttattctgcaatcatcttatctttattgagaggatcattgctcaattgtatctgtgctgcagccacttcagacttggctaacatatcaactttatgaatttaaaaaaacccttctttattaattcctttcagtacattcttcaatctcctcagcttagtaacaattctgaacatcttagagcccatgacctctttttttcaactttcagcaacaattttgcaccataacctggagccaacttccacatgttaaagtacctaaaaggttttttgccataacacctatcttggtaaatggacacaagaataggactatggtcaaaacaaccttcaggcaagaaaacagcttcagagtaggaaaaggaagtcatccaagaagagttgatcaaagcttggtcaatcttggaaaaaaaacttgtcctcaggtttttgcttgttgttccaggtaagaaaatttccataatatttcaggtcattcatgccacactgctccacacagtctttaaatctttgagaagggatacaaagagctttgttccctactctttcattggcatttaggatttcattgaagtctcccatcattaaccatgcctcatcaatgttcttagctaaattctccaggtctccccataatttctctcttcctttttcatcattaaattcatacaccagtgtaacttggaacttcccaggatgttgtttaaaatgaacaatacagtgaattaattgatttgtgcaaaagttgatgtctacagtgtaaacattaggctgccaagccaaaattattctccccttatccaaccatggattattattcaaaaaacaccacccttgaaacaaattagtatacaactttcccatatttttatcctaaaccttagtttctaacagactaacaaacccaacattcctggagtaaatcaattgcttgatttctttaagcttctgttggttgttaatccctctcacattcctacaaagaagtctatccattggaagtaaagggatctcccccctccaatggtatccatgatatcctactctgctgatgactcaaacatgttgttcactacagctccccctatttctttctcaatcacaactttcttccctttaaatactttttgaaacccatcttcatctcttttcttatcttcccctacctttttctactttggaacccagacctgcttcccctgttcctccttaccctcttttttcctacatgaattagtctcatgtccgatacccgagcaatgataacatactagaggaatccattcgaacttctgttgggtttgtgccctaaataaaacccattac

SEQ ID NO: 299014 - DNA, 2209 bp, Cannabis indica
cacgcacaagtttctttactagatttccttttcttgttgttgttgttttcgtcataattgtatgatttgtaattgtttttttgtcttattcatgttattgcttctatgcgcaaatacacttgagtccgtgatgctaaagtcttggagtaattagatctctgccgctatggataagaccaagaaatcccaagagaaaggcaaggagaaaattaagactagggcttccaggactcgaaaaccgcatcccccttcaacttcctcatcatcaaatgttagggagattcctcctcccaccaagactagacctacaactccagacccttctattgcagttggcggggagaaggaatttgtcacctcccaaaaggcctctgaagcccttgctactctaggggagcaggctttatagggcattcccctccgagaaggaataatctcagacaccacaccaaacacaaggggttctgatgacaatttggatgggcttgtctttcccccaaaaggggctcccatcaagtctaagcgcaagggatcaaaggctgctctaggtcccagtgcaaagaaggtcaagtcttcaatctcagaccttgggacatctagcgtaccattgaacaacccaccattgcaactgcagtagcaacaaccacatcaacaacaatgacaacaacaaccacatccactacaacaataataacaacagttatagtaacaacaacaacaaccaaaacaacaacaacaacatcaacttggacgagtaccattaccccaacagtagcacactcttgctccagtaagtcataagttggtacctaaggtgggcaaagtcgtttccccttatgctttagagatgttggacaatacgagctttagtgtgagcgagcttacattcgagaaatgggctgtgagcaacattgttgatccatacacactatcagtggtcggtgagcaacaagcagcaggggtaaatctcaattttctgaacccttcttcctttctatccaatttttattaccaaagtatgtatatgacattttcctttatttttactttctctagatggaattgttctcagagatgatcgccaaggaggtgggtaacatgcccattgaactgagcaaaacttgcgctaaagtccaatctttgacaactgagaatggggccttatgtgcagaagttgagcaggttaagacctaggctgcctccaacacccaaaaggtccaggaagattgggaggtcaagctggcagttgagagaagaagtgggatgcaaaatactgaaagatgtacttagatcacaagtccaaactgagcaagaggttgaagggacttgacgctcccttcaagagaacctaagtaaggctagggaggagagagataaagctgaagcacgtgtgatgcttcaatctgagaccatcaccacccgattccaaaaagtcaacactctccaagaggatatgaaacaaagggaccaactcatttagggccttcgtgatgaatataaataagagaaggagcaaacagagtcctagatgacacaacatggcaatctgagcactcttctccatgcaacttgtcataaaagcaaccttgacaagagaccattaacaaattgcaaaggaaggttgaccaaagcccaacgaatggtatgaatgcatataataccctagctactatgtgtagaatgagagaaactgccactagactattcaggatgcagtcgcgggcagcagctaaagcatcaactaagacagagaaatatcacctttgttccttggagatatcctatgtcgtggtcctttataacttgtgattctactatacttcggctcattaatgagaaagagagggtagatgttaccaagagagtactcgccatgcaacatgacacgtacctcgaggtgtttcccctctcgattgatagtgatagcgatgaggaaacaagtgttgaagtctcgagttctaaggagttcgcaaaagctgaggcatcttctggtagggttgaagagaagcttgtctgtgacatagttgggcctaacaaggatccagaggagccaatcaatgccccagcccaaatcgacttagtagcaccttcctttgcttgagataaataggagccaccctctatttctcactgtccatcttttttgttaagacaactgttaggctatttttagcctaagttttgggtcacattttatagttatttttct

SEQ ID NO: 299015 - DNA, 10700 bp, Cannabis indica
tttttttttttttttgctttatcgtatatatgttagtaactggatttcctagcatgactcataaaattttatgttgaagtcgagtcattcatacatagcattgttaaattgtacgtatactatatacgaatgataaaataatccaacaaaaagtttgatacttgaataatttattacaagtgttttcttgtaaataaatattttaccactttagatcggtgttgtttcgaaagtttggtcgggcgtgcacttcaagggttaacttttacttgtttcctccaaaaaataataataataaagataaaggggataaagttgattagataaaggctttaaatatatatgctagattcctattgatggcatactattataatggtcaaataattttgtttaaatcattgaagatacaactcgctcgaaaacccttttaataagacaagagaactaaacacaaggaattgttcaataagcaacattatgccaaactaatgattggttgattagagcatattaccaaaaacaaccttcattattatatttataatttaatttaattgagctagtatttgtaagcattgaacgtatatatttacaaaggaaaagataaaaaagtttatttgataaaaatcagataaagtactttaataataatgtagtttagactgacaaggccgaaaggaaaatagaccattaagccaatggcgtaagaaagtccttcaaagtatgcatttgcagcatttctattcggtttggtttctagttttttttttttttttggagtattgtaatttgacattcaattattttataattacttagtgatgtctctcattatttattcaataataatgtgtcatttttttttagtattttttacttaacctttctcttttttaaataatggtaaaaagtttattagaccatttatgtagaacctactacttttagtgcaatgaagttaatgattcaatatcaaatattacaccaaatataacacataataaaaatattttgtttaaaaatttttacattttttattatttatattaatagccaagaataattaatttatgatataattattatattattaacaatttatgattatttttaaaacaaatcaaaagaatgattagaatgaaaagaataaattatgcaccgtataaattcaaaatctaacactattagtattataaaatttaatgtacactaatttgtgtcttgttacaaacttatagtgaaatgttgtgaaaacttttaatggtgtgctcttataggtctatttgattaattggtggttaggtgccacgtattgaataggatgaatagggctgccgacagaaaaccaagaaaggaacccataaactcagccaggaaaaaagataaaacaactatagtgacatatttagcttcaatctaaatcaaaactcgaagctaagcaattcaaagttcaatcatccctacaattttgttttattttgttttctctctttataaatgtatttccaattttattccacttatttaatgtaatatttatttgaattttcaaaaggaaatctccctttgggcagtgccatcctctcattcactattttattagtatcttgcctgagaaatgaattgatctttaaaagaaacgtcaaactcaatgtaggaagcaagaacgtcttgctccagtgtaccacttatttaaatacagaattttaaaatcaccaaataaaaccttattgcagaatttccaaagatagaatagaactgcaaaaaattgtaaaagcaatgcttttgggagaattagaaacaagatggtcataacagtctgataagattgaatggttcgacattttgattttttttttgaaagaaaatactaaagaattctagtagtaaatattatattacactaatacactgtattaaattacatattatattttcctacatatattaattgtatagttcgttacggatgagttctaaataattgattgttgaaattcggaagtattttattttagataaactgattctctataatcagacttgttatgtcaccgaaatgttcctatttattattgtttttttttaaaaaaatacttttatgtaatgaataatagtacgattaactgggcttcaaagatgggcccatttaataagaaaagaaacgtgttggcccattagtgaaatgcagaaaatgctatccttttctttttcttggctcccatcatctcagtcctttttatttggggagatggtgtgaagtggaaccaatgcttgtcttcttgagaaagtttacagtgagatgtagggaacatttttcaaaatatctgaacaacaaagcaatagaattcggcaacttcaaaaatatcaacatctccggtcacatctttgattgtgccaataataaacagtttttcatgacagaattatcttttgaaaaaactttctattcgtttaaatcacgaaaaaaggttataaaatggaagggacttatgatataatatatcattttatgtatggcgatgaaacgtaccaaaaaggatccgcttttcaatagaaccggatctgaagagagtccaactcacttgatgaaccgactatgcatagaaaaattgtgaaatctgtaaaatgaaaatggagaaagtatcaatgaattgacttttgaatcattatgtgttcatgtctgtgttaggtctctttgccattgttgaagtttaatgaaaagaaagaaaacagtaaagagagaggaaagaagtggaaagagattatatacacagaaggaattaaagaaagctaactaattaccaaccgaagtgagtcacaaaaaaagctaaacagattctaatgaccactgataaccacacttaacagacactggtacagctaactaacagctgacctagctaattatactagatgccttgacagtctgcaacatggtaggaactacctatcttataataaaaacttctctatcctatgaaatctctccacatattagcatggacaatataaacatacattatatccaaattccctttcctaattttgtttctgttacctttctttttacatggttttgtttttttttgctaaaatttcaaatgtgcacataataattctaacttgctaaacatacgacattaaattgaaatattgaaataatcattttaataaggtttgaggagtaggacaacttttcaagttctgtagtattctgtctagaaggaaatatgaagtctttattttaccatcaatttataagtatcgtattacagcactgtctctttcgcctccttgctttccttagaatcctttttgtttcttcctccacttcgtcaatcaaacagttacctaaatcttttttcaaaatgaatatatcaaaaaactcttctaagacaatagttctatgaagctatgcacacacatatttcttgttttcatatctgaatactagctagaaatggcaactgaaaattcttctttcaccaaatacctgattcattctctttaaacaggcaggaaaaacctctatcaatctcctcatctgattcaatgataattctgcattgtctttcctgcatcattgccgttcccaatgcagcattggaatacacttaaatttagtttagttcaacaagcagaaaagaggagataaagaagaaaaaaaaaaccaaacttaaaacttcaccttatgaagaggagaagctcctatttgtttgtgcatcttgttggctgtggtatttgttaaggtatttttttccgattttactgatttccatcctcctgcttctgtcttgggaactgctacaatcggttgtgcagaaactttaggagatgcagctgatccaaaatcagtacaattatttctaatatcttgaaacctgaaaggaatgagagagcacgaacataggtgagaggtaagtcaggtctaagttaaagaagatgtgcaaattagctagaaaagatcttgttttggtcataaaaaacatttagctatttatccaacaagaaaaatatgagtataacaaactttccaaatcggtaattagctgtccctcaaatcaattgagagattaatgtaaatcttagatgttaacatgacactatagtgtcatgatcatacgtaagccaaaaggagcaaacataatattgcctggaaagattaaaatgtaaagctcttagtgcacaggatggtcacatttctacgttacaggctgtcttgcattacttttttattcgtatcttcccaatgtaaaaatcttacttcataatctgctgcaatttttcttgtctggcggcactcctggtagtaatctgctaatttccaggtggaggaaaaaaaagccttctaagaacaaacttatcacaagtgaatgactggaatgaagtgattcgacaaatgaagaaattgttataacaccttattagggggaggaatcggtgccacttggtctttccggtcaggtaacgccgttgcctgcagcacaaattaaggtaaaaacaaattcaacaagctgagagagacgtagaagtagtatgggaaagtccaagggatcaatcggaaaattgcaaaggactcatgtcagatagaacagagagggacaatatactatatatcattaggtaaacgtaaccaaaaataggaaagatttaatgttcctggaccatcacgtgagatgttatgctacctgcatttccttggggagagaattacaaaactcattttgtgatttctggataaaagcttctatcttctctggtaacgttgaaagcaccgagaaaatatcttgaaacttgtcttgatatgcatgcttgttgacttgatcggatgtagatttaaagcccgcttctaggctagctttgatatcttcttgtcccttgttctaatttaccaaacctccttaatgtaagaagtctagacacattcacgaatgcttgaaacaacaaaacttaaaacttagaaatgaagtatggacattggacactattttgtggggttaccattaactgcagtaagttatcctgaaccatcaatttctgccgaattccttccgctgaatttgaatgaacaaataaaagtaaaatatttacagcgacaaattattaaaagtactagaaaatgaaaaagtttattaaatcacagtcaagccatatccaatgtaacatatatgtgtaataaaaattgtttgaaaacgaaattcaagctagtttccaagttatttgccttcaaatttcgtggttttcagatagcaaggttgcaaatgtctaatgcagattgtatactattgcaaacacaattttcccagatagtcctctaccggttttaacagttcaggaataatatactcactctctagtaaaacttcctttgtccctttgttagcttgcataacgtcgctctgaacagaatccagtatcattccgaaccgatttagtgaagtttccatcattccaatccggtgttcaagctcttcgctgatctgccctgctcataaaataaaacatcaatatgtcgttgatggtcatactcatgcatgaaggacaaggatttaattgacacagcttattcttttggataaacttgttacacaactgtcaatttcacatttagaagtaagcttacatttatggtcagaaagagaagaagaagtccatttacgcggtaggctggtcgaagatcttgatactggcacctgactctcttcacgagtatgactggtcggtggcaggcaaactgtcctctttacatcccgttcttcagaactgaatctgtgtgccgaaaactaagtccaatagaaaagtgcaaagataaatacagcatcgcaatttattcacgcattagtaaacattataagctatttagaaaatactttttgaagattagtggtagccatattgataccagaaaatatgtaagaactattgtaaattaaacattaattttgctgagcattcttagaaagcttatcccagggaaaactttccccttaagcacaaagggaaatggattttctgccctctgaagtccaaaatttcattgaagtatcaatatgatgaaattctatatagaaaaatgtggaaggagaaacgaacatgccgattcgaacttaccatttatgatgccttcggtggcaacagataataaccaacaatgtgtcagcgtgttaggataagagttagttgtactattctgttttctgttgtacagttagttagttataactaactctttctgttagttagttcttgtatttactctgtgtacagtggattctatatatagtggctttgctcctctggtttagagtgagcctcttttcattttccattctccctgtttctctctctcatactttcatacatggtatcggagctttcatggcgtcgccaggagcaaactcatccagcaatggtggacaagtcgatggaaatggtgctcctccgatcgcagctcaagtgatccctcctgcaccagaggctcctcatgcaggactcccaaacaataacctacttccgctcaatcttcgattagacagaaacaattacaccttctggagatctttagtcttagcagctgcaagagcttacaacttggatggatacattcttggatcgattcccccaccacagcaatacattgaaggtaatacacccaaccctgactatcttcaatggttacgattcgatcaatttctaatgcattggcttatgaactcggtatccgaatccatgctgggacacataatcaattgtcgatcctcatctgagatctggaatgttttttcaagactctttgcttcaagatctcgagctagagtcttgcaaattcgtggactacttcaggctaccaagaaaggttcatccacgattgaggactacttcttgaagatgaaaggatacgctgatgctctggcagctgcagatcaacctctctccgatgatgatcttgccttgtacattcttggagggttaggccaagaatatgaagctgtaattgttaatctcgcctgtcgtgaaactcctctcagtttacaggagatacagttcatgcttcacagccatgaactcaggatccaacaacacactactgaaactttgtcaaatgttcaagccaacttagcaaatctgtccacaggtgcaagtcaaagaggtggatacaatggcaggggcacacgtggtaactatagaggtggccgtggatactcgacaaataggggtggtcgtggcaataaaccaatctgccagctgtgtggcagagctggtcacaccgcacaaaaatgttaccataggtttgacattactttcacaggcccctcttcatctacttcaaacaacaatgacaccaataatgacaatccccaagtcaatctagctgaaaccccagccacaaatgacatctctggcgcctggtttcttgacacaggtgcaacaaaccacttgacagcagatgcccaaaacctccaaaacccagtggactataaaggcaaatcaaaggttcttgtaggtaatggtaattctatgcccatttttcaaattggatctaatattgttcccaccacccatcccaatcaatttcttattcttaaagatattttacatgttccaaatgtaaccaaaaatcttttaagtatatctcagttcactcgagataacaatgtcacacttgagtttaatgatgtttgttgccttgttaaggacaagaccacgaggcaagttcttctaaagggttccctcaatgatggtctatacaaacttcaagtgcaaaaagctactgcaccagtccacaacaccagaaacaaaccagatgcccacaccagcagccctcattcaatttttaattgcactacttctagcaatcctgttttagataagtccaatattgtttccacttggcattgtaggcttggacatccatccaaaccaattttagccaaagtcttatctcatgtatgtcccaatatcaaatgtaaagatgtaaccttttgtgatgcttgccaaattggcaaaatgcatcaatttagtttcaagcctactgttaataaaactactgccccctttcaaattgttcacacagatgtttggggaccctccttttacacatctatggatggttataaatactatcttagctttgttgatgattatagcaaatttgtgtggatctttcccatgaaaaccaagtctgaagcccccactatctttaaccaattcaatgcccttgttgagagacaatttcaagtaaagatcaaaagcattcaatctgatcttggcaaagaattttctccccttaaagaacagtttcttgcaaaaggaattattcttcgaaattcttgccctcatactcatcaacaacaagggagagttgagaggaaacatagacatgtggtagatgttggattaactcttcttgccaaagcagaaatgcctttagaattttggtgggaggcttatgtctctgcatcttacctgattaataggctacccacaccagtcaacaattacttgtctccctatgaaaagctatatcacacagcacctgattacaacctagtcaaagtctttggttgttcttgttttctcctactaagaccctatcaaaagcataaagtctcctttaggtcttccaaatgtcttttcatagggtatagtatgacacaaaaagggtatagatgcttgcacccaagtggtagaatttatgtagctaggagtgtgcaattcaatgaaactgaattcccttacaaatcactattttccaactctaaacacacacttgctacccagtactttatcctagatcccaatgattatcaagtaccctttccacaacctcctgttactcaccatcactcaccaacaactacaaatgaccccaaccataccttcacccataacccagtaaccactacagaatccatacctgcactcccttactcatcttcacaacacaaccccaatatcacttcccaggtgtccagttcatcaccctctcacaccagtacccacttgcctataccagatccaataactcagtcaacccaaaatcaacatcctatggtaactcgatcaaaaatgggcatcttcaagccaaagacctacttggctgatgtgagaactgcaaaagaaccaatttctgtcaagcaagctatggctgatccaaaatggaacaaggctatgaatcatgaattcacagccttaacaagaaagaaaacttggaaattggttcttcccacaccagatatgaaaatcatcacaaataagtggctatttcggattaaatataatcctgatgggtctgtcaacaaactaaaggcaagattagttgctagaggctttgaacaaacacatggggtagatttctttgagacatatagcccggttgtcaaaccatgcactattagaattatgtttacccttgcagccacaaacaaatgggatatacaacaagtggatattaacaatgcttttctaaatgggcagcttagtgaagatgtgtatatgacacaacctcaagggttcattgatcaagatcaccctcaacatgtgtgcaagctcaacaaggcaatttatggcttaaaacaggcccctagggcctggtttgaacagctcaaaacacatctgttgcagctgggattcttcaattcaaaagctgacaccagcctattttacagcaacattgatggtcatttaatgctcctgctggtgtatgtagatgacatacttatcaccggagccaatcaacatcagatacaacaactcattcaacatctacatgccaagtttgatctaaaacaactgggtacagtcaactattttttggggttcgaagccttcaaagatggcaacacatactatctcactcaacaaaagtatattcgagatttgttacacaaaaccaacatgttagactctaaacctcaggccacacccatgtgtgctaccaccaagttgtctctcaactcaggacagccgcttgatgatgccaaacaatacagaagcatcataggagcattacaatatctcactatgacaaggccggatatttcatttgctgtgaacaaattaagccagtttctcaaagctcctacaacaacacattggggtgcttgcaaaagggttctcagatatttggcaggcacaactcatctcggactgtccttctcccctgctacacatcttgatcttcaggggtatacggatgccgattgggctggcaactatgatgacagaaaatcaacatcgggttactgtgtatactttggtcaaaatctcgtaagctggtgctccaagaaacagaatgttgtggctcggtcaagtacggagtctgaatatcgagcattagctctcgccactgctgaactagtttggatccaatcccttctcactgaactatctattcacctccctcaaacacctatattgtggtgtgacaaccttggagctggttctctagcatcaaacccggtctaccatgctcgcactaagcacatagaaatggatcttcactttgtgcgagacagagtccttgccaaccagctcgaagttagatatgtggacactcatcatcaaatagcagatgttctcacaaagccattgtctatcactcaatatactcacttcagagacaagttgacacttagttgcccaagtgtaacttgagggggggtgttaggataagagttagttgtactattctg

SEQ ID NO: 299016 - DNA, 1993 bp, Cannabis indica
ctttatatagaatagatataactctataacattaattaattaaataataataagaatgatgtattaagtttaagtgacgagacataaaaatagatagagagataagacaatctaagactacatatatagggatttttgtatctctatgatctcttaattatttcttttcttttattaaattttaagtgttaatctaaaatttcgttaacaataaatgttaatgagacttaaatccttaatactaagaattaatgacagtaataaatgtaatatttaaatattaaatataagataaataattttttattgtaattttgtagttaataaatattaggattcctagggttctagggcccttccctatcaattggaatctttctcatatactctagttgttgtttctggggatcaattagattattctgattatcaaaggggctcatgatgctttcctagcctttgaaccgcgaggtctttctcgaggatgcctcgtcggctagccaaattgagcaggaggtgcgtttctttgtgttgctcttactacaaccactttgcgttctaaatttatattttcccagttagatttggccaatctttcacgaagttggtagttttctaactccaccagtggaacattttggatcgtaagcaccgcgattccatctttctggaattttatcttcattaacatctcgctcgaaatcccatttaataggatctcttccagcatttcggtctttcgaaaggtttgccacttgaggatccttcctacgttattgatctcgttcgtctactagtgagctattattttgacatccttagtcacacttaaggaaagacttcaatttataactgtgattaatattttccaagactatgtccttacctcttcaatgtttatacttttggagtgagtcccacgagatagatcaaatccttaagtaatgtatttaatttttcaatatccgagctgatttgtttttcatttattgtacatgtgtcgtgatcatattgttacttaaaatatgggcataacatgtaaaaaaaagattgtatatagtgattcatatatatatgagtcttatttatgtataaactagtttatttgataatattttttatttaaatagaggctaaatttaattatatggatgagagattagactgatttacaaaaaaattagaaattctccaaatgcaatatgagcaattattagaattgttattggaacgaacagaaatgaaaaaaaaactaaaaatagatgcaaaattgcaaatgatgttaaagcaaaaacatctcaagaagataaatcgaatatcgagaagtttaatttatgcacattaaataaatatagttttaaagattttaaattcactaaaactttgaagagttgccaggttttttttagtatttatctttgccaaatataaagattttgggtaagttttattttttctaatttttattttaatatatacttgttgttattgttattagtacaattaaatttaactttacatatatttcataaagaggaaatatttagtatagctatcatatatttttaaaatgtttaaatatgtgtttcctagctccgaaaagaaaactttaattaatttaggtggcgtttagtaacacttttttaatcagttttttatttttaaaattagaaaagtgaaaatattttttaaaaacatgttctataaaactgtttttgcttttcaattttttaattgaatatcaaaattttaaaaaaaaataaataaatcactttcaaaattattttaaacagatttttttttaatcaatattttagactccgacaagacccggacccaaaatcctctctcacggcccttgtgctctaacccgacctctgacccggatccgaattcgaccccggacctagaccggacttaaataaaatcaaaaaataaaaataaaaatgaactttacagaacacacttttattttctaattttaaaattaaaa

SEQ ID NO: 299017 - DNA, 2561 bp, Cannabis indica
aatgacatgtgtgttgtactgatggacataaatcatgtttcaccacaagcatggagatgagaaccttaacaaaactccactctgttctgttcagaagcaaatttattaaacaaaataaataagttcagaatgaaatggtgcggactgataaaaagaacacatgacgaaactaatagaactaaattcgtactgacagaagaggaattgcaagttttttatgcacttcctaaaaacgacaaaaaaattaaataaataagtaactgttaaagatgatacccttaagacccaaaaatgagttttctctcctcttcttctggattttctggacaactaactaagcaacaaatatacgcatgcccagttttcttcgcacacagataaatataaagtaaagtgaagataaagaatttccaactgcttaaataatgattcagccctccaaataaatcatcaaaagccaaaaaattaaaaataattaaacatcaagatacaagtatcaaagaacgctttaattcaaaaaaaaaaaaaaaaaaaaaaagtaatcaaagaatgctgaaaatatcacactaaactctaccaaagattcagctcttcaagtcttgaaaacctaatcatttccggaagaaaaaaaaatcgaatccgcgtgcaaacattaaaataaagaaagaaaggaacaggttgaatttccagatagaattcttacaaattgaaaggagaaataagaaaaataccagatagagttggagaggaagggtttaagcaatcgaagtcaccattgaaaaaggagaaagaagaagaagaaggagatggagatggagatggagatggagtcggtatctgggtttgcttgacagctttggtctgagaatatatgtatatatacacacaatattagacttagaaaaatctttttttttccgctctctaaagtttctgtgaaaatatcaattttgcccctccgcgttgaaaaacctttttttttttttacttctttaaccaaaaaaagaagggacaaacaatcaaactaaaaaagaataacgaacgccattaccgtcgttgcagaagctagctagggtttttcgataggactacagaaacacaataataatggcgaagaaaagattacctattccgttcgttgattcagatcagagttaattggttcatacggcctcaagatcaacaagatgcatgctaggatttggctgagattgaatttgaaataatatattcggcctcaaaccttctttttcttttccttttttctttctttcaaattttctttttaaaatacttgttaaacatttattgtaattatattcgacaccaaaacaaaaaacaatatatttttttttgctagaataaaaaaaacttttttttttttgagatggatataaaatgtacactgcagtacattcttaaaatcttttttctgtaaattttttatctatttccgcataagaaatagcttattattcaatttttttatgcttactttgtacttattatcactacttaaattttttaaaaaaattcaaatagtttagaatggcaaaataatattttaagcaatctactacagaaatttctcaaaagtaatctaataagtatttattttaacttttgaataaataattttattttttttaaaatttgtaagaacactcacattagatgctctaaaataaaagtacttaaaaatatttaaataatcaaaataaagacacattatattaaatttactatttatgctctatgtttatattctattattcattgtaaatatattttattaattattttttatttgaataattttttatagaagaatatattaatattatatatttgagaataaaatatattaaaattttaaaaaaaataaaatttttaatgatttacttaaaaaaaatcatgtataatatattataaaagtttgctataaaaataaaaaaaaaaacttaaataacttattctagaatatataaataggaattttacggtattagaatactcgaagtataaatagtaagaattaaaagttttttttttttttagtagaaaaaaaaaaagtaagaattttgaaatgcttatttgatataggaaaagtacaaaattaggtgacgtctctagtagagtacactatttttaggtacattctctataaagacacgtacgtctctagtaaattttgtataatgacatatttcaatattttgttgtagtatgaattgcggtctaatctattatttttaatggaattattttataaatacatcaaaataataaataaaaaaattatagaattttaaatatttttataatttttttaattttatttacataaaatacagtttttttttatattatactcttattaattttatgttatctatatgttcttttttgttgttattaatatattattttcatgttatttttatgtagtttttttgttattttcgtgttatttttatgaaaattgtaaaaatgtaaaaaaaaatcttaaacgtaaaatataatttttttaaaaaaataagtgtcttatgtaattatcccta

SEQ ID NO: 299018 - DNA, 5891 bp, Cannabis indica
ggggtaaaattgtgtacaataattaaaaaagaggtaaaaatgatagaatttaaaaaagaaagtaaaaataaaagataacaatatataaaaagtatagagtataatttcctgaacataaaatactaaaatggaaaagttaaaagggtgaaaacttttcactagttgcccatgttttgcaggggccatacatactaccaccacctataatatactcctataaaataggagggttgggtgagatgagaggattccagtcatcgttgagataaacccaaacgaagccaagttgtagtgtcttaagtggttctccacaatcttcgatatcaaaacccaatcaacagtcaaagaccaaacccctcctactcctcaatgaaaatcctttgttgtttcattttgctctcccttcttattcactctcgcctttctctctcctcttcttcgccttcgctctctacatcccaactcttcgagtcctggtgtcagaaacatggcaaatcatattcttcagaggaagaaaggctttacaggctccgtgtgtttgaggacaatatggctttcgttaccaaacacaatcaaatgcccaattcttcttataccctttctctaaatgcatttgctgatctaacccattacgagtttaaggcctctcgtttaggcttttctccctttctcagctctcggcctagactgagttcggacgcagagattgagacccttcaagtgagggacatccctgcttcgctggattggagaaagaaaggggctgtcaccaatgttaaagatcaagccagttgtggtatgcaattatttatgttttgttaatcttttttaatattaatatacttcttagctatggtcttcaagatccaattccaaaaatctagtgattgcggttttcctttctttttcctagctttggttgcagaaattgttgtgtctttttttatgcaaaattgattgaaacttttggctttttgtgtatattttgtaacatggtggtttgatgtttcgactgtataattcttaattactgaagtgataataattggtggatcaaatcaaaaatcccaaatataatattgtgatttggtatgcaaattctctaaactcaaattgatttgggcttcttgttcttaaagatttatttgtcagcctaaagccatatagtaaatttttgtaagctaaagtatgttactcaagtgtatgttgtcacttgggttgtgtattcttttctcgatgtaccaaaatataagatgatgtaaaattttgctgactaaaactctcacaaggttgtgatttttatcaatgaataatgtgaagttacttgtctatgttgtaggtgcttgctggtctttctcagcaacaggtgctattgaaggtatcaataagattgtaactggatctctagtgagtctctctgaacaagagttagttgattgtgacagaaaattcaacaatggctgcaatggtggactcatggactatgcttttcaattcgtaatcaataaccatggaatcgacaccgaagaagactacccttatgagcgtcgggaagctacctgcaataaggcaaaggttaggaaaactcccctgtttatggagctcctaagctatgtactgatcatattcactcttatctgtaacccattatttaccttctttttgttatcttgtgctgcagctaaaaagacacgttgtgacaattgatggctataccgatgtggccccgaacaatgagaagcagctactacaagctgtggcagctcaacctgtcagcgtaggcatatgcggcagcgagagagcttttcagctttactccaaggtttgtttccaatggtggtcaatataatctgatgtaaggatagaaatataggtggtgacacgatgaagcaatttaaaaataggattaaaaaataactgaaaggatagattagaagatgcagactcatttaaataactgaaaatcaagtttttagctagtatttaggttgtaacataaaaatgcattattcaagaacttatagttcgacacaaaattaactattagtaaaataaagaagatttaaactcatagtatgtaaataagataatttgtattaactcatttattaatataattaacaagataaaaatgattataataaaattaaaagttaaaagttaaaaataaaatgacctaaactatgagcaaacacttggtttacatctatagcttaaaattaacatataaaacatattaataggtgtgatatgggttaaacggacctacttgtctctgttttatttttttgtagtaagttataaataagtccacaatatgtgttggataagattataccaatctaatatggtcatgtttaaatattgtgttaaataatttatgggttcacctgtttataaacatgacctgtttgtgtttatattttccgacatgttatgtaatcgtatcgtatatgtgttaagcataatcgtatcttatcgtaatcgtgttgactcaaaaacacgaaacatatcgaattgcaattgtgttgacttgaaatacaaaatggattgtcataaatagatacattttgacgagtatttctacttgtttgatttggcaggggatttttaaaggcccttgttcaacctctttggaccatgcggtgttgatcgtaggttacgattcacaaaatggagtggactattggattgtgaagaactcgtggggaagacaatggggaatggatggttatatccacatagagcgtaacaatgggaattctcaaggaatatgtggtattaacatgctagcttcatacccgaccaagactagccccaacccgccgccatcaccagcaccgggtccaactaaatgcgatctgttctctcggtgtggagtgggagaaacctgttgttgcgctcatagcttctttggaatatgcttgtcatggaaatgctgtggcctcaattctgctgtttgctgtaaggaccgtattcactgttgcccccacgattatcccatatgtgatattcaaaggaatcaatgccttaaggtatgtatcatattatattatctcatctttgatttttcattggtgactctattattgctagagtaagtatcattagatcaaactgatttttctctataaattcaagacgctatcttgggttttttatgttatgtaatgaactgagcgagctatcacattgattgcagagtactactgctgctagtaactcaacaacagaagcgcttgaacacagaagcaactttgcgaagccagcccagtggggatcccttgttgaaggttgggtcctctaaagtttctccctttttaatgatgagaaaatattatatgtaccatgttgtagaatatttatcttccaaatctaaaaattgggagtatttatttatttattatgtatatttacgttgaaaatgagttatacattcgagcagtcgagctcgctattgttgtgtaacaatcgaaatttccgagccttgtattattagaataaataatgaaattttccttttagataaaaacaatttacacatatttctggaatggtttccattggtgtctcttatagcaacacagccacaggcatgtaatactacacacaaatcatctccaaatccaacataacagcacacacctcctcactgggatttaaatgcccatatacccccttgttctggtttgtaaaattaagaaatttatcacatttgtcattcattcatagtacaacatttttctcaatttgaagtttggaacacattaattaatctaaacatcataacaaacccgatcaacgtgtaagtattccctattaacaaaactatgctcaacagaccttttgtaataatcaagaagtaatattcccaattgtctttccaattgtgttaactctgttcattgagtatatatgagaaaaaaaaagattcaaatggtagaaacaaagatgttgtcatagagccaagccaaatcatattacacatcaaaatgtacaacttcccctcccaaagtgcaaagctctcaacttataacaccactaagtctgcttcccttctttgcttccattgacgtttatgtatactatatctaacctgaaacgtggcttggtgtggtgttccgccgttgaaatcacgtcgaggggaagacgtccttaaccgccgaagctgccgataggtaattgagagtgtttctcaaggtctctttctcccgcttgagtctggtagccgtgtcctccaattcgagcaaggcttgctgctctctcggggcgccctcgaaggtgctcccaacgaaaaacgaaaacggcgttggaaaaaggttcctcctcaggtcctgaacctccttctctggcttcccacctagccgattcgacaaccgaatcacgtccttcatatacgactccacttcgttcgccagcgaatccaaatcctcctcgccgtctggagatggcctgtcctctagccaagtaacctccgccaccagatagggtttcgtacggacgatgttgccgattcggaaccgctcctggcctttacagattaagaagaatcggtcatcgacgagtcgctcgtgcttcacgacctcgccgacacagccaacgtcggctgttcccgatacggcgtcggagtaaattacgccgaatcggaggtcggtctggagcagtgtgtgcatcatcatacggtaacggaactcgaagatctgtaaagggagaatggccccgggaaagagtaccaatggtaaaggaaagagtgggagctcaaccacatcgtccgactttggtgagttcgtgtagttcctctccgggtatgaagaggaagagcaacggaggccgttggacttccgacggcggcggaggaggagggaggatttgaatatggagttagggtttaaggaagatgaaagaagagcattggggtttaaggtgggtttgtagtgggtaaaagaagaagaggaaggtgaagaaggaatgagttggggaagtgccatttctgagcttatagaaagcattttagtgagagaaagagtgaaaatagctacaaacccatatgatatgtttgattctccatttccatttaccttgtccttcttttctctctctaaatcatgtatatggttttcctttttcttttctctctaaaaaatctggtggctttcaggggagcgaagtagatgtggataatatggagagagtgagctcttagagggtgggcccatgggccgtaggggccgtggaacgatggaagaggatatatattgtggagtcaggatgtttggatgtggtttacgattattccacgtgggagtgtgctgttgttgtggtatgaaattgaaaaccaatcattcttctttcgtagaatacataataaattattaaggatttggtggtgttgaatcttgattaatcaaaaggatctccaccgttaaatctagatttttatatacttgaattagtacttgttaactcttgtggctctaattttctttttcttttttcatctcaacgttgctctaaattgttatccaccgaatattcactacttctgtacaaagacacgaaattcacattaaataaatagatttagacttgtcttaaatgaatttgaggcattttcaagttataaggctaactcatttattaaacagattatttttaagttgagacacttaattggaaaataatatatgagtatatactttttaaatttattatatttattatatgtaaattatttttcttacataaataagggtagagataagattaaattttaagaggaagtaatagcgcaagcgatgacaaggtttcatatacatgaattaaattagggttgttcatttgatctaattcgtatttttttggtcaaacaacatctaatccgcactaagtgc

SEQ ID NO: 299019 - DNA, 2099 bp, Cannabis indica
aattattagtaattatttattaactgaatcaaataacttctatcttcaatttttaccgaaagcacccttaatttgctcacatatttcataatgcctattcgatagtcaattttcaaagctgaacatcaacccatggtttcattgtcaatgacgtcaaagatgcctatctccggcgatgcgcccattagagatagaagttgctaaggataagcatatctgttctgtttctaaaatacaacataactatcctactacgtaaatgccccaaaagcaattattaaatcatcggaacagacagacatcatttttcagctaatgtttacaattatcgaataagcaaatcataaatagaagaattaattaaaatttaaaaagaattacaaaagaaaaaaaaaaaaaaaagtacaacattcaaattttggtagaaaacacaaaatcgcatgaaacgacatgattatcaaaattttgaaatggcgaaagaacgcagccatcttcccatgaagttgagttgcccaactcataattctatattgtctccacaaagctcagttatgatggtatttctcaaagttgaattttgaatagttgaccaatcattgagaaaagtgggcagtataggtacacatgagacgcctttgtatatacacttccatacaatatgacatttcgtcattatatgaaactcttcatttaagtctaacctggagaatgaggtgcacttcccttttgaagatggatcttaactcttcattagcttcaatgccaattctcctgttacagataaaaacatattccaaataagatgtcattgcaattctgtttacatatggcattgcggtttagagttttctctaaatcaaaagttccttcttgatgcgcaaacaaagttgcaaaacaaatatatggtaaacaaaaacaaataaaataacaaaagaaggcagagaatgaacactgaaccatgggttgatcagaatataaactagacctagtcacaataatcaaacaagttacaatagcaataggatttttctttatcaaaataagaaacagaatcgtaatgacagaagatctcatatgttaccctattttagagccattctttcccacaagaattttgcgctggcttaacttgtttgtgattaaatgctgttcaatcctaagagagccatttcgcaactccttccagtccattaaacgaagttcaataccataaggaatttcctgaaatgaatagattgcattcttatttctaaaagcacactaaaaactaagttaggcagattaaatgaaggccaaggacaagtaacattataaactctgagctcacctgatgtatgtgatccaataatctctcgcgaactacttccaatgaaatgttcttcataacctcctcactcattacgaatggatcttcatcccaaggcctttttactgcctagaaaaacaattagaattagattcaggtgaacacttcaacatgacgtgaaatttatagaatgaatgacaagaaaaaaagcatcttcaagcaaagaaaattgaaatgcataaaactcaatctcctgaattatattggaaaagttcatgctctcatagaagatcaataatttggcaaatttgctttgtaccagactctaaggaggagaaagaaccaccgtatgtctttacgatttcacaaagtactactcccatttccgtagaagttttcaaagggaaaaaaaaaacgaaattacaagggaaactacccatagaatcagaagcccattgcccaattatctgttatggagaatttgaaagagaagttttcaaggacatccaaaaaattaaattagacctgtcttatcatctaatttttttttttcataaaaaagttaatgcttaataatctagcttatatcaccagaatcaaatgaaaactgaattgagcatgttaaacaagataatctgataaaggtttttaactcaacattgtagtctaattaattgggattgtgatctaaacacacctgttaaaacacacccatggttagaacttaggtgacgtttggttagaagaaatgaaaatataagaatagaaataagaatggaatcaaatttaaaat

SEQ ID NO: 299020 - DNA, 5731 bp, Cannabis indica
ctgatttagagatctagggaggaagacatagttgatagtattgcacaatcaaattgcggtaattactatggatcaatcaggtacggatatacttaattatcatatattattattgtgttttatattatatataaataaatcttgggttttattgtcaatttatctaacaaaaaaaacatgtacaatctaagtgtgcatctttgcatttttttaaatttatttaattggctatgagttcacattcagttacaaaaacaataacattaatgtcatatactaatcaccaagttacaaatattctaatataaaataataaatttgtagttcagtttatattatattgaaattaaaagaaaaagaaatgggaaaataatttaagcaaacatccaattgcaagttttctattctacaataaatttccttaatgagtgaaatatataagaataataataataagtagtagaagaagaaaatttgcattaacaagttcataaacaaataataagctcattttcatcaacggaatatttaagcaattaaagatttcatctacgtatacaatctagcaatgtattaatatataagaaaatactaaaggagcactagaactattaagcaccataagataataataataataataataataataataataataataataataataatagtaggtgcatttactaatacttttataattagttattttgttttttaataaaagtaaaatatttttcaaaattatattctataaaattatttttactttttaatttttcaattggaaataaaaaatttgaaaacaaaataaataacttccaatttttttttaaacagttttgttttcttaatcaatattttggttctaaacctaacctacatcttgaaatccagactcgaatcccgacctcgacctcagacccaaacctgaatcccaaacttggatgttgacccggatcctgacctgtaccccagactcggactcgaattccaaccccagactttaaccctaaatttggaccccgacccgaatcttgaccctagacacggacccagaccttgaacagcttctgtgcctaaccccagcccttgaaccaaaatcccgaacccaaacccagaccttgacctcaatcccaacccggacctcaaccttagacacgaacccagactcgaatctcaacttccgacctgactttatataatatcaaaaataaaaataaaagtaaaatttacaatttacacttttatttttaaaaaaattataaaacgtatttttatttattacaaatttaagtacaaaaaatgtacttatttttataattaacaaatctaaaaacaaaaatattaacaagcgtcaccctacaaaaaaaaaataacttaattcaatccggtggtggaagtgtgggagagtcacaaataattatccattgagatttaatatcttccacataaatatcaattactttttaaaaaataaataagttaaaataataaaaaggacatggaaaaagaaagtgccgcgtgtcaaagaactcgtttgttctcagccacaaattctatacgtcccttctcaactttccaatccattactcttttttaaattaaaaaatttaaaataaataatggaatttcagacgtggcatcccctcccatccttttgttccttccgctcatttcttcaaatttctctgcttcttttttctttctcgtcattcttcctctgcttctctctctctaacatatctttgttaaaaatccctttttagatttgtcacagatctgtttttatcgggagaattcgtgggagctggttttcaagctgctctgattttcaattattgcattaatctttgaggtgagtttctgatttttttttcttttgggaagtgactactgtttaggaaacccaatgatgtgaagttaaatgagctgattttaacttgtgaagattgaaatttcatgtttgctaactagcctaaattgaaaactatggttgttgaggtatttaaaagtcctgtttctaatccaaaataattatttgtagcggaaacataatatgtctatgtgtttatattgatgatgttttcattgctttgtgtatctaaagaaagaaaaaaaattggatttttttttgaaaaaaaaaaaattggtcttgaaacacttaggattggtggtggctgatgactaaaacaatttctaggttaactttggtaagaggagcataattatcacgatgcatacttcttgttttgtggttatctagtatatatacttagttaaaattatatgtttgtatttgttttcattttctaatagtacctgcaaagctattactttgcaatattttaatgataggttcattgagcctatcattgttagccttgtttattggtaacaaatcaaaacacttaagggtcacccttttaatgcaaggaaaagaattacatagattagtctctgcagagatcttcttagcagctaggaattggaacaatctaaagagttgttaagcctagtttgtggttgaaaattgatcttttattcttttttttagtaatgggtttcataattatcttagtctttactgagtgattcacagtcctttttcaaggtcatatacctatctattccagcttgaattggaattgatattattttataaaattaccgacttatgtccttatgttcttatgagcaagagtactttgtttaatagctttatgttgtaggaagagaggtctaacatggtatgtttcttttgtcttctctttcctttggacaccaaacagagtgaagacatggggttgacagagatctatgacagtgcacctaaggtttcaatcttctcataactctctactgagtaccttttctatttgttcctaaaaggttgtacttgatgaaagttgtggtatgaactattctttgtttaatccttttgtgaaggccagaaaaccttacacaattacaaaacaaagagaaaaatggacggaggaagagcatcagaagtttcttgatgccttgaagttgtatggtcggggttggcgtcaaattgaaggtgagcttcagttttttgcttgtagattttcttttatggccatcttatcatgtgaaattgctttttgtttattattatttttttttatcttcttttagaacatgtaggcaccaaaactgctgttcagattcgaagtcatgctcaaaagttcttctctaaggtcaatggcttgatttatatttcttaaactgttgtaataataaaacttctgaaaagttatgatattcacagactgtggaattacactattacatcgttatccatgcttatatggtttttcttgctgaattcaggtagttcggggttcaatagggaatgttgaaggttctgtgcaaccaattgcgattcctccaccaaggcctaaaaagaagcctaagcatccttatcctcgcaaatcagttgacctttttaatctgtctattttacatcaatcagaaagatctccatctccaagtcttgtacatacagataaaggagtgaagtctcctacttcagttttgtccagtcacggctctgatgcagtgggctctgctacttctgaccagaataacaggttttcatcaatgtcaaggacaactgatttgcattcgataatcctgtctcctttcgagaagaataatgggcacttgttatcgaaatcatccaatgaagagaagagctcacttcctgaaaatcaattctctgactgttcgaccatggagaatgtcttgtgcttggtatgatgatatatttttttcttttctttttattagtcactttagctgtttcgttatgcaattaaatgtgcaatctcactagaattctaacccaaccttctttaatctgtgatctcatacagaaatgtgaatcaggtgctaagaacactaaacacactgaagaagagaccaaactttcaacttcaacaagttttaagatttttggaaagatagtcttgttgtctgacctcgagaaaggatcgccttctggtgttgagggttccaaaacattacaaactgaccaaatgcctgtttcagaattatcaccagatcaattaggcactgatctgtgtcttggtggaattgttagtgactgtcatctgttggcatgtggtgcttctattaacctgttagagcaacagaaagaagattctaatgcggtgaaaggcaatgcttctatgcttcagtggtctttgtatcaaacaccatgcaattacatcatcgcagacaacatcccaagcgtagagcaaacatttctgagttcttgcgcagaaggaaaaaccaaagataaggaagttaagaaggaaaggtcttgtactggttctaatgaaggatctgctagtgggatagaaactctaggagacacaaacatagaagccgtcaattccttttcccaagaacctcctactaaagtaagtgttgaaccctgcaattctaggaagggtttgtaccatacaagagatgcctagcagagagagacaatgtgtcatctatgaagcctaatgatagagagagacagaaaattcgagtttgctaataattcccttgaccaacatgtagttatattgtatggaccagaataggaagagtgttttagaagaggagtgggatggagcaaatttttaccttagtttttttttatttgttcccttccaagtagagctcccatctcagcatatttcttttcatggaaattcggttagaagcttccacgtttatgggttctagttcattcactccccttcccagcagttttagagttagaagaatgactcagaacactcttgagaactaagagtgcaatgcaatgcatacacacatgtcagctcttcaaaattgtccctatcttattgcagccttctgaagttattgaatgaccatgacagagtagaggctttccctgtactcaggggagttgagctctgagcaataagagtagttattggtgctgacaagaagtgtatgattgtaatatttggctaataaaatgagagcaataaggaataaggaataatagtattattcctagaaagggaaaattttgtgcaatcaaaacatcaaaaatcaccgtagttggaagctgtaaatctatttaagttgtgtactgtaactaagactttgtaaatattctgtttcggatttgaactttatgacttgtaaagcacaattttgctcttcatttggttaagccgaacactagaacagaagggatataaatttggagtaagaagtaaatataataagtagtattatacagaatattagaatatgtatcaaatattatgcacaaaatgcattaatttaatttaacatacatattcaaactagtgttgtaaattcgtgtgtcttgttagtttggttcacacaattttttgtgctttttaaaatatgagttatctcgtgttatgctaacatttttaaatggtaggcttgtaggttcgacattttagtaccgtgctcagattcgtcatgctttgtttttctcatgctagctcgtttttttcaaacaggtcagttcgttttcaaattgagctcgaattcatgttttacttattcatatttttttttttttacaattaatgaattaattaataaattatatgtattattgacttcaaatttggtcaaccaacaacggagtcgaatgtaataccgatgcttgcccatgttacacaataagaacaataaagta

SEQ ID NO: 299021 - DNA, 1575 bp, Cannabis indica
caaaaacaaaaaaaaaaaaaaaaaaatcaaaaataacaaaatactttgtaaaagcatagttacctacctttgttttttttttattagaaaatatttatatagaaaattgtatattttgaaagggaatgaattttgtgccccttactaaggacaaatagtagtttcacgtatatgaatgaaacactattcattaattttcaactattgattatgatagatgtcttactttctttcttgttacatctgaatacgaaacctttgactttttttacttgcattgcataattggaacaacttattacaactctatccaaaatgttttctttagcccaaaaaaaaaaaagacattaatttatgtagagcctatagtgtagattatagtgtagatgaagttaaaccaaaaccccatgatgatcaaattgcacttgcaaaaaaatcagtgctttccattttttatttttgaaaaaaagaaagcttacatgatatgctctttttttctttctcaatatattaattatcaagtacttaaaatgttaattgctaaagaatatagtaaattccaaatcttcaaactcttccacaaaacttactaattataagtaagtattcttcctctcttttttcattaggcactcctatcctatcacagtacaactcaaaaatttatatatgaattttatagactagttgttgttgtagttttaatgcactaaagtggggacctccaaactatacacctagtctattctcattttattattatttttcgaaaaaaaaaagagcttagagctagacacaatagtaagtatacattatcactattcactacacctatgattcttttgaaagatcctagttttattatttttattgttattaatttgttagaggtaataaaataaaataaaataaaaataatcattttattatgcaaatataatttaatttttttttttaaaatgacactaatatatcattctattataaaaatataaaatattaataaaaaataattaatatattaaatgagtccccatcaagatagagaatgacatcctcgtccctatctcgttctctatttaaataaagaatttcttccccattaggccgagtcccacagtgccatcccataagaataatgtgcttttcttaaccacctataaattttacacattttaaattatactcacaatgttaaactttactttaatccaatacaaataaattaaacaaatattaatatcactttctttaatgaaacaaaatttataatattaacaagggacacacatgatgtaacaatagaacttgttatattatggttatggtatataataaaactatgctaaagaccaaaaagcataatatagtattgtgttgtataattgcccttttcactttatagtaatcattcaccctaattggctggcctttcacaatcattggcatttggcaccgccttataaataaaaaacacaatattatttttggtattttggtttctttattataattttgggtaagcctataacactattgtcaatggatagttaacccataaaataataaaactac

SEQ ID NO: 299022 - DNA, 1524 bp, Cannabis indica
atacaaataaatatccattaacaatatttatttagtaaccattcatgagtacgtaatactcattaagaagtgttccatacaaataaataccaaaattacactagatagtggaagaaagatcaaacatttatttcaaaagaagaaagaacaactcaaaagttaattaatcaattaagtcacgaactgcttttacatttactcaattcgttttcttgttgtaattttatttttgctaaaagagacgttcttgctcatgttgataaacttgctaaggatgctagatattttcatagtggttttccgaactgcaaaggagagggattcccccctatgaatcccaatctcttttagaattaatctatcccgaactgagattttttcaaaaaaacaaaaaattaagtcacaaaagaattttatcaaatcatatattctaacccccctaatgctcttttataataaaaataaagtttctttgtgaacaaattggataatgtacattaggaacaaagttgtaagatgtgttaggggaaagttattgtcctatatcattagcctctatcgtaggttaattatgtgagaacatgaaaaaaggttggatttttttttagagcattgatattaagtattaatggtactttatattacctaaaggtgaagcttagtgattaattagtaatatgtcataaaatttattatatttttctttgataaatttcaaactcatcaattatctcttaggcaattacaagattttaatttggtaaaagagaatttttaggatgcatttgaaaataattgtgtaattaataaggtagttcttaagtacattgagggtcggccttgaattttagtggcccgtaggaaaaagaattgggcctttatttaaaaggatatgtggtatttttaaaataaatacaaaaattatgagtatttttaaaagggaattttttgggctcatgtgttaggtgggccttacgtacaggcttagcctgtttatgctcaagactgggcgtgagtacactctattttaaaatacaagatgtgtttgaatatgagatagtaattacttatgaatattattaaaggtggcatcacctgtaaaaaaaatatgggtggtgcctagcccgacccatactttgaggtcaggttagtaggaaccataagtacgaattgtttgtgttgcattcgtattcgtgtcatgctttaatgagttaatccgtttatattaaatagcccgacccgtttttgttaaatgtgccaattaatttttgttaaatgattgacctattttttaaagccatagtatggctgtgacagttagtaatcccgtgatctataagggaaaaaataccgagtaaactgtgcaatcccacattgcctaaggaaggtcaagtgtgatgattcttagactgtgtaggtatgtgactacataattgaagatagcttaaatggattgattgatactacctatattaacaagatgcatcttgttttttggtagcccatcacgaaagaactccacag

SEQ ID NO: 299023 - DNA, 3309 bp, Cannabis indica
acaaaaccatcggagagctcagactgaaatcatatcatcacacacaaaaatctgtagaatgttacatcaccattagatttagttagttaattcccaattgtatagtatattgtgagtataatcaaatccctagttagagaaggagatgaataaaggtggtggaggaggaggaggagcaggaggcgccggaggaaccggacctacagcggcagcagcggccgcggcggctcagagacagaaagctttgatgcagagagtggaaaccgacataagccacatcgtcgacaatttcagtcacttagtcaatgtctctagggtcaacgaaccaactgtcaggaacacccaagaagctttcatggctgaaatgcgtgctgccaggatggttatggctgccgattctctcctcaaattggtttctgagctaaagcaaacggccatcttcgcaggcttcgcttcactcaacgaccatgtcgatcagaggacttctgagttcaatcaccaagctcagaaaactaatcaattgcttgctcgaattggggatgatgctgctgctgcactcaaagaactcgaatcgcattactactcttcttcacagaggtccctcggcttttagtatattgttccattaatggcagttttaacatatagctagggttttgttcttctccattcacaatttcttgtttgtcctgctttttttaaggatcattagtcttattttttaatgatcattagtcttattctgcttttgcattataaaatgaaaccatgttcattgcatttcattatctgatgatgatgatttgtgattacaatttataaatcccaaatacatgaattgtgatcagaatgatatgttcaagctcttgaatgaggatttgttaaaatatgtaagtggcactagtcagtgctcaaagcattactattattataaacacaaactaaatcatttgaaaggtaatgagattgattcatattctaatcttgggtaggatatgtgtggttttattaaagtcttgaaaacctttgatatggggctataaatttagtgtttctgacacaagcattgtcatttgctagaaatttataacataagttggaatggaatgagttgttctttctcaaataaacactcttcagaactcaaataaattagagtttcttgagtaaggcattcaaatgtggctctagttttgtgagatttgtagccatctgaacctcgtatgacaacccttcatctttcaactcgaatactctggcaatctctttgacctgccaaaataacagttacacttctgtagaaaaatgacattattaccaaaggaaagtcatgtatgtgatgagcaagaaaattctacaagtaaagatgtgtcaaacattagaatgccaaggagaaggataaacttaggtagcaatgttatgttaagtgcaaatatgtaatctttgagatggtggcatccacaattttatagggtccagcataatagtgacatttcctgtccgtaaactgaaatcaggaagaactagacagcaatacatgtgttttttcttcctattttttggtggaatagctattccattgaaacggtagaaaagttattccatttcggtgttttgaattgtagccaaacaaaaaagtaaatgaaattaaattcatttacatcttccctttctccccatcacccaaacatgagcaaagccggttgggttggctgtctagataaggacacagttttcttcattgtttaagagctcagttacctaagccatacactaacaacaaaacacagtaaaactcactctttagccaagagcattgctaaagattaggaccaatccttatgtccaaaggtttggcaaagagcattgttagagggcactaaagtacctaacgccattatgaggtggcccctataattagttagtagctttctataatatttattaaagtaaaataagtaggatccaataatttacactaataacgatattacacttccttcacaagggtactagatactatggtagccctttagcatttttctttggcaaaaagtgttagattagaatcattctacacaggtgcatggaaatcttaacattaagagaagttgtatttttctatttggaaagcaaatcaaatacagacacatgcttatctaagaatttgaatcctcaccagttcagacaacctctctattgaacacaagtagagacaatatcttatcgctttcttatcatcatcatatgcataataacatgttaatgaaacaataatttccatgattaaattcaattattcatccatggtcagtatttattaccttagaagcatttcccacgagctcgctttgcaattttatcactttctgatcagcatcatatgtccctttctgcaaaagttaaattcacaatataaacagatgaggcttttatcattatacaggacatactattattagaatccattccacttagataagaaaaataactattattagaagaagaaaaaatagattgaagtacaaaggagggaagaggataaggtaacataacgacaaacaagaacaaagacagacaaaaacaaaaaactgtttttggaaacacaaatgttgtttctacaacaacatgtttcatctcacagtggattgttgttcaaatgtatgatgggtatgctaagctttactaaccaaagaacagtggattttagtacctgaacttcaacgagaccagtgctctgagcaatgacaacttcaatagtcccatctgattttggcctccaataaccactctctgcgtgcattggctcccctgagcttaatttccaagtcttctgggcataagctataacaggcttttcccattttacaaatcaatcaatcaatcaataaataaaacccagttgaagttacactgaaatgggaagagaattcacatcaaagtgtttagtattttgataccttgccagagtgggagaaatggagctcttcgccataggagaaggaattaatggtgggagccaccttgaccttgacccctccatttgccaagaaggaatgagagaggtgctattgccggatgtatagggtgctctccagaaccctccatcttaatggttgactctctattctagtgagatatagcttttgccgtcgatgcttgatggtctgtgacattttctgtccatcttcggtatccccatccattttcttttctccactagttaagggccatgtgtactttattagatacatatattaatttttttattattattttacgtcggttataatgagaaaattacattat

SEQ ID NO: 299024 - DNA, 2223 bp, Cannabis indica
aaagaagggaaataacttatatgtgaggaaaataaatataagcataggaatatattcaagaatgtgtggtacgagagcattttgttttctttgttaagtatttttttttatattctagtcaatggaatcatttgtattctttttagtagtctattcaaataaattaaaattgataaagagttaggtcaatcatgtttccttgtttgattccaccaaataatgatccttttactaattactatttgtatctttattttttcttaaagggacatcttatatcaaaattttaaaagtaattttaatagagaaatttaatttttagtgcatacaattggacaaaaattaaaaaatagcccaaaactcaatatcttccatattaatgcttatcttttcattgatcctaaagatacccgggccatttgaatccttctctatctcattttctccttctttcgtctttttacgaagcatttatcgagtcctctgtcttaatccactattaccgcccccacttagagacacgaccattcgaccaaaaaggttcgatcaagcatcgaacacttaaatttgtaggaagttagaagaaaaatattattcttgtcacattttaattggttcatggtaaagaaattagtgatttataatgttgtttttgatgttcaatctgtgatttatttatattttttgttgatttttttggtaaaaaaagaattttgatgagatttacattttttaaggttttttgtaatttttttgtgaatgctcaatagaattagtatgtacaataataatgtcatttgaaagttaagaataaatgttcgattggttacaaaaattgtgatcctcttttaattttctaaaatgtatatccaatggcaaaaggaaacaaggatgataacaaagtcgacgacaagaattgaaagaaagaaagaaattgagttagagagaaaagactgaaagacttttcaaatgacgatgatatttttaaaattaagagaaaaataaacactaattttctatctttaacttatatttatttttaaattattagccaactaatcatgaaaaagtaatttcttctaatatattatgtcatcttataaacttccaaaatctagaatagtataatacataatttacttaggtgttggtcccataatttattttttaaaaacatattcgtagccattgtcacttattccattttccctaattataatatcaatgatttgattactagattatatttatattgtagtattaatcatagaagtagattatctgtcatgtccatgttttttttttacttcatattattccgtccatccaattaaattcgaataattaatttaaaaactagagcatttaaaaaaaaattgtaattataacaatatttttcttataaaaaaaccactttctttctattaccaaaaaaaaaaaaaaaagacttagtttaatctcttttatctacacaccacatattaagatgataatacgatcaatcttaataagtgtctcaaattcagttcaatactctaaatataagtaatttcagttcaaccttaacaagagatattttatcttaacataccattttttaaataatgtcctagcctacttaattattcttctacactaataatatatatttataccaaatatgttaaatatgtatattagagttagtcccacattgttaatatgtggaaataaattgtcatatataaaatgaatcagttactcctcctattaccaattgattttgagatagaacccagatctgggaaggaagaaaaagactcggggagagagtgtgaaaaaagggcccagtgagaaagagagaaaataagaaaatcaaaaaaaaaaaataagataaaaaattatttatttatttattaaaaatttaatttaaattattcttttaattttaaaattaaaaatagtaaaataatttttttattaatttttaaattaattatattaagtggactaatatacatgtgtcacatgtacataataagtacacgtaggcagtcgatgtgaatagtcaactgaaataagtggatcacactttaaatttactacagtttagcaggttagattactaccaaaatttaaaattaaaaaattaagtaaaaataaaattaatagttaaagagaatttaagtgcaaattactctttgatatacaaaagaaagatataaggaaaaaaagataccgaca

SEQ ID NO: 299025 - DNA, 1638 bp, Cannabis indica
ccaaaaagtcttatgcagaaggtcttattaaatcggaaggtactttcagataagcttgtaccatgtttgatatgtctctactggatggcttttcactaatttggaggtgtactccaaaacaactttgtcagtcttgagggttcatcctggaacgaagttatgtacgtatcctgaaggcttgtgtgttacaaagcttttggattgtccgtactgaaagcacgtgtttcaagatgacgctgattattgttgctagtgatgagttggatcacttatgacagtgtaaatgtaccacaataacttaggagatatgtttggcaacaatgcaaatctatacatagttgtaaatctttgtaacatgtgtgagaatctagaaaagatttcgcttgagtgaaaatcgtaatagtgcaaggtagagtctaaactagagagagaaacctcttctcgtaatctctgagaagtttgtaaagattcttgtaaccttgtaaacactgatatcaataaaaatatggttgctgttgttccaactaagatgtagagtattgcacatggcttgaactcgttaaagctgatgttgttcttttttgttttactgcttaatttattatcttgaattcttgagatctcttggtatttagtttcttgatcgtgttgcatgtttgtggtactgtaaactgtatcgtaagttattgattgttccgtttcgcacaattattattattattattattattattattattattattattattattaggacactatagctaattctattagaaatgataattaatcggccataattttcataatgattggtaattaaaatcccatgagattaatatcaaatcaagtgattaatttgttgatagatatcttgagaatcatacaagagggagcacagtacatatataacttgcatgccttgtatacttgtattgtattgaatataaatacaagaaaactttataaccagtatatgtatgtacacctgtctttattggatgtactacattaatccacgtacttcaagctgatttgatgacccagattacaaaattaattaaaattgttgtcacaaaatcaactcaaggtttataattgaattccttctaatcaatgtgctaaactgataatatattgcttgcaaaatcgaattgtcggtaggacaaaagtcctaatatttttgcatatatagatatagaatatatatattatatttatataaataaagaggtcatattaatatgtatacatatatattgtatgggaggtcatagtaatattatttttctaattatgagaaaaatgctaatacttatttatttttctcttttaattagaaacgaggaaatgcttaaaattactcacttgttttaattagtaataataatatactgtcaataaaatggaaaatgtttgtgtatgatcaggttttgattaggtatagaggtctaaaagcaactgggatttgatcaattaattagacgagttgttaagtacatatatatatatatgtatgtatatatgaacctttcattatcagtaaaacaatatgatatttcccatgaagttttggtatcttaattaaactaatgagcaacttatttaattgatgtgatatatatatatatatat

SEQ ID NO: 299026 - DNA, 1227 bp, Cannabis indica
actaaaaagttaggagtaattttaagtgacccacataattagactctaaactttcggagctagtttcatgtaatgtgggtcactaaaaatatgaaggacatgagaaatacctagttttcttatttttttttatatatatttaaaatgctaacccatagttaaagtcaggccgagactgagtgggaaaggatgtcccaacctgccttatgcgtcactatatcataatcatatatctaattattttaattataagatttatggtatagtgacacgccaggtatatcaggacatgtatacccagtcatgactggcgtgtaagtatatgttaaaaaaaaaaagcaaattagtttcttaattttttttttaattttattcatttctgtaaataaaacacgtgggtataaattaaagcaaaaaattaaaaccctaaggccccaaaattatttttcatcttcttgccatcctatgtccttcgacactctctctactctctctgtaccctcctcgacaataacctccaccagttgttctttggccgtccttgcccaaggcaaaccctgaccatgcgttccctttctcgtccctctacacatatttgtctttccctctctctctctcgctcctcctgactccatgccaaagagccaccaacgaagacgtttggtcgtgcggcgacaccattctctccaagcatccaccttcgttctcctcatgcggcaggctattgcccaagaacaaccttcaactttggcaatctttaatgagatctccacttccattaacctcgcatatcctcctctcctctctctcgtatatgtattatttttggaaactaaataatgtatatatctgtataaaggagagatatgagacggtgacatgacgctctaattctctccttaattttctcattttttttaattttttattagcttcataaatattaattgatataaaatacatacctctatttattttctccttaattttattattttttttatttttcattaaagttattacttaattttcttatttttttttaatttttcattagagttataataaatattgattgattaatttattaattaatttaaaaagaatctaaccatacttttgaaaatctaaaattatatatgttttacgtattatataactaaggtgtcgtttggtaacacttttgttttttaattttttaatcacaaaatgaaaaataaaattttt

SEQ ID NO: 299027 - DNA, 1846 bp, Cannabis indica
taaatttaacaatttcaataattgaaaatcttaattacactttttttttttttaataaggcaataattttcgaatcaacttatgaaaattaaagttgggaaacttttttacttttcaaaaaaaaaaatgttgggaagtttttttataaatggcaatagcttagatgattctattcaataaaaatgcacaaactcacttacttggaagtgtggccattaaatggtttcaaatttcaattattttatgggacttggtgcaactagagaagagaagagatctatccatgcactttaactgctgtgaacataaatgaatcatgtttttgttccccagttggaattagtaactttatttatttatcatgatttctatccagtgttatggtgatgcattggattttagtgctgcccatgccaaaataaattaaaaaaaaaatactaaatacttaagtgtaaatatagctatagccatatcctgaaaactaatttctgcttaatctgaaaactaatctttttaaacaacttcataaaaagataaatgttgttacaatccaaattaaaaaataatgttattattatgtttgcttgaataatgtacagttaaatatagtgtgaataataaaacatccaacattttgatcatcttgtccagaaaggatggtgagatttcgtttctttcttttcttttaaaaagaaagaaagaaagaaagaatttcacacttactaattaatcaactactactcgctatataatatattctcacatggttgtagaaccttttctttctaatctaccaaacggtgtcgtcttaggtccttaggctgaattttccaatggccactaggcaaatcaatcttattagcaatccctctccacttcttaatcctacggtccatcttcttcgtcaatccacaatacgactgcaaattcttcggcatgtaatcgtacacttcccaccaccgccggtgagctgagtcgctcgcgtagatgaggtgatccggcatgtcccaattacagtcgtaatccctgtaacacaaccatggcttcaatcccagataatgaattgccccaattttttgacccctacccacctcatgtaaaaagtctccgctactgctccttctaaaaatcttcaggtaattaatacttcggggaagccgatgccaccacgtgaagacttcgttcagaaacccttggtctccgccgttgtacgatttcaattcaaatgtcttctcgctaaggactttgaacaaacagttggatggctcaatcaccatcaccccagaattgaacaaaaacctgtcgttcccggctgccgagagctgaggatataagaagaggtaatccaggttgctgagaaccagtaaatctgcgtcgatgaagacgatcttgtcgtaccggacgagttgccataggcggagcttgctgtagttccactcgttgtaggagccttttttcgcgaatggacttcggattcggtcaatggggacgatctgccacccggcagaccggagacctcgtcgggattttgtgctgatggatttgtcggccaggaggacgaggtctctggtggatttggtccggcgaatgctttgggccaaagctatggcgccacagacgtaggattccgaagaatgaaggacagtggcgtaggcgtatcttgggccacggtgttgctgatttattatctgattgggcttggtcttgggctgggcctctggttcaatattatctgagccgggttcttgtaaagcccatcttctcagctcctctttttctgttcaatgaaaacacagcccaattttcttatttaaaaattaaattataaataataagggtttttttt

SEQ ID NO: 299028 - DNA, 5481 bp, Cannabis indica
gcaagtaaatggtcttttttttttctaaagtccaaacccatctatcatcccctagacccgagggtttaccgcctttgacgattgcagacaccgtttccttatcaaaaaggacattaagcttccggatgtccaaatctccattggccagcaaaaggtcagacacacagttatcattggttaagatcccgctccttagtttcgggatgaaacctttaagatgaggaatccagggatccctccaaatattaatcgccctcccatttgtcacagctttacaagcccctttctttaaaatatttttggctttcacaacatttttccagaatcagaatccgagtccttatagctgcatctgagaaaatccttcccctttctttaagatagttttggctttcacaacatttttctagaaccagtttttatactattttatactctcaattattatctttagtatctccattgccatcttgtctgaattggtataaacaatctttctttcatattcggctataagaggactcttaagtatagagttatatgagattttaatgcaattttaacaatgtttttttttttttcaatcaagtgagaaagaaaaattatttgaggttacatattaaaattcattaaagcacgattcacattattatactcgataataagcattatacaaaaaatacgtactatacattatacaagataaaataaaaaggaaaactattttaatgcaagacaaaaaaatttaataagttttttatcatttttttatatgttttaattttaattctattttaagcgatatttattcttatttttttattatttttaaccaaatgacaccattaaagatggcttaccaatccaatattttttagggtcaccaatccaaagagcagctttatataaattggtcattagacaaataatgttacttaaagtaatttgcttaataagatttttgggtagtttttgtaagaatggcatggataaatataaaaaaattattaaattaataattattcagtttcttaaaatgtgatgatgaattaacactcatcaatcagtattaacaaatccattaacaaaaaaaaaaaaaaatagtattaacaaatccattacgaacaaaaatagtattaacttaaaaaatagtgtatggggtaatttttatttttttttaaatcacaccaaatatttatccaattacttatttgattggatcgaatgagaaaaaaaaaagttaaattaagtagaaaaaatattatcatattatcaggtatttcatattttaatttaaaaaatattattaaaaattactaaattattcacaaatgccatcttgtcacaatattgagtagaaaaggtgtcgatttgtatttacctatcgttttcaagttgtattgacattttaaatttattaaaaaactatcgacacgaatacgatctgacatggaaaatttataaaatacgaacataaacacaacccctaaaattttatgatatgttggtaagttgtaacgtaaattgttatttatagtgtaatcttatcatgtgaagtttttaaatttattttagataactgatacagatataacatgtaacacgaaagattataaaacactaacaaaatacaacttgcattatttttcgtgttatgtcaaacttgtataattctaaattgtatttatgctaaagtcaaacctcatattgtgacccgaattaccaccctttactgtctaagaatactcctctatttccttccttttttttggaaaggaatgctcccctatttaatatgttattaatttagtgtcatcaaaatcaaatgcttctaaattatagttaataaaacaatgccaactcatttctcatttgaattggcctttgagtaggatggtattatccataacctcaaacttatcaatttgactttcattaatacaatcaactacttgggtttcccacaaccatctttctctttcaagtttttccattttctttttctgattttctgtatattttataaaacaaataatctacaatttgagattgcaagaaggtaattttttatttaccacatatttccacaattaaaattaccattttaacattttcttttgttagaaggtaatttttgggcgtaaattaatttttattagatttattaaaatttaagttgattgagtaattttttagtgtattagtccatattgttagtgatcaataattaataaacttaaagatctgtatgtataaaatttaattgaagtaataatataaatttttctaattaactgaagtctttaatgaacagcagcacaaattcaagaatatgtagttaaatcttaactctataaatacatattatctcataacaataatatcttttttgataatcaaataatgattttcgtttaaagatttagggggaaagatttaagttatagtattgtactatcaaattaaattatagtaattactatacatataattattaatgtgttttatattatatacaaaaaatctgtatcttttgttatttaattttctaagatttttttgctagtagacatttgattgatacaacatgtacgtaatctgtattaagtgttcattcacgttaccaataatcacgacatgaacaattaccatctctgaaatggtgaaaaaccttagaatccccaacaattatctctcttttggtgatcactgagatcttctttatagcaccatgacaatctttacaaactctagtgttctttctcacaacaacagggcttccaacctttgtactgatcaacccaaaacaggttgccaatcttacgctgtgataatctgaggactttgatcttttattcttcaaatctattggcctgaacttggtgatgctgcaatgagtacttctgttttcttctatctttctcaagagtatacctaagacatggtagatcatgtcagtttgaatgtgtgacctatcatcattaatgaacctgtgagtcttatatttggtctcaacaatgctgcacccaacagttttatccaatcctctctgttccatgagagatttgattcgttctacatcatcccatcttccaacttcagcatacaaattagatagcaaaacataacaaccggtattatcatgttccacgcgaaaaatatgttctgcaacaagttcagcaagctcaatatttctatggtttttactagcagtaagtaatgatccccagatcctggctgtaggtgcgatcggcattgttttgataaaactcttggctcggtcaagatcacctgctcgaccaagaagatcaaggatacagccacagtgctctatcccacaatcaatgttgtaatctgttttcattgagttgtagaatttccaaccctcatcgaccatcccggatatgctgcaagaggttaacaaggaaacaaaggtgttgtaattaggttctatgttctggtctctcatcttagagaacaattcaattgattcttttccgaatccatgaattgcataagccatgataatagtgttccatgaactcacatccctttggggaatcccatcgaaaagttctcgagcagtttgtaattcgccacatttagcatacatatagacaagtgaattcaaaatataggaattcttattgtgttcagattttgagatataaccatgaatttgctttccctctctgagtgatgatacttcagaataagctggtacaacacttgccatggtaatagcatctggtatgagaggcttattcaaaagttcttgaaatagttttaatgcttccttattccacccattttgtgcaaacgtagcaatcattgaattccatgttaccaaccccttttcttccattcgatcaaatatatactctgctaattttggcttcccaaaggccccatagacatcaatcaaagctgtttccaaaacaatatgagggagaaacccttttctaatggcataaccatgaatcgatttaccaaccaagaaagctcctaactgtgcacatgaagggagcaagtttattaatgtaataacatcaggatccaagttatcatcttttttcatctttctcaagcatgccaatgagtccaaaggtcgcgaattcagaacatacccgccaatcattgcattccaagccacaacatttctaggagaaatctcatgaaacaatctctctgcaaggtccacccttccacatttgctgtacatgtcaagaagagaagtctgaatcataatatccaattcaaaaccacatttaagaacctggccatgaatctctttcccatttcggattaaacattctatagaacaagcattaatagaactgatcatggtgaacctgtctggcttaattccaagcatttgcatctccaacaaacgtgccagagagcttctaccatccccaacggtaacatatccactaatcaaagaattccaagatactaaatccttcacaggcatttcttcaaacactttctctgcacactgaacaaaaccaagtttacaatacatagaaataagcgaattgcaaacacaaatatctgaatccaacccaatcttaaacaacttcccatgaaccttttctccctcttccaacgaaaacgaagcaccacatgcctttatcacaaatgggtaggtgaaattatcagctagaaccccttcacttcccattctacgataaaaacaaatggcttcccagaaaaacccattatttacaaaacccctaatcataagattccaagtatacgcatcggaatggtttattttctcgaagagtgaaatcgcatccctcatgtgcccagaattgatgtgagttcgaagaattgaggtctgtaaagtccttgatttctttggattattattaacgacgacggcggagtcttgtttggattttgaatcgttgagtcgtgttgttgtgggaacttttcttgaagctaaagagtgttggtggtggtggtagtagttacagtgagataatgttatagccatatttggaaggagagaatcaatggtgtgaaatgaagagaatcattcattcattcacagttcacacatcacagtccaaagagtcaaatttgttgaagtttcatggccaggaaggattgaggaagatactctgtcattctctctctctctctctctctctctctttaaatttgttgaaagattacacatgcaacacttaataatgggaaatagaatagagcaaattttgttgtgtttcttagggcatctccaacggggaaatttaaattggtgttaaatcaacattaaaaaaaactattatttcaacgctaaatttaaaaattaagtggaaagagtataactatttgaaaattaagttatgagatatgatataacgcgcaccgtgtgaatatcgctattggtctaactaaatatcagtctcatataatttattttttttttttgaaagaactacacttttagtctcatataatttaatataa

SEQ ID NO: 299029 - DNA, 2200 bp, Cannabis indica
aaaagtgtgcatgtgggtgcaaccgttaagtgagcaactctataaggttccccatgagcaaaaagaatcatgtcctcccaaccgacaaagttgttgtgttctctaaggagttagaagatatggttgcgaaaggatccaccctaatttagtctggaggtaactctggattgctagggttcctaactatctcacataccctatctgtgaattcattcatggggtacttagtgcgatctaaattcacaaagtgtgtatcaaatcccccttggtccatccaggatatgtagggaaaactagggggtgtggtatcacgaaagggtctgttacttcttccaaaagtgctagctcctagtgtgcccttgtccaggtatgctgcaacatacctctcccagatctcctcaacttctgtcagaggatttcgatgatgaagcatccaactagcttataggagatgatcctcttttgtagccttcgtgaggattttgtctaggtcacgaacaattgcatccttgatctcctttgaatcttggctttgacccctattgctgacattgtcaatgctctagaaatttgcaataaatttgtgctcacggagtagtgatgtggtcacctagccctcaactttcaattagtcttcagtgaaggccttgtactggaccattttcttggccaactcattgttctcaatggtcccaggcactggttctaccaattgacacaaagaagcataaaggtccagtcaacacttgaaccaaatcaaaaaagagtatgaaaaagaaatagatcaagaaagcaagtgtaaaggtttttacctgggatttggaaggtgagcgggagagtaggaactctcttcattgggaagccagtagaaaagaaccaatatttcctgaggtcatgggaacacttggtgtgactggtggggcagtgagcatctgaatacttctcaagcttgtaaaaccccaacttcttgaagttggtcctcatggattgaggcttaactctgtagaagaacaagatctccttcggagaaggtacttcaaatttgttaattttacaaaaaaaatgtaccatttggccaaaagcttataagacagaggtattagttggaacagagcaatcctaatgagcacaatgaagtttgtgaagtaagttgacgagaaggcagcctttttatagggaacctaaaagaaaagaaccagtactctcggaatcatgagtacggtcagtgtggttgactaggcagtaagagtccggacgcttggccatcctgaagaagcccaacttcttcttgtttgccctcatggggttagcctttatactgtaaaagtaaaggatctcctccggggaaggtacttccaacttgttcatcttgcaaaagacataccacccaaccatgagcctatacgatgaggggattacctggaaaggagctatcctgatcttggccatcagattcgcaaaatatgtccttaagggaagatgcgctccattggaaatgtcgggccaactccaagcattgaatccctctatactcgtggatgttgattctcctatggcaaacagttggccttctaatccatctcccaaatggagtcattgaaagcctgtgcagcagggggtcttagccctccttttccctttggcttttgaggagagtccttcctccgcaataggttcatcctctgggacagtttccagaatcgtcccttgttaaggcacttcaacaggaaccacagcctgggttccttccacgagtgcttcccttacaagagcaacatgtgcaccttcagtggttcccacaatgcccaattggaaatcctggttaaggtccatttctactaacacaaaaatgaagagaaacaaagctttttgaagcgatcgactataatagaagaaaactgccagatttgtaccccaatcgacaaaatcctaaggtctatagacatacatgcacctatgaaatctcaaatgaccagaaaaaaaatacccagacaacactatccacttttcacaacaaatcaatgttggaatatcttttaccaggatatagatttattaacaagtgtgtttttaacatcctaatatgaatttgatgaaaataaacacataaaatgtatgaaaaaccttatagtggtcgcagcggaattaaatgagcctttccgctcagatctctaacccttgtatcctatctgtagcagag

SEQ ID NO: 299030 - DNA, 1451 bp, Cannabis indica
actactgactgtcacacaacctctgtactagtttaggaaaatgtgtttggacagatgcttgtcctactatttttaaattcttctgttaacatttaaatttttattaacaatttttagcattttcttactaaaaaaaaattctatatgcttcataattcatattgtcatgtttctttggcaataatttgtgtacaatacattctagtgactttcacttcaaaagattgtatacggtaaataaaaaacttggcacttagcttggaccatttcaaaaaaaaaataatccaatctaaacactgcattttagagattgtaataaatcattttgcaaattattaataatctgagatcattatacataacatatataccatatcttaatcattttctttctttttcttttttatgattaaactaagctgatttacaacacgtcttctttttttattttcttcctttgtggggccattttttttcactagtcaagaaactaataatatgtatcataataaatcgcaacagaaacaattgatgatttgcatcaatattttttgtactacctaagaacggaatatgcgtataattacaactagcacataactctaaaaagcaaaaataaaaaaaaaaaaaaaagtagggtgaagctagaaaggtgttgtggctatatcgcatgacagttctaagttatcctccatgaatccaaattcgatttcatcacttagaaccatctctagtgttcctgttttcaacgccaccgcactgcccattggctttaagcccttttattaagtggaatagtttcataaaatgacagtaattagaatttgatatattaaacaaaatagaaaataagaaagattagaaagaaaggtaaaaaaacaaacaatatacaatatggttatataataatacctcagtgaagatattcatggcttcttccacagacctagttttcagaacatataaagcttcttcctgcaaacccgaccaacatgatcaattaattatatatatacaaggttgtaaacaagaaaccatttatttaaaggataaacttttatacccttgtaaaatgaaattgatccattctaggagcccttggctctctttctatggatgatttcctatcgatctgagccaccgaaatcccttccattataattatttagagagagagattcaaaagagaaagatatatactttcttattaaaaatagaggactaaaaattattgaagatattctggtaatggtactggtacgctaatactattaaattagggaaatttgaatttctatgcttacattactgtaatgaccgctctagtttatgaattagtaaaggcaattagcacaaaaatttaataatttattattatttgtgaattaaattttaatgtggaccccaatatttagaaataaatattagagttataatttctcaatttcgga

SEQ ID NO: 299031 - DNA, 3738 bp, Cannabis indica
aaaaattaatattctacaccataccatgacatgaactcatcgaacctcggacttagacccgaacctggactcgaacccggactcatacctagaccccgaacacggggtttggggttaggtccaggtttggggtcgaggtccggtgtccaggttcaggtctaggctcggggtccgggtccgggtttgagtctaggcccggggttcgggttcgggtctaagtctgggtacaggtcttggtctgggtctgggtccaggtccgtgtctatgtttggggtccaagtccaaggggttcgggtccgaggagtccacgctcggggtccggggtccgtgatccgtggtccatggtccgggatccaggtctaggtccgtagtccatggttcggggtctaggtctaagtctaaggtccgtgtccatgtccgggttccatggtccagtgtccggggtccggggtccggggtccgtggtccgagataccgggttcggggtctagggtactggattaccgagttcggggtccaggatatggggtccaagtatgtgagtaaaaatgtaaaatataatgttagaaaaaaagaaattgttttcaaaaattgaaaactacattttgatgtaaattgttttctagttttttaaaaaccgatgttttttcttttaaaaaatttggccaaacaacccctattaatttttaaaactatttctatttttataaattaaaaatatttttaagttataaagtcaaacagcccttaagaggccttgagcccatgcctcagctatcccatccttaagtcggtatttggtgtcccttaatatttctaatcatcatattatattatgtattaatcatgaagtatatttgtgaacctaatcctaattatacactccatgaaacttataaagacagtgtgaaacaaatttaaattgaccttaataatttgatgaataagccactctctaacttctatatatagttaggtcgtaagtgataagattctaattcttataaaaaagaacactatcattagcattatatagttataaacataaagatatctctatatatacttaatgaagttaagcagaaaaaaaataaattaatgatcaccatatgcaaattaatattatatatatatgtatagcatcatcatcacctagggtaaggagagaaaaaagaaataattaagaataataaaaggacaagttgttggggggggtcaaaaggtggcttacttacaaatgtgaaagagaacaagaataaaacacgtaaagcataattaattaatatgtgaattgtgatcaccaatatttgtagtaacaattttcataaattaagaataattgtttgcatgcatgccaaaaagacctccacgagaattaatgaactatacacattagtgtatgtattatatatatttgtgggggctattttttatcatttagtgtcatgtaattactaagttcaaaacatataatatatgtgtatttaattattttaaaaacactcagtactataaataagataattctttttgagtggtgcttcagccctagctataggacacaatgtgtgtccataactaaatcacatcaaacatgtagtttttaattttatctaatcactaaaatcttagcaaagtttaagaatttttcttttgttttgaaaaactatcatttcaaacattcaattggtattaatgaggaaactcaatcaaagcagtagcattagttgccaatgcccttttggcaacattgtgtggccatggacatgcaaaattaaagatgctcgaaatcttagaaattaaaaatacaactaaaaaataagtgagagtgattcctacagatagtgatataattgttaatatctcatctaattaacgaaaagccccttaatagtactagcaacaacatcagaatcactttctaaaattacaaatacaagcatcaacccctcgagtgaggggatccttagaaggtagactcttagaagtcacccacacaatgtcagcatcatcatttctagcagttgctattgtcattatatgctccatcccaactgcaacgtcacaattaatctgtatcaatttgtcagtggcggattccaatccaaacaaatactagcattagattctaaaagaagagaggaagcataatttgaaaaacactacgaaaaaaaattaaaatgatgggaaaagtttactcacattgttatgaattttgtcatttttagccatctatatggtacccaccacaattgatgcatacattaaaatatcattggtatcaacccccatagatgttgagaccataagaactttacccaatctcaacaccttgtaccattatcattaaggagaattaaattccaagaaaaagatctctagagatggtaagcaaggttgtagtgaaggaacaagtgttccatagattccgtttcacccccacacaaaagactcatcaagtcatcaatcatgatctattaccaattagataaaaattatgtttactgtaattaatcgatctatttatataaaaatatgtgttttgtcccatattatttattgttgtccgtatttttaccttgacaacacatggctttctcatgaaggccccatctacaggccaagaaagccctcataaagcttaaataaactaagtctaagccttacccaagtctagcatccgagaatgccaattatccatcttctcgagtaaggatagctactgagtggactagttttgttcagagaagctaattaacgacttgtctccaaaggttccagtgattcgaatggagcttagcctaccggacttgttgcaagctattcatggtacacccaaggcccttcaaggcgtgttggcctatactgatacctttcagggtcggccctagacataggcggactaggcatgtccttagggcccagtcattttaggggcccaaataaaaaaaaataccttttaaaaaatgtatatatatttttaataatttttaaaaatactatttatctttatagttagggcccaaaaaatatttttgcctatggcctatttcaacttagggtcggccctgatacccttgatgggagtatgcaggaaagaaatacgaatttagaactatttaccattctgaatgaagtctatgtgttacacctctgacatgatcccataaaatttggggacctatctcgtctacccactcgcaaaaaggctcacggcaaaaaagtagaatcttctatgggattgtcacgaccactactctaatacaccctttccccatgctccaaacgacgatgactcgcgcgtcctataaatatcaacaggacaatgaacagttgtcacttactgattttatgggttgggtctcacctaccaagtccaatacacccaaagttaacacttatcttgtattttctccatcgatggactttttggtatctaaaaattctaattgcgcctagatcaatctgactctaggtgcatgactacctataaataaaacttcactactgccatgaaagaagtttgatactactgactcatggattaaggctaattaacgtaaaaaattatttttttcatttctttaacctttctttagtttccaattttctttaaatgggttttcgaaaattttggtaaacactcatgtatgagtaaattgtggggtttagtaatatatatctatatatataagttattgagttaattataagatatttgtatctatatatatgtat

SEQ ID NO: 299032 - DNA, 1732 bp, Cannabis indica
agtcaaaacagtggctaccttcatagaagattactttggttttcactatgaccaactaccacttgtggcagctgttcttattgcctttcctcttgtttattcatctctattcacttactgcataggaaggttgaactaccagagaagataacacaaattcattaacatgtatgtacatatgttacctcttttgcttctctgtaaatcatcattccagggcccggacctggacccgggcccgaccctgaattttagtgagtcataaacaaaaataaaactacaaaagcatttattaaagtatttttgtaattattttacagtacatgtaacatgtgtagttaatggtgtctttacatgtgtgcacacaaacttagaaacaaaatctgttgtgagagaattgaatcagatttaattttaagaacattgggttgttttactgttaaaaaatagccattaaaaattgtgtagttataaagtaaatatccctttgtatttgaacttatcttttctaatgctttttctctgttttttttttggtctgatttcttactaagtagtttagttgaacagaagctattatctaagttttaccttcttctttgttgttgtagctgcaataagaacataatataaatgaacaacaaagtatcaaagtgacttcatccaaaaatcatttataattcacgtgatgtgttcttttttgtctttttaacagtattgtgtgtgatgatagacattccaaagtggtggggattatttgattaattagtgataaatgacatacaaacttctcatatatttaatatccatttcccaccaaagaaagaattaaacattgtaaagtgacagaacagtcttttaataaaagggcatgaaattgaatgatgaataaacacaacacactaatcttacccaagacacaagtattaatattttagaattttcaattataaaaataacccttttccaaaaatcattcatatacaacaacaacaacaaactcattgaaataatctccatatcttttctatttttcttataataataaacaaaaaatttgaccaaccaacaaattcacctacccacttgtttattgttccttttcctataatgtaatttaatagtgaaagggttaggtgactctcatttccctgatgtgtacataacgtggactccagcacatcttatgagcaatgagaatcacccattatcctatatacaatataaaataaatataaatatatatatatatatatacgcacacacttaaatcaagatacagtatcattcatgtcgtttgtgatattcaacgtttgttttaattgattcttaagcaactagtatatgtcacatccacaccaaaacaaaattgtctcataaaaaattaaaccttattattgtgaaactgaatatgcaatctactagttttttgtatacatgaaagtacaaacaggagtattactattaatactaatgcagagaaaattgtatgaaatcattttgaggggttttttcccctttatggacatgggaatcaatgcaatataatggtgccaattatttgtgtcactttttaatgccaatcccaatatgacatgggcatttttgaaaggtgtgtagacatatacatgtgctgagcatgtaaaggtatattgtcattttaatgcataaaaacaacaatggatatatatctaaaaaaaaaaaaaaacaatggatatatgtgaaagcgaac

SEQ ID NO: 299033 - DNA, 4064 bp, Cannabis indica
gatgttaatgaaacatacttgttagtaaatctagatcctggtaaaatatttccatcaggaccatgacccccgtcccagacccaaacctaaacctgacttaaataaagtcaaaaaaaaaaaaataaaaatgataattatagaacacgcttttgttttttgtttttaaaatttaaaaacaaaagtggttatacaatacattttagtgtcgtttggtaacacttttactttctaattttttaattacgaaatgcaagtaaaatttttgtttttaaaatttttgattatgaaaaacaaaaatatgttctctaaccacttttgtttttcaatttaaaaaaaaaataaaataaaagtgtgctctgtaaagtttatttttatttttattttttgattttatttaagtcgagtctagatctggggtaagaccaggctcggccctgggcataggcgggctaggcctgtgcctagggcccacctagtccagtggcccaaaaaaaatattttccttttaaaattatacaattttttttattgattttgaaaaataccatattttttaaaataaggcccaaatttttttttttaaggcccactaaaagtcagggccgaccctaggtaagactcaagttccggtcagaagttagattagcgccagggccgtggggaatgggaggatttgggtccaaatctggtcggagttcaaaatattgatttaggaaaaaaaaaaactgtttaaaaaaatattgaacgtaattttttttttcaaaattttgatttataattaaaaaattgaaaagtgaaaacaattttagagaatatgttttttaaaaaatattttcacttttccaattttaaaaataaaaaactgattaaaaaagtgttatcaaatgctacattttcttaaaaaacataattttaaaagcacaaattttgcttttatatttttattttaaaaattttaaaaacaaaatgttaccaaagtctaagtcgaaaaactttgtataataatatttgtttagattacttataccccattaaaattaactaattaattaaactaacaagaaagattacaatttccaagaaatgtctactattatattagtatacgatcgattcttgtagcgtaaataaatcctaaactaataaaagattatttttttctagaaaaataaagtacgaaatttactactaaaaagttcatcaacacagcactctgctagctttgctgtctcccattctcatttatgccccgcgactttggagctgagaaactcaaaagagttggggagtcaagaatgttaggaaccttcccctcggatcgcgtcagtccacgtggcacaccataaacgactgttcttgctgacgtcatcgctttccgcacccacgaaaaccgaacttataaatgctgaaatgtcaatgtgggccccaactcaccatacctagtgtcttcacccccacgacactttcacacaccattcttttctctctcttatctctctctgtatcatatttataagccttcttcttttcttatttctttccttaatttgctctctatgcccacgcccccacccaggcgtacgttagcctccaccaccacttcttcagccgccaaaaccccacaactctacaacttctgctcacactatgacaaatccaagtttatggttctctaaacgagagattgatgctctcattttcctctgtcttctattgccggcggcgttaccctacgctggagctcagccgccgagtaataatgaaaacgatccgtatgcgtataaccggttcagcccgtcgatggcgatcatcatcgtcgtcctcatagcagcgctattctttatgggattcttctcgatctacattcgtcactgctctgatgcccaagcagcagctgatagcgccgccgccggagctggagcggggaggtcaagaagggctgctcgtggaatcgatgcggcggtacttgagactttcccgactctggagtattcggcggtgaaggggctgaagattggaaaaggcgcgttagagtgcgccgtgtgtttgtgtgagtttgaagacgatgaaacgctgcgtttaatccccaagtgcgatcatgttttccaccccgaatgtattgacgcgtggctagagtcacacaccacttgccccgtttgccgggccaatctcgtacccggacccgacgagtccttgcaccgacccgagttccccacgcaggctgcagacatcgaggctcaaaacgacgccgctggagttgaaccagcagcggaagaaagaacccatgaggaaaaccttccgtcatctgtgtcggctaccgaaccatatgttttggatatgaacaagactttgaatcggaaccgtacacgtggatcacgatcaagcaggataagcagattttttccgcgttctcactcgaccggacactcgttgatccaaccgggcgagaacactgagcggttcactctgaggttaccggccgaagtgagaaaggagataattcaccgtcaattggaacgggccactagcctattggtgttgcctagagaaaatagttcgaggcgtgggtaccgaggcggtggtgaagggagtagcagaggtggccggttcggtaagagggtggaccggttgactaagtcagaccgctggaatttctcgaggagttttttcaatagaatgtcttcgatgaaatctccaaaggtagctgcaaacgatggtgaaggaacctcgtcggaacgaattatcgggccggatgtgccacggagtaactcagtccggccgccggtttaattttaccggtagtttcaaaaattaaatcatttttcgaagaccaaccctcctttttttgtgtacaatgtcaatagtgcttttttttaatttgtttctttgtttttttctcatttttttaatcaatgctaggcttcacaaggccagtgtatatgtaacatgactaatattcagtatttacagatacagttcgccaaaaaaaaataaaaaaaaatttctaataatgcttgactatggctattttattttatataatatgatctttcccgtgtggctgagtgttgaaccaatcttcaacccgttaacaaattaatattaggatattatatcgtattaattcaatgaaaaaatacaggctgttatatgggcgaagatatatactaagaaagaaattatatgttattatgtttgtattatctaatggccgtttttgaccaatggctttgtattataatggatttgcaaagtttaaatttttccttttcgccgtgttaactgagaattgacctattctctgaatgcataagcagaatgaatattattttatttgagtgtctactttgaaacaaggaagcaatatcgacattaaaaacaatttgggtcaaaattcacgatttagtgtatttagtcttttcactccatcattattatagtcttctagaattattggtttttgtcaaagtaaaatattaatacttttaaacacctatacaaaagttatagccgactctgacttataattgtgccatgtttttacctatattacttccccaacaacacttatttttttatgacttgagttttgcatgtggtcctcacctaactacagtttgatatagttctagactatagtatataatactggttcgtaaatatatgtgcatatagttattattgatgcttagtttgtagtggcgtaaaggtaaggactctttagttaactctagtttttccatgcactaaccttatgttccaccacgaatatatgcaagattatagtgcttctctacttttgaattggcataataaaagaaactttcactcaatatatgaaaaataatgtaatctgtcaagtcgccaatattgattccaacaaacgagttttttttttttttgattgaatatatatggctaattaatgatggaatgttcgtctttatctcattcataatttttctctttttttcaagctgtgtgacctttttaaattcaaatacaaatttattgctttcagcaaaaaaaaaaaaaaaatacaaatttattgtctcatatatcac

SEQ ID NO: 299034 - DNA, 1545 bp, Cannabis indica
gtccctcgcacacagggacgaatactggttgtccatgtttgtacattagtaggttatgcagtggaaagtaggaaagaatagagagcattcagcagtgaaaataggcatgtcctcctccttcgtcttctatcttggtttaagtacatatagaacatgttgtctgaaaataggcacaaattaaaaaaaaaaaaaaaaaaaatcagcatccatggtatatacattctactttcatttctataaatatatcaaacaaaggtcaaagattgaaaaagagatacataagtattgaaacttgttgcttaactcaatcaacataggagggggggaccatcaaagtgaacatgaaactagaaagaagaaaagagtaaattttattttcttaggtctttgaagttgtgccacacattgttattagtaaagatgattttttttctattgggtaggccagaaagtacaattatctataccgacaaatattcaaaagagttttcgatcttagctattaatcttgaagggaaaaaaaaagtcaatgttttgacaccctacaaataaagagaataataggaaacgattaagattaaaagaaataaacgtatcatacgtgttcacttgtgagacgttatcattgaccagaaataataattcacaaaattaatataataaggttgaaaaggttaccaagacaacatacaatgatacaaatggagaaaagtaaaaccatcagtaacaagttgtttctttatgacattgctttctctttcttctcttttacttgtttgatgaaattcaatggcagaacacttgtagatgatgatatcaacagactcatcagatgaggccagcaaatgaccaatttcacctttgttttccctctcaaaagggagaaaaaggaaaaggaaaagagtaaaactactagttatattttactgcttagccaaacaagggtcttgaaagggacttgcatttaaatgctactatgacatgggtagggtaggtagggaaaaatacattaaaagaacaactttgatgatatctgctataaaatattgacttcattatattacatacactgagaaacaaaatcttatgaatccttttcatataaatatattattaacaaaggaatcacagttattaattagtgtaaacattgatgcagatcaaataatatttgtagaaattaaaagccatttgatttgtcctagtcatttgttttgaaataatctcaaaaatcacaaccctggatttgttgttaaaacgataatagattatctctaacttctaatcaaagttcctaattgtggtaagactaaaacccccatttttaattccaagaaaaagtgtcactttcacctccttgtatccaaatatgccaaacaatcgaaaacaaaaaataataccagaaaaaaaaaaaatctgcttcagttattaagacatctaaataaatatctggtgctataaacacccaaaagaaagaaaaatagttacaaaagataatcattagtatatcactggccaaaagaaaaaaaaatctagaactagatt

SEQ ID NO: 299035 - DNA, 4500 bp, Cannabis indica
aaaaatatggcatttttaaaaaattaaaattcatttgagctcagaaatgacattcgggctcagccctataacatccgaacccgaccacgcccaacccgcgcatacccgacccgaaacccgccatacccgaccacccgaaaaccgagtttggttatgcatttccaaaacccgaacccgactacccgaaaacccaaaaatctgacccgtgtgcagccctaatcggaagtttacgatgacatagtcgtgagtcaagactcctgataccatgtagagaaatagagcaaggcagagagagacagaaagatggcaaaagctgaattataattgataggacaaagcctttatatacagagtacaaagataataaactaagagaataactaccttaactaccacaacagaattaactaaaaactaactatatcgaaaataacaaaagttaattaatactgtttacactcttatgcctgtcacgaacaggatacaaggaatatcaatggttaagtgaaagaggaattgaaatccgcaaggagggatttcttaagcaaaatggtggccatttgcttcaagaaaaaagctcatataatggaagccaagagaaagcaaagaggagcttcaaagagcaaccaataaccataaacaaataaccaatgttgttttcttagtcaagcacggtatggagcagtctataaagggatgttacccgatggttacaccatagttgctgtgaacaagtcaaaagcaatggatggaaatcagattcaacaattcatcaacgaaatcctcattctatcatagattaaccacggaaacatagtgaaactactcgctattgtttagaagctgggacactcatatcacatccaaaacaaacagcatgaaccaaagttttcgtgggagaacagattaagcattgcatgtaatgttgcaggagctttatcacacatgcacttttcagctttaatgcctacttttcataggaacataaaatctttcaacatacttttggatgaaaagtacaatgcccaaatctcagatttggaacatcaagatcagtgccagaagacaaaacacacttgaccacagcagtacaaggaactttcgagtatttggatccagagtactttcaatcaagcctttacaaacagaagtgatgttcacagtttctatgttacacttgttgagttgctaacactaaaaaacttcattttcttttgcaatagacaaagataagaatcaggtttcgactttctgtcattaaggaatgaaaattatctttccaaaattttagatcctcaagtgacaaaagatgcacttgagaaggatgttgaggcaatggcagagctagcaatgagatgtttgaggttaagcggtaagatcaatggagttagaaggccggagggaaagaaaaagtagagccatggcaatggaggaagaagaaactgaaattttcagagatgaagagaagtactggtgtattaatactaccagttgttataccatacaaaacacaatacaggaccagagtattgatcatacatcaatggtcaatatgtaagatttggcattatatattttctatacattcacgtacctgttaatggtaattgtgaaatatgatttacgattctagcttactggacattgaatgtcggacagtgtacatgttactgctttataagaagtaatatgtaataactattatccatagttttattggaatggtgatttttgttattacatcataatggctcgtgaactttcttccttgctatttatgaaaaattatagaggtaaagaatctagcaaaaacaaataaaaagtaaagttaatgctttttttagcaataaaaataataagtgatgcacatgttccattttcaatttgaagtctgaatacaaatcttttatatgtgtaagggatctcattctctaatccggtagtcaagatacagataatgactcaaatgtctctatatacattcgactatctagtaagtaaggctatttctatctttgagaagattaaactaatcatgaaaacaaattacgactaaaaagccaaattcaattgtcaactacagactgtacatcaaattaatgaaccacttttctacaagttacccaacaaataaaagacagcacctcaaaatcagcttctatggcctggcactacgatcatctgatattgtttcttcagaagatgcatcactgttgataacaatcacttcatctggcttatcagcatgagaagtccttcttggttcagccgtctcatatttctttcccgaaaattggttgggaagatgaccatttcctgacgtctgtaaatggtggtgcatatcacttctccatcccaagtttaactcaaaatatgggcaggcaacatgcatcatttgtgactgaactattggtgaggcaggtggaggcagaggcagtccagtttgcattggtgaagcgaaaattgcctctctcagccagtgagggagattgcccttccctgccatgaaaggtgtcgaataactagctgatgaaggacggtcttttagcatagtgcagctcccaaaacacttcaatggtccctcttcataactttccccttgataatcatgatagagatctgtagttggcctttttacatgctcctgaagatattcagaatcattgttccacacataagatgacttaaatctagacctccatgggatgcagcgttctctatgagtatatacatctccgagtgagagttcagtttcatctgtcatattctctctaaagattcctgtggtaccccgataactgaagctcgaagaaatgccttctgcttttgaaggccgaaactgtggtgcaaaagtgccattcaaaagtttaaattgttcatcttcccactgctctgcaagttcccttgccatcttgcatggttgaaattgcaatcttgggtcccttagcatagcatcccaattgtcccttccatatctccttacaccaatccaaagagaatccaactcttcttcagtccagaaagatgttagtagcttggatttgtccttagaggctctagctttgtttacaatgccatcaagtatcaacttgtgtctgagaatagaggatgaatggcatgatgaagactgaggcagtgcatcctgagaaggttgtctggtttggccatcagagttcaacaagtggacagaagtgtaacaatttttggaggcaaatctagtacttttaggctttgttggcaaggacagacatagaaagggtggagatcttcttttcattctattatttttcatttcagactgaaaatttagtttttcctctgaaaccatacaagcagtttcctcaggctgcataatcatcgactgggaagtgtcgtcggttctttcatctgagaaaagctggtaccaattaaaagaataaatgttaacggatagatactcttttgtttaccaaatcatcagcagtatgaatttagttggcgttaccaaggaatgaaactgagtacctgaagacatttgtttcttgacataaagtcaatagtaagaggagaagatttatcattatcctggaaattggcatttgcttctttttcaaatgtagatgcatctctacgcagatgtgaattgtgcgatctagaattctctgttctctcatttctcacatttgagatttctggagcatgggaagcagcggcatgacttctgctagtggagtccaaagagccccaaaaagtttctgatgcagcatttacagatagcttttgggatttcaagtagacagtatagtccccaatatcacttgaatctaccaaaaaatcacattaaaagtggtagtatttacacagatgctgaagtaaaacagattatgaactaatttaattagttactcaagtatgtgcaatagtgatagctatcataccagtaggagcaatagacaggtccgggagaggatgaagtcctccttctgtttcttttgaacccttagttaagattgtcagagcttctctttcacatatatggtccttttctggttgtttacctgcacttacattcttattcaaggatgagtcttcagcagcattgtgcaaacagctttccaagcaatccataggaggatcttgaaagtcagctgcaatctggttgatttggtcaagaactttttcagcttcatgcaagacaaccttggttgtattttttctctcattcaatttttctttctctggaatcaaactgttcagaatcaacagcaagcaattacagaacttgaatttcaagttttaattctaagcttctaagctctgagggacttacacttctgtctctagaacaagtctagcatgtccacttgtagaatcaacctccagcacctgtcacaataccaacaaggttgaaggttaccgattattgagactgtaatcaaaacataaaccacaaacctattacaaaaatctgaccatgtcaaatgttgagtaaacgattatttaagagagagagagagagag

SEQ ID NO: 299036 - DNA, 4056 bp, Cannabis indica
cctaatcaattatatttgagagactaatataaaggccatgtgatcaccaaaattatctttttatctttctattaatgcatctgagtattcagcaaaaaaaaagtaccaaaaacagacacaagacaatatactctgagtgggatattttagagaatccttgaaaatgagagcacacaaccatttttatattgtaatgattaaacttatattcatctttaattatcattattattattattactaccttaaatgggtgaagaagtcccatgcagatttggactctacgcctctgcccatctgatactttatgcattttccatttcaggtcaatatcaagtagctcaatcaatttgtctcttctaacaggatcactcccttcaactgtcaatttatttagattaaaaaggaacagagttaaatcattaaatgggttattttagaaaagctggctaatcacaaagggttgtcttatttattcattcataatctcaattttttgaaaagggtttagcatcaaattcagaaaagagaaagaaattaattatagaaagcaacaaattaacttacctccaaatatcatatgctcagcagagaagtctccttggagtggaatttctccctgaaagagtaaagaaataacaactttaactataatgaatgtatgtgttttaagactaagtcatttgaaagaataaatttatgtaattaaggtggtgtttgtttgatttggatgaatgaaaatataagaaaaaaatgggaacaagaatgtgataaaattaaatttaaaatgcataaaaaaattgataaaaagattattaaattttttctcattttgcattagaatggtcattccttcgatttcaaaatggaatagtcatttcaccaaaatgatagaaaaattattctattagaatgatatttcaatacttcaaaatgcaacaaaacaaaggattgaaataaaaattattttctttccattccatttcattgccttcaattaaacatcacctaagtgaattaaacagtaaactattatatcttaaaggaaaaaaaagaaggtaattatttggtactttaatttatcgaaatgaaaatttagtactttatattttcaacaatacgtattgactttaagttgtacatatttagtaatttatactcacatttgatcaatattgattaaaaagacttcagtcatgtaagttttaaattcatattttatatttaataatttaatcatattgatcaactttgttgataaacacaaaatatttccccaaaaaaaagatagaaaacagttcacaacaatacttagctgcatcaaatgtcacctttcaatagaattattagcaaaccaacttatctaaattacaataaacgactctaaaacagacctaaaaccatacaaaccaaccctaatacaattgcaaatttcacataatcatgttgttaatgttagtttggcatattacactgcctcaatggggaactatgtttatcaaaacagagcaagcaaataacatgaaatttacacattaaaaagtagcttgcacacattctacaacaagcataaatgtcctttttttcatgctagtataattgttccaaaacttaacacaaagaattgaaagaaaagaattaaaaaaacaatgcgaaaatgctctgcatgcatccctgacgaaaacatcctcctgagtcacgtggcaatacggaatttatcgataggatagagtcgtcgggaggttgcttactctcatggatgtatagcattgctcatagtcataacattaagaaaaatgctaaaagtaactattggtttctagcactactataagaaattcaattgatgtaactaaatatgagtctaataactattatatctcgacactagtggtgctaatagcattgctctcgactctcctgtgactgcttactctcaaagagatatacataacattactcattacaacatcacgagaaattctgttagtgtaatgtaattaagtatccgatgagaatcatggatttcatctcaaaaccaattgataaaactaattagtgatgagtggataatgttctccaatagtatccatttaacataattataacttaataactattacaaaatgtcaaaatttggataaatgtgagtgagtatacgataacatgcatggcattttatctcaaaaaattaatttgtaatagaggagtagccataaattttatatataggattatattttcacttattaacaatgtgagacaaaaaaaaatcactaaaaaccactaatagcaaataatgtgagactctcacctcgctcatagcaatgctcaaagcaattatgatgaaattgaaaaacaaaaagcaaatttcatatagaaatttaaaaaaactcacagcagagccaacggttttactccaagatccacccaaataagccaaatcaccgctacaaaccaaattggtatcgtgaaaagccgaacgattcaaaacctgcacaacatctttacctccaaccatatgcttaccacccaaaatcttcaaaaacgttgttttccctgccacaacagtttttatttttcttttcaatttctcgggaaacaaacagaacacgaaagaaaagaaagtaattttgattgccaccacttaccagatccattggctccaaccaataaacatcgagatccaggcttaatatcgagatcgaaattgacgaagagcggaggttgtccatcgtagctgaattgcaacccacaaacctcaatcccaccgccaccgttcgaactctcatccgccatagctgagtatagctcgaagaagaagctctctcgtgtttcatttcgtttcgttctcctctactttatgtactttttcctaaaccaacacccagccaatcaaattcgaacacgtggaaagttggtagctttattaaacttcgagcgttgaacgagtccatgtggttgattctcaaccagccacgtaagctgaagacattgattgcttgggcaagaagccacgtcgtccctgtcaaattggaggttggtgtaggttagttatcgtacaccttcgttctcttaaataatttttacttattaagattattgtcccaaattctgatacatattaaataatgtctttcaaacttttaaggttattaaaatttttcttaaactatttaaattatttaaatttaggaacttttatcactttttagtaaaaaaaatctaatatatataaaaattcaaataatataatttggtagttcaaaaaatatgatttaatagatattaaagtggggagcatcgttcagtatatataaaattactaaaaataattaaattggacaaaaatttataaatctaaccatattaatagttcataaagaatttttaatggctaaaaaaatttaaagatatgatttaaaacatgtgatatgaaagtttaagaggcaaatattctaattagccaataataaatacgaaataaaagtttgtgtaaatactattttgacctttatattttttaaaatttattgattagactttttattttattaaatgataaattaaattttgtattttttaaaatagtacattttgttaaaataagagttaataataatccgatttagagttattataataaatttaggtacattttctataattgtttatattaaaaattatattcaagtagttatattaaaataaattattaaaaattaagttttaaatattttataccattttaaaaaataaatagtctaatttattattttataaaataaaagatcctattaataattttttgtaaaaaagaggtgaaaaatagtattaaccctttttcttagtctaaatactaaaacccgccaaagaaagcgagggacccaaaccaaagccctcgccttcgataagctcgattcttcaaattgatcgaattgagtttaaattttgacctaacaatggagacgtggatgaatttcaaccctagctgattcaagtttctagtttcggtaacttttgaaatttgttgttttcaattcttttttttttttt

SEQ ID NO: 299037 - DNA, 6726 bp, Cannabis indica
gttaaataacgggaaaaaaagaatgggagataaaaaattagtatccacaagtctcccccttagtcaaacttatataaatttttgtgaaaatataccaatacaggggtagattttattttatataaacttttaagtcggagacttggggttagcattcttttttatttttattttgaaaattctgttaaaaaataagaggcaaaatagtttttatagttttcgaaaaataaagtgtatgattgatatattttctaaaaatagtttttgaaatcttcaataacattaattaataaaaatattgaatgattaaaattttaaaagttcctttcaaaaaaaaaaaaattttaaaagtttgtaataaataatgagatataattcgaaaaaaaaaaagtcatgaaagaaaacaacttttgttcttaaaaaattcaatttttcgtaattttatttttaaaattattcctaaaattattaatgttaacaaatagttttagttttttttaacagaaaaaaaaaacgaattgaccaaattaaatttaggagtagattttagtaataacaagaaatgtgaagattttgtacttgatcattttcaaaagctcatagcctatttacaatttttgttcccgaattttgttactgtcaaatcatcgattaaaaaattcttctaaattattctgtgatgaaatataaaattttaatttgttaaattctattccatagctaacaaaatattcactaccgcataaaaattaaaaagtaatctcttcctcaaagaaatatatataacatatttcataataagacaagtacatttgtttgaacccgaaaaaacaaaccaatgaagatattcgacaatagtcaataacaggtatatggtcaacagtattgtggaagcattttgtatatgaccaaaggaaacccccaaaagaagcctaaatatactactatacatttatcatatgtactgatggggttcatcacttcacttatacactaaattgaaatccaaaacatgtacaagtatttaaaaacccaatattatcattttaccaattaatactcgatcgacaaagaatttcaactattgttaatgatctctaatctttcaaatacagttgaggttaaatgaatataggttacacgccggcattaaataattaaaggatctcacattcccaccccagatcatctcatcacaataattaccttaattttatgttagaaaaagttaatatttgtatatttatggacaagatttacgtggctaatttataatcttaacaaatatgataaataaatagtaatatttgtataattgcgcacttggattaattatctcatgtatagttgaatctttgtcacaaagcactaggttaactattaaaagtatcaaatgatcggcatatagtagttaatttgtgaaggtttgtgggtggctttgggttatgactttattaacttgacaatttggttatacttttcaattaagaccttgaatatattgaaggcgtaatgaaagtgacaccatatgtatatataaaagtgatagatggtttcattggcatgtgattgtcataaatggatttgaacaaaaatatcacttcatgaatagactagatttagatcccgaatttcagcctctacacaggagactattacggtagggattggataaaatacttatgaataaagatagtaatttataaccttcgatttaattcaatgactcaaattaactcttgaaaactacaccataattaatatatttatttatttataattatctttgaatattaatattaattataaatttaactaacaaaactctaaacctaactccaaaccgtaacgtctactaaaaatttaatttttttttattaaaaagaaaattcattaatcaactgagcaaatacaccttcaaagctctctttaacaaactaaagagccagcaacaacaacaaattaattacattgaatcttgttgacaaataatctctcctgtctagacaattttctattttttacaagatgtaatatatacaaaacaatgcttttcacctcagcaactatagacacatcagttctagaacaattgtcaaaaatgcatctattcctgttcaatcaaataccatagcacacaacagcaagaatggcaatatgaattcttcttatcagactataattgttcaaaattagccaagctttccaatctatatacctgatcggccaagtattattccccagccattcaaaggttcggtccaccacccttcgagagaaggcacagttgaaaaagaggtagtcatgtgattccaacagatcttcacaaacatgacaattccgtgactcaagagggatatgaaacttacttaagttgtcacgagtgagaaggtgagaagtcacaattttaccagagaataaaccgatgctttggcaaactcaaaaagctccatatggctttactagctataagggtccctgttctgaatcagaagactattataaagaatggcagctttaaacttaccattcttaccagccctcataatcgcatccctcaaaaacttcgatctcagccagcataactttttccagtaccagctagtttcaggtttttggttgtaggactaagaaagattcatctttgaggtaaattaggttcacccatttaacccaaagaagatcctttttctccatgatagcccacacatactttgaaatcatagcatgattccactaagatccttccttaaaaccgatgccaccataagacttaggaaggcaaactttctttcaagggatcatgtgcattttgctcctatcacctttacttccccaaagaaaccctctgcataatttttccacttccttagtaacactttgagggagtataaaaatgctcatccagtaactcttagaggccaagtaagtactgtgtgaatcaattgagctctaccggcaaaagataggtgtcttgttgcccaattatgcagcctctgtttgattttggtaatgataatcccacagtcttctatcttccattttttgggtctcaagggcaccccaagatactttagaggaaaatccctctcaatgagagatatatcccctaaaatatcagcttattctctactatctaccccaccaaagtagacatgagatttttgagtattaatgaatagccctgtagttgtacggaaatcatccaaaactgctttgataatacgtaaagactgtctcgttcccttgctcaatattatcaaatcatccgcaaaacacaagttaacaagctttagacttttgcataaggggtgatacctgtagttagagtcatgagcagcttgttgtaaaagccgagtaaggtactccatgattagaacaaataatcgaggagaaatggggtctccttgttgaagacctttagcccctttgaagctaccctgcacacggccattcataagtaacgagtaggaagtattcctaacacaaatcatgactctattgacaaaagtccttggcaaattgaaggcattaagcagatcctcaagaaaatcccagtcgaccgtgtcataagccttgctaatgtctatttttagagcacatctaggtgaggtattcttccttctataattcttcaacacatcttgaagaatcatcacattatgaccaatgaacctcctttgaacaaaggcccttggttttggttgataatgctaggcagaaccatagccaatctattacacatgagcttagagatgcatttgtataaagttgtgcaaccagcaattggcctataaccagccgccttagaaggattatcaactttaggaatgagagatatcattgtgctatgcaattccaaggggatattacctgaagtaaagaactcattaactgctccacaaatttcaacacctatattagtccaaacttccttgaaaaaactagagccataaccatccggacctggcgatttcgagtcagggatactaaaaagagcctttttatctccttgcaagtgaaaggtttcaacatagcaagttgttgatcaacagtcacaagagctccgaacttcaaacaattcttattgatacacgtcaaggtcttgctactgctccccataaagcctttgaaatgatctacaaaatgcttcacaacttcatgaaaatgatcattagtaatactattgtcagtagtaaaagacacaatcctgttttcatttttcctttttttgagacaagcatgaaagtaagaggtattagcatccccctttcttagccaagtgatgactttacttctctgtttgagaaagctaaaatagcacttctcatagtcatgaaatatggcagcaagcttcggattgttggtagtgtaggtcattagaatgagattgagcaagatgccgagcttttacataccttgactgagcttcatggtaatgtttgccaatatcccccaccttgtcatgattaaatttctttaacaggtgcttaagtctcattaacttcagataaacacccctcaaaccttttgcagacaaaggtttattccaactttggatgacaacttccttaaaatcatgatgatcggcccagaaattgtaatacctgaacggtttaaagcctatctcacaggtagcagcagcagtgatgatgcaggagcaatggtccgaaattaattcccagttaaacaaggctgaagtgtttgggaaaatatcactccaatcctcattcacaaaaacatgatctactttcgaataaatctgctttaacccctcttgcttgtttgtccaagtgtacaccgagccttctctctttaaaacatcaacatgagcttgagcaaacaaattattaggatcagcaagttcagtttgggttataggatttcctccaattctatccccaaaattaatgacagagttgaagtcccctaatagaacccaaggcttgactgggcgtttcaagatagataggctagaccataaagttttcctttcttcaatgttaataaatccatacacgaaagtagcacaaaaagcatgttggcgacctgccattttaacaaagaagtgcaccaactgaggtgtttcagcaataacaatcactttcacatactgtcttctccacaaaatcaaaatcctgccttcaatggtgggacttgaaaagtaatcccaataaaaaatttattatccatcatatttcgcatcttctcacccctaagctttgtctcaacaagagcaacaattcctattttattcttactgcaaaaatcaacagagtcttgcttttctattttattaattcctctaatgttccaactagcaacactgtaattctccattaagattaataacatcaaggtcaatattctcctttgagacctccttcattaatctagatggctcctgtaatgcactaaacgagtttccagtaaaagcaatattatcctgttttattttgatatttggctctttttttttgtcattaaagaccatctaggagtctgccaactatcatccacattagtaacaccattaacaacagttttagcagttacctaaacatcttgcataggcttttcaatctgaacttgctgtttttcccactgtggcagcccttgttctgcactttttttgccaccttccccttctttcctcttcacctcagcatctcctttgcgatagttagcagaaatgtgcccgaagccttgataatttttgcactttacaggtaaccattcatagtctaccgcttattcaacaagttgcccaaactcattcagatattgtattgactttggaggagaatctgtgatgtccatttcaaccaagatcctggcaaattggattctcgatctgtctttagtatatttgtctaccattataggttttccaatagtactaaccagggcactcaagctattatcccccaatattgaaggccaaggtcatgtaaacgaatcaagagagggactgactttaccaatttcacagtgttcaaatccgtagtccatggtcgaacaattactagttttcgatcaaactgaatcaccccattctccaaaacctgatccttagtagcctcatcgttgaaccggaccatagtcaggccttttgccattcttgcaatctgaacgattcaaaggtgcccccaaacacgcttaatgaatccttcgaacacagtgagaggtggattggcacctaataccatacagataacagctgaattctagcaagctgcttgttcctgaacctcattaatatcaacttgagcaattttgatgccattcttgatcattggttccatgtacgtaagcttcagaccacgataggaagtgtgctccttcaccagcgcactccaatgactcttagccgaagcttcaaacgtcccttgattgatcactagttcctcatcttccacattttgtgcccaactaccagttagtcgctcttcgataggaatctcactcccagatgcaaattcttggatcgccacctcatgccctaattttccaatttctgcaatttcagccataagactcaatccatcgaacctagacgattctcccgttgcaatctccttgtcaatcggttcagtatcttgaataaaaggctttcggatagttctcttcttcttcgccatggaagagagaagaacagagtcgcgcatgcccttaaatttaattttaactatatatattttttaattttaaatttataatatttta

SEQ ID NO: 299038 - DNA, 2691 bp, Cannabis indica
tatccaatctaattctaatttttaggccagtgtaatccaattgaacatatcaccttattgggttaaaatagccttaattcccaaatagaatgggattaaattggtaggttgggatatctttgtccaatcccaaacttaaaaaatgtgtcaaacataagtttggactaaattgtccaatcccatgaggattaagttctatcttgatttattgacttagtaataggaaactctggctgtacatgttttagaagatgatgtctgttgtaatttttttttttttcctttttgggagatattcagttttaaacaatttctttagtacaaaacaaaatttgagatacatgcggctgcagagtaaataatccataaaacatacagaaactttccataggttaacataagagcttaatgaacagaagtttactcaagtcaaatcaaataagattaaagtagcaccaaaggaccatcttatggtgcattgcatgaattattttgttcgtaaaaataaaacattaaagatatgaagagttctatagcaaaaataatcagcaggaaggagctgataaaaaagaaggcctacataattgaatgtagagaactgatgcctggcaagacatttcactcagcattgcaattctctgcttcagtactaatcttgttacttgcaatttcatcgttaactacttctaaatccggatagttcctgtggttgagagagtgcaaccatagagccaccacaccttctttctgctcagtcaatgcaatatgagcgtatatatgcttcattttaaaggctaacgcctcttgttcatactctttcatcgatagctcttcatgagtgtctttccacttttggttatatgatgtaaagaaacactcatccaagtacaacccaacttcaggggcagttggcacagtcatgttaacatccttttgcagggccttctctatcaatgactccggagcacagttcctcatcactgcaacagcaagcccaatcagcttccttatctgatgaagcatgaagctctgtcccaccacctcacacttcaaattccatgccttcaactgttactacggtgtcagcattgaacgaaatgatgaagcgccaagctgcagggtctacggcttttgttctggtggtaaagttatggaagttatgagtccccacataatagttcagaattctattaaacctttctttctcattctcaccataagagaaattagtagtgtcttttgcagcattaccctcgttcgaatccaagactccatcttgaaccttgttgctttcagcattctcatattcaggtttaatttcgcctatctgctccgaacttggatcactggcattaccatttgctgaagaaatgccagcattctcagtgttcgacgaaatgtccaggtcaaaacgcgaaccacttaattcataactacgcttgcccattaaaccaacaaccttacgccccctctcagagcattcatggcacttgaagagctcattcccagaacccaaactagccattacgctctccctattaggatgcgaatttggatcaagagcaaacaccggaataagatacacataccttctccgatcgcagaactttttggcgttaaacgaacccgtcacacgcttgtacccaaatatccgaatctgcggggaaagattagcattcaggcggtcgacaaagcctggtgggtccacgtagaaacggccagagaccacttgccccacagcgctgacgcccttatcggtacgggccgaccgagcccaatcatagcgttggggtttgttacgatcatgttccggaacggcgccggcatgatagagtccttcctcaagatcaccctcgatggttttcgcacctgggtttttctgcataccttgatatccaacaccgcaatatgcaaagaaaattgcaacctttcgtcgcttgtatctcggtttcttggtctcttcgcctgtagcggcggcggctgtagtagtgtgttcgttggtcgtcgtggacatcttgagctttttggagtctggttcttgttccggaggtggtggtggatttattgttgtttctgtattggggttttccattaaaagcaatgtatgaagaagagcttataaagttgatatactccgttcaaggtctatgcctgttgcaatgaaaacctgcaaattttcaaaaaagaagaaaaattaaaaccctgcaaatgttcttatcttggttcaaattgaaaattaaaaacttacattctatattacattctcttttgaattctatcaaatcaattgttgacacatgtattttactaataatttataatataaaatcaattaaatatcaattgttgttttgtcctacatggagaaccgtaattaagaaaactttgggtatgaaattctaggtagcgttgtgtctgtacgttttagtgatgtttacatcattttgatgaactccgaggtctgaggagacttgaatttttttaatcttaattgaaaaacggaagaaacagaacctgaccttttctttgaaatagaatgacacacagttctcaaatgttattcatgatttctgggatttgcttaaaagttaaaacccatgtattggagttggaacttttctgttattgtttgtacaattcttttgagacaaaattccaaagttaagacacacacagatatatatatatata

SEQ ID NO: 299039 - DNA, 3091 bp, Cannabis indica
ttcatagaatagtacatatttatatacaaagctaggagactaggaaataggaaactaccaacaaaataggaaactactaaatacaagttaccctaattcttttacacctaatatacagctaattctctaacaatatgaaacaaaaaaagtatctcaaaataaaatatgataagagatcatttaaagttacatccacaagtgccaaccattacttagcactgaaaaaaataattctacacctaatatttcactctattcaataaagaagacacttcactctattcaataaaaaagagaaatcattctttcaatcctaaaagatccgattcttcctctagactctatctagccatacagaccccaaaattgtgataatagttgcgtcaaacacttccgcttgctcctagtatcccccaatcatggccatccatcttgagtgtgatatcccagccacaagcaaaccattaatatgatacatcaaattcttgtaacattcttgactaatagacattaacaaatgagcagtgtaaaagatatattgttgctagcctcaaaactatttttgctcagagaacaaccatttggagacttatacagaaaaggtttcctataagcattcccaatgccaacaatcacccaaacatctcacctttgaagggacataagatttccaaatagaagaaaaaggttttaaatgacttgaactttccaccatgtgaggacaactggatttagactttcctaagaatatctctacacttccttcaaatcatgttcacaacagaggtacaagtacaactagtagatgagtctaataccatgactaactctgttatcagttgataattcccttcagttatctgttgcaattcccttatattaaggtttctaaagaacctaagtcccgagaaaattcctgctctcacccacttctcatttattcttaagttagctatggtagcattgggagtttgggagaatgaacaaccctgtacagtagtaatgggaactttatgcaaaagtaacttctctgacctaagtatattcccaaaattgaaaagcttgtttgtttcaaagcttgactatgatctgctcaaaaaaattcctctcatccagctgagaagaacttccacaagcttctataagttagtgtagagctcataaacgtatgccacccattttctgctagcccatatttgcttttaaatactatgaccttattctttttaagaggaaactaccatagatacttcattagtaatttgttgtgtttcgaaactttaccaattacctaaccctccaatctccttagatagtgaacgttagtatctcttattaagtcagtgaacagtgaggttattagctagcttttattcttaaatagtctagtaacaataaatgaaaacaattcctaggagcatctcaacaaggaagatgagaggaacactaacctataattattcagttgaagaagaatgccaagacccaacagcaattgaaacccaagaaaacaaattccttgaaagggtgtgatgataccgcttgcgactggcctcaactttgtacgctctacctacattatagagttcatattaccttgctaaacttcctgtgtgtgtgtgtgtgtgaaaatatgacaattgcaataacagcaaaaacaaaaagaaattgacaataaacaaaactgcacatacttgatagatcagaagaagaggaatttaccattgtatcaatatctcgatcgagaagatcgttaatggtacatccagcaccccgtagaagcaaagccccacatccaaataatgtcatcatcttgatatcaggaagatgtccagggtttgctgccaaactaattgacctagagaataagaaaaattgacaaacttcagagaaatgaaaacggcagactggaataatcctgggcagaggcaatgcctaattcaagagaaagggtgctaatcggcacaattgtattctatcatagttatcatcttgttttgtctataataatcatttttgttgaagtacgagtctttcccattataagaaacaaaagactatatgaactggtggaattatggaaaagaattgagcatagttccaaccacacgagtagacattacaaattagagaacatcatgagaaattagcagagtaaataattgaagctaatagtaatacaagacacaatccaatttcacacctttgcttaaacacagctaatagtttcatttcatttcaacatgtcatagagcggcacaagaacacagcagtttattaattacattccagttatctgcttcccccattttcacaaatgaagtaaataaccaaaaaaaaaggctaatacagaataagcccataccacatacaaggccaagcgagcaaccatgtcccaatgggcttatcaagccgagcaagtcgaacgtagggacgaatctgtctgggcaagtacaagtcaatccaagatacatcagctacctgggcatcgcggctccgattctcgtcgcttttaccggcggtagaaatgtggctgacgtaaccgagtctgacttcagagacagagacccattcccggccatggctttgattaggaacagtaaagaggcgagggatagggctacggttagaggtgactatatagttatgagaatgagagacagaaaagagagtgagtgaggaagagggtttgaggaacctcctagtggtactacgtgagatgcgagggagccacaacgcaatagccatgattgggagagctgaaatgcatattcatgtgaggtgcttcaatggagtctggagtagtattgcagaaaccttttgatagaaaatgcacctcagttacccatctaaaaagagtgagaaatttgaatttatttgcattaggactcatcattgatcggtttagtcggtttttttctatataaaaatctaaatttcggttttcgatctggattggtgaaattcgaaaaccgaccgaccattccagaacctatattaaaactgacagttttgaacctcgtttagtcagtttaaactgcctaaaccgaactttttctttaaacaagtatatgatctaatttattctata

SEQ ID NO: 299040 - DNA, 4838 bp, Cannabis indica
aaggttaggaagggattgagctcgcagaattgaggtctacggagatccctaaaacgcaggttgaccttggatacaatccatttcgacccatttcggagaactcgttctcggcctcatccgggtccgaaaagggatcatcaggttcgggtgagtttgggattggtaagagtggtaatgacgcatttgtgtttggagcggacaagagtgattcgagaatttatgttgcaggctttaaaaaaagtatggtggatgaacttaagaacatgaagattggtagttgagtttagtattagaaaagatgatgttctgattcaagttcaagtgttagagctggttataacaaagtacaaagttgatgaaagcattatatctaagcttccggaagatttgaaaaagttggacattggaggttctggggatgaaaggtttggccaggattccagtagtagtatggacatgaggcttcctgaagatatgaggaagttgcacattgaagaccttggccatgagaaacaagctgagaaagttggaagtgaaaggcttaatgtaagtggaaatgagaatgtcaggtttggatatgggagtagtgacagtgctggtggttctgttaacaaaaatatagagtttgaacttcgaaatgagttgaacaagaagttgaatattaaagaagaaactggtaagcctgatggtggtagtgtcagatataatgcagatgatatggagaagtttgaatttggtagtagaatgggtattgatccattggcttctacactttctgatcagataaataatttgaacttaaaggagtctctgaacaccaatgacacagagaatcctgattttctaagttgtaaagataagggtagtgattatgatggaagaaaaccaacttttttctcagcaaacatggaggaagaaaagggtagcaggactggatattttggtggcatgttatttcataaacttgataagactgaacataatgattcaatcattcataccagaatgcatggtaagagtgtgagtggaagttcgggccaaccaaaaaatgaaatcaaaatgagtggaggtattgcctcatcatcgtcttcattctcatctagcagcagtcctgctcaaacagccacgaacaactttgaagtgccttctatgaatacacctgaaaagaagaatgaatttatctttactagcgcacgggaaggttttgggacaccctcttttgaatttaaaaccccaacaaatctattttctgggatgaatgagaacttggaatttagtgcaaagagggaatccattagagacacagtaatgaagaaaaagagtggcaaatcgaaacgtccaacgaaagtccagctatggctcgggcaggattttgtctctagagaaagcatttcccaggaaattcctgaagcttctgactcctattcgccaatggatgtttctccatatcaggagatattggctgatcatcgatgttctagagagaattctgtgacttctgatgatactttcagtgttgataattctatgggaactgattcagtacaaaaagtgtcaaacgatgccattgacgaagatttggccatggcaacagaacgtatgaatataaatgaagggaatgtaccatctggagaaacaaaagaggaaagctttgataataatgttagtgccgaaggcacccttgaagattgtgtttctggggctgaaactgaaagctttaagtctgcaactgaggaggtagactttattggtgataacacagttactgaaactgaagccagctctagttcaaatattgagggatatgacaatgatggcaggacaaaatttggtattccctctagttctgaaggtttaggtggctctaacttcaccttttccgcagcttctgctgctcaaggtcaatcatcctcttcaaaacgtctccttaaaaaaaaaaactggctcaaagctgatacagacagtacaactccaaatgctaagatttcctatgcaacatcctcttcgcaatatattccattctctgcagcacgaggtacgaaaggagactcaactatcctgcaacggaaaagtagagagagttccgaggtaggtagagctcaggctgtcaaccaagagtctgaatctacctctgctgttaaagctcaggaagcttgcgagaagtggcgactaaggttagagtcatatcttaatgttttcagttggtaaatgttaataatagctgatattttcttgtatttctttcatatttccttttgaagcatctttgatgttggcatgtgggcactaacagatctttaaatgtagcattaggaatggtttatgtatccctgcttttaagagtcttccttttttgtcatatatatgatataaatcagaggaaaccaagcatatacaactggggatctgtctaaagctgaggattgttacacacaaggaatgaattgcatctctagaaatgaggcgtctaggagctgtctcagggcattgatgctctgctatagcaatcgtgcagcaacacgcatatctcttggaagaatgagagatgcacttgtagactgtacgatggctgctgaaatagatccaagccttctcagggtgcaagttagagctgcaaagtgagtttttgaattttgctgtcgtctataatattttggccattcattattttttatgactttatagtgttttatgtgatttcatcagttacatacatcggtctgtttacatgtttgattatgcattgtttggttgtaattttgtaaattaaatatatcatggcaccaatcttttgctagatagtctttcagtctgttttgttatttatatcttcctttgttgaatttattggtcttctggtgtgatgcatagttcaacttttttttcatttcacgaggcaccgaaaaatgagaaataaatatgatgtttccataatctatgattttgatttttgaagttgttatcttgcgcttggggaagttgaaggcgcttcacggcatttcaggatgtgtctgcaagctggaagtgatgtgtgtgtagaccgaaagattgcaatagaagcttctgatggcttacagaaggttcaggtacagtaatttgtttatgtttgtacttggtatacagtgatgtacatgtatccattttcatgtagatacctgtatttaatgttatttagtcttatgtaacattatttcagaatgttttagattgttatctttgctgaagtttgttagtctaaattttctggtgtgattgcataattatgcaaaaaaaataaagtgaagttgtaccagtgttttgtatctttacatgtctgtacgctgtggctattatgagaagcttgatgctatatactctgtcatatgtgttttttcctcttctctctgttctgctcctattaactattgccttaaactaacttgtgtaccgtgattggctgacagaaagtctctcaatgcatggagcaattggctgaacttttgcacaggaaaacatttagtgatgcaaagagcgctttggaattaattgccgaggctctaaaactaagtccatattgtgaaaaatttcttgaaatgaaagccgaatctctttacttggtttgtgcttctctgttttcacacacactcacacataaattattggtttttaagcatttactagttttggaatgatctttgataattacggggtaacttctgtgtcttattagcagattcgtagatatgaagaagtgattgagctatgtgagcaaaccattgtttctgctgaaaggaactctcctccagtagatactcttgaccagtctgcggatatggatgtttccaaactttccaagtacttctactttcgtatttggcggtgtcatcttgctttcaaatcctattttcatttgggaaggcttgaggatggtcttgcctcattagaaaaacaagaggaaaagctgtcagctacatacaggtaacttccaacccatgcttgaacttcatttaaatttcattgttgtggaggtcagactcagggttactgtttgtaatttctcatgctaattgtactgtccaggaatgaaagcaaaatattggaatcatcaatacccctcactgccactgtgcgtgagctcctgcgtcataaggtatattatctatatccatgcgtatcatatctctactatatagttacacacgtatgcatttaatagcttaaagcatagcagtaatctcaaagaggtcaaattaattgtcttccatttactgacaatatgttaacttactttggtacagaatgcagggaacgaagcatttcaggctggaaggcatgcagaagctgttgaacgctatactgctgctttgtcatgcaatgtagaatcacgtcctttttcggctgtatgtttctgcaatcgtgctgctgcctacaaagcactgggtcaaattactgatgctattgcagattgcagcttagctatagctcttgacggaaaatatgtgaaggtattcttcttaaccgatttcatcagttcctcttcatgtttcttccatgcgccatgtttaatgagagactgtcagtggagtggtggtatgaataaagtttataggagttttatactagagactgattggacgtttggttggatgcggtttgcacatgctcatgttttcctgacattgcaaggcttgatggcggctccatcttcgaagttgaagttgataatcataagtgaaagtggactttttttatgtcacttggcaaaatagcattcttttgatttataaatttatatatttttatatttatatatatatattcatctttttttttttgtaaaatggcctccagccagggtg

SEQ ID NO: 299041 - DNA, 5858 bp, Cannabis indica
gtgatacataaatatatattatttttttatttgtaccataatggtaattttataaaacaaaaaatattttaaaaaagtaatggatattttggtcaaaataataaaaatttcattttattctatactataccaattatcacaattcttatttattgattccatagtctttaacaaacaaaataatagaaattccattgcattctattcctatttctaccaccaaatttaatgtgttatttatagatgcttttaacatctcaatcaaacttcggacttttaaaacaaaaatgaaaaatggaggtagtatgcttcagtgactgttgtacgataggattgaaatgctacccgcatttatgacagttcagttttggggaaaatgagaaaataataatttatatttttaaaataagaaatgcccaaaacggttaaactacactcgcgtgactctggtctttgttcccattattacatcattccgtgcgatcatggagaatggctagaagctacgctctctttctctatacaaataaattcatgtcttcttccacaatcatcaatctgatcacacccactccctcctcactattactattcactctcattgtatgatataaaaatatatatataaatacacacatatcaacagttcaccaccactctggtgctttttcgttgcattttcctctgacttctcttctcctcctggtaatgcgttcatcatctcaacctcttctttttttccttttctatgtttttctaccattttgtttggttacagagaaaatagaaatggaaatgtaatggaaggtttgttgtaatggatagtagaaaactatatataagtttatagtctaatggctttgtgtagtttgtcaccattaagaagaaagttcaagagttaatattatgtttttgagagttgctagttagttcaggtgattaatgagatttttaggagctcttgtaaatagttgtgtttatttaatctattttgaagaagttttgacattgttgtagacatgggtatagttagaggactacctgatcaaaacttttagtattattattattgtttatttcttgtttgattttagggttttctttgattaactgtttcataagttttatgatttcgggttctttgtatttctctgtatgctttatagttgtcaatggcgtcctcagatgaagagggtgagatattgccaaactgtgtcacagattacctctttgttaatgataaggaagagcttgtttcgtttactacgttgccactccaatggagtccaaatgagagtctggttgagtcagataaagaggttttcttgcttgccagtgttgatgatggtcttcaaaaaatttacaagagggttgtggcttggaggtttgacctctcttttttgcaacctgagatttatgtgctttccaaggacaagaactggatagtgctccaaaggccaaggaagtgttttgaaaatacgatcaggacaatgctggtcaccattcattggcttcattttctgaagaagaatcccgctgcatccaggaaatttgtttggaactacttgcttaaagttcttaggtctgcgttttatacggtttatgtgattttctctgtgcttttttacttgttcttataagcccgtggttcttgcagctcatttgaggttaaaccttgtgagaatgatctgtttgccaactttttatttatcggtgaagttgtcaaaagggacaaagatttagccaaaattgaggttagctgtttagctgtttactatacctgttttagttagatttccctttcattaaaagctgagaatgatattaacgtgttactgatccaatgagattaggccgtactgtcattgaattattatgactgtagatatcaagctcaaaagcatttagttcggatgagtattattctgaagaaccacctatttcacgggaaatacttctgttttttttttccttggtctttcatttggtgctggtgatgcatgcattgctatctaccttaattattctagttaattggcttaacttgtgtaaaagtttgtaataatgttatcataaggaattagcttataatttcttgttctgactatgtagcatgatctgcatacctatattgcaaacccgagtaaaaatggagcttttccggaggttagttctcggggattattttggtgttttgtatattatatggaaaaaccttttcgctctatatcggtgaacccaatgtttgatttagcaggacgagcaaataagaaataaatcaaagctcatagttgatatggatgacgatatcattggtgacgatggtgaatgttttgatggagatagtggattatatgatcatgtttgcgcaatctgtgacaatggtggtcaaatactgaggtgatttatcatgtttaatcttgcattgtttttatttgcagcatcttcttacaggattttttttcctgtgatctttgtttagattcctgaaagtattgttatattgcctgattcagccttcgggtgactcaacatcaaccataattttttcttctccacatttagttttcttcttagatttaattgcaagtttcatacagctgtcaagggaggtgcatgcgatcctttcatgcaaccagagatgctcctggtggcgaaaattgcccttctcttggatataatgattctcaagttaacgtaagttttccatatggtttcaatcaatgcattcaaaatgcttttatctttcacttttatgactccagtttacaagtgcttgcgctagtaacagtgcttaaacatatgcaggcaattccaacatttttgtgtgcaaattgtaagtaccagcagcaccaatgctttatttgtggaaacttgggctcctcagatacttcatctagttgcaaggtatacttttctcttagttgcccgaagcactacttttctggcactaatgtgcttgtcaaaggtgctaccaccttttataaagtgggttaaccaaataagtatatcggcaactgaatgatgcatattatgacctgaattcaaattacagaaactttttttcaaagtgtaggaccacaaaacattattgtaaaatttcaacttttccctttctgctgagaaagaaagtatattaaaattaaggaataggaaaccaacttacccagaagagagaagaaaaatcaggaaaagagaagcataagaaacagagttcctttctctgaggaaatgtttcccccatttcttatgaatcatgggacccctctgccctagaaagaccaacctctgataaaaattacatatctatctcttgcatcaactcccattaatcctagtgaagtgtcatgttcagtttttactttttcatattttagtgaattcaaaactttggaagctgatgtggcatcaaaattggaaatcaatgaaaatgagttgttgtttataatggatttggagtgtacagtaggagtgcagaatgatatgtacttaatcttttgcagaaaatagaatagaataaccttttctaatgtattttccggtgtcaccaaattctgaaatttctaagatttttataagatgttgtagcacctgtactaattttaacaatagttagtttaacattttgggaacataaaaaattgctgattgaaggaaacagaaaaattggcatcaatagctagctcactaatcaataatactgcagaaagtttatttaaattctatctatttttattattgtcttgattatactttcctgatgtatgtcattatgagttgttcattgcatactgttaattaaatcattcgactaccatctccagttgcttactggatttcagtttttctttttcacaaccaagaataagaagcaatatttgttgactgcaattctaaacttggttttctgttgaatttaaggtcttcccttgtatttctgctacttgtggtcacttctatcatccagaatgtgttgcaaaaatgctccaaccagttaatagatgccaaactgaagaacttcgtctcagtattgctgcgggggaatcatttacctgtcctgctcataagtgttttgtttgtcatcaaggtgaagataaaaaagtcatggagttgcagtttgctctgtgtcggcgctgtccaaaggcatatcacaggaaatgcctacccaggcactatgaaacctacccttctttttgtttagaatgttagttactttgagaaagaatgacatcttgttattgactttttctgtttcacttttcaggagtatttctttcgaatataactatgaaaaaaacattgctcagagagcttgggatggtttactacccaaacggattttgatatattgcatgtaagtaaattggagctgatttatgtaagttaaaattaattttggccatatttcacattgatggtgtatggatattcaattatgttgaccagggatcatgagattttaagtgaacttggaactcctactagagaccatgtaaaattccctgatgttagtggacaagaaaaggcaccgaatttggagatgcattcaaggaaagagagggtaatgccaatgttgtcaacaagaagtaatgtatttgaaacttttgcaacaaaaaaattaaacatgttgcaacgggcagaaaagggggtttgtagtgctagtgtaggtgattctacccaaactataaagaaaagatgtgttagaccagattttgattcgttaagaaagagaaaaagaactgatgaagtaagaaaatctgcaaaggtcaatgttggatcatctcttagtttcttttcaaaagttgaaggcaagtcatgcatgaagaataattcatcagttagtctagaaacacacccagtgaagtctaagaggaatgcagccagtggaattgtaaaaggtgctacagaagaaaatgtcattaaaaatacaaagaggccatgtccttcagctcaagctgaaatagaaaagcggtgattaccttgttccatagttgcatgattgaaagtttactttcagaatattttatgcttatgtaaattttcatttagcaatagttggagcgataattccttttcttgtcttcttggatctacagaattttggacctaatgaaagaatccacttcttccttcaatcgagaagagttcataagaaaacagaggctacaggctacaaatggaatattctctgaaagctcactggacataggcattacaataggaaaagtggagggttctgttgaggtatttactgacagaaaatgaattgtggctacagatgttaagatgatggtgaatctaaaaacatattgtactcccaaattttttttactttaagagtcttgatatacttgcaggctattcgaattgctttaaagattttggattcaggacaaagtattgaagatgcaaaagcagtttgtgaaccagatgttctcaatcaaatatttcagtggaaggttcaaaaaaaattttatttactataaatttttgttgcaaaaaaaaaagttggaaaaaaaaaaagaaaaggcgactgggcattagttattattctttataggcacttatattgcatgtctgagttgttactcctttctactgtctctatgttctgcctgtcatttttttaattcaatgcaaactttgttaagatctgtaatgtgttttgttagttttgtaaaatgcataaaggagaccaaagatactgtggcatactgtttgttgtatcatactatcatatatgcttataccatctcttgtatgttttaactgactagtttaatgttttgatacgaatgtgaggcctcctattaagtttacttatgctagaaggggtaagcaaggtaaattggcttagg

SEQ ID NO: 299042 - DNA, 3951 bp, Cannabis indica
tatatatatatatatgtgaaggtgtttactctgcgataaatgtttagataatttttatttatttacaatttaaaaattagaattcaaatactttgttgtactttttgttgacctcacttttaagcaatgacgttgagtcatttaatgtgatgagataatagataataattaatatatttaagtaataagaacaacataatttatagaagattttcccatgattatatatagtattaggctactcccctttcacttgaattacttcgaaaatatatcaatgtcacaaggagctggctgagtgagtttcttaataatcctaaggaaaatcttacatttatttacacaagataattgttctctggaaactcagaatttagatccctcaatagtgaaatacttcaccatatttaggagaagaaattagaattaaagggaaagctaagctagtagggatttaaatgggagatatttattggatatatccctaaaaattgtgcttcagccacgtttaccctgtgcagagtacttggcttcactataagactagaacctgctcggacggtaataatatttaacctgtctggtgttccatgtcagtcttcagatattcttagacatgatcaccctaaaaggtacattgaaagaaataccattcatccaagttttagaatggtctccacgtgtcaccttactggacgccacatcaccaaatgtataatttgggataatatttgtcgcccaagtctgtgtgcaaaccatttgctcgacgtggacttattcagcctacgggatgcttgaatggtggcacgtgcccaaaatcgattgtttgtcttgtcctcatgcagccggatcacaaggtacaaagattaggttatcctttcatattttgataatttattaactgtgcttcaaaaaattggtcttgatttatacgttgatagttgtactctccaactagtactgattttaccttttagggagaaaatccaaattttgaaactcgggattaccaaattggcccttcagtaaactataaaaggggatttacatctctttctccctcttttgcatattttccaacttaaaaacaaaaatgaaaatttctttctctccagaatttccatgtttttattcttcaagcttcaaagaaccctgaagtgatttctagagactaagtcgaatcatcacccaaaaacatccaacaatgagtaatttttttatctttatgcatttttttttaaatttctacattttatttttcgtttggatctgttttatgagatatgggcttgaattgaactgtgctacaacattagaaattaggattctttattctgagtccaaatgtatttgcacgacatatgatttttagttttttgttgatttcaaatgttttgctgaaaaatatttgaatatttgttcgacattattaggaatttcccgagttcttcctgtattctagaacttgtttgctctggaattttcgtcatcaggaaggaaattccttcctttgatccttaaatctttttgattggagcatgaataatgttttttgtttggaaaagatattctacttgtctagttcctacctctctctcccttttgtagatgaactcgggcaattttttgggagataagcaccggataggtgaagatttacttcatctactttacgaagactaacccaggctccatgcaacttcatcgtcatcaagcgagagctcataaactacaagttttaatgattgggacgtgacaagtgattcatcagagtcctcagagtctaccgtgaaacaccatcattacctcgaccaggttggggaagacatgtacaaaaggttcatctatgagttaaaaaatgttgaagacagtacttgcctacatattggacatacaaggtctaggaagacattctaaacaccctgtctgaaggttgtccagagccacctaggaaagtatctatgctagcagaaatcgcaatgaacattgccaagcacactattcatcccaatatccgcccagacataggatggtggcgtgcaccaaacatagccacatgagggtttcaattgaagaggatgttgaagtgcttttttgtaatgaggaggtacaaagaggtaggaggaccagggtaatagttcgtccagctggcgctgaagagtaaaaaagaggtggcccttgcaactcttgctgtacgaattgtataacaaggtcagggagccccatctcaaaacttggtgatatactaattgagatctaggactatgtcactacagagtataaagaggtccttccaacaaagtatcaggataaacctaaggctcagtgggtttctctttttgtccatcatcttgtggaaaagactcaagaatctttaggccaagggccttcttgggaatgtggagacctttcttccctatcatggataacttgccgccgatcaaggggaaaggaactgtgcattatccgtaccacatgatcagtagggtgcaatcctaccccttcatctatactttagaaagatagtccactactataagatctacccgacacaatttacacttaaggtcatcaaatatctatctacgctatttgttttgtacgcaaagaggtgatgaggtattccatcaccccatgacaccaattcgattttcaagctgaagtccagcctagggcgtaactgctcgtgttacttttacttttcagctagaacatccctagttgaccagcatgacggataaggaggtccccaaaataggtgggtacaccaaagaataatatattgtataatagatggcagtcgaccacttacccttccagctggcgaagatatactactgtccccctttaactttggggttaaagtaaagggcacaagtcattcttcagctgtcgagcagggcacgcaacatatctatattggccataatggagaacttcatttaatttggattgtattcgtttgaggggactgataaagaggttcctatgctcgtggcttctactaccatgttggaaataccagagtgaaagaagaaaagaaagaagaagaaaaaagctccgattgaggggcatattttgattagagaggttttcgaggaggttccacgtcctattctccaagttatcacttggaaagggaaaaggggttgttgaagaagagttgaaagtggactcttcggatgatggagctattcgaaatattttaccaggagatctagatttactaacaagtatgttgattaacatcctaaatattaatgtctctaaaataatgaaattaaacacataagagtttagaaaaccttaccttagttgcagcggaatataatgactcctttcgctcagatctctaacccttgttcctttctgtcgtagaatattatcaagatctgagccgggatctctttcaatccttcaggttggttaccactaccttactcactatggttgagtacttggcttgctatgtgtgggatggaactctatcagtaagggttcgagtatgaagaacaatgaaggaggcttgaaaactgtatagaaggtgtctctcatctactagttgtttgacagagttagaaactagattttggcaggttgaatagtcaagtggatgagatgaaagcatcatgttccttatatagtgtttcaactaaggcttaggattgaattatatggattaaaaaaggataaaatattggttaaaattgcacactaaggtaggtcataaatgggaccattctatagtcacaattttgccactttatttcaaccacttattgttctttcgataataccatattttccaattcaattctataaatgccaaaactatttatttaataattataattaattatcaagtaaaatttccatctatattattaattaattagaccatacgaagtcttttaattaataaattaacctcaaaacctcttttcttcacaa

SEQ ID NO: 299043 - DNA, 3546 bp, Cannabis indica
tctctctgttgttggcaatttctttttaattctctccatatcacaatataggtgtctcacttataaaactaaatattacaatataataaagcacagaagttagacataggcgggaaaataaataaaaaactatcgccttcccttagcgtattaattgtgtataatattataataataatgtccagacataggactcagtctaagtcaacttctcatttttttttttttatttcattacttcattttttgtgttcacagaggcacccttgccgctcaatttattggcttggtggtatttgtctacaaaatggtaataatagttttggagaaatttagtattgtggagtagcactgtaattctctaccgagaccagaaagtagataacaagcaataagacatacaagataaatattatgatgattcattatgtgtttgatactagcacttgagaaaactagtaatgaagcagatgttacatcattaatcaatgacaagactaacagaatgagaatgagaatcattccccttactcattgctgccacagtaacaaagctttataattactttctgttaagctgaccagagaaagtaaattcaaaacactttttttcactgcccttcaatcattgagacactagcagtaacagagcatgtagtggccctttgacgtgatctcggagagctttgaattaaatataggttgaatgggttgaagacgatttgtttcattactgaacatgaaaactacatcatgacatgcttaatctatcattggtatgatcttgtacgaataacaggtcaacatctacgcatcttattgcttctgatgcaccatacgagccatcccatgcatcatccacaaactcttcctctcatctcactccatatcaattatcttaatagctgtcccacttgttataattttacttaaggttttttcataaatacttttttattatatatatgtttttatttacatttaatttttaaaaaatacaattttaaaatttaaattgtaaaaataaaaaaatattccgtgttaataaattttgtatgagaaaaagcttattggtgtattatgtaaatttttttgtatagatataatgattaatgagcacataagttagacttttgggaggataaaataataaagtcaaaagaatatcgccttcccttgtcttgtcgcgttgattgttatatactagtataaatattcaacacctatatatttatattataagcttttaggcactgagcaactctgctttcaactgtcagagttagttatattagttaacatttaaccaatgagatggaatacattagcagattctacatttaatcaattaagattgaattttcaagaaggtcccagcttaaatagtacaacatttcattaatgtgtagttataggttgaatggattaagaggataaaagcacgaatttgaaaagctgagtgacttagcggccttcaaatactgatacggtagcttcattcacagaggcagagcttgttgcagtgtgtgattgagtttggcaagtaaagaaaggctgtttaggttgaggacgatgtgtctctttgatcaacatggaaaccacatcaaccatggttggcctatcacttgcatgatcttgcacacataaaagaccaatatgtatgcaccttattgcttcttctgcagagtatgactcggccaatgcatcatcaaccaagtctaattctctgctttcattccacagttgccatgcctatcaaacaaagtataacagacatttcgaaccaatcaagaagaccattcatttaaaaatatatactaatcaaataccaaattaggcaagacaagtatgaactcacataagcaatcaggctttgctctttctcataatagtggaagttggaattcttctttccactgattatctctaatagcatgacaccaaagctaaatacatcagacttttcagaaaatattccacccatagcatattctggagacatgtagcctctgcattaaataattgaatcaagcaaacgtatcataactaagtgcttgagaattcatatttttagtaaacaactaacactgaaatgattctaatatttataaacgtttcttacttacaatgttccgacaaccctgtgagtgtttactaaatccattgtcccttgaaaaattcgtgccaatccaaaatctgatatttttgggttcatcttttcgtctaaaagaatattactaactttcaaatctcgatgtatcacccttaaacatgaatcgcgatgaagatatacaagacctctggcaacaccatggataatgttaaagcgtgtagcccaatataattgtgcgcttctactaggatctacataatacaaaccacaaataattgatcatgtatctttaattgaggaggatgaataatctaatttcctttcaaactaattaaatgaatgaaacaaaatatagattgagggctgctcagaaatttgagtatattgcttgatagtgaatatgtgtaacacaatttggatagggaacaaattaagagaacaggggaagcagaggaggttagtatcgccacatgtgatagatagacaaagggaaaccaaccgaagatgaaggtatccaagcttctgttaggcataaactcataaactagtaacttctcttcttcttcaatgcagcaacctaagagctttacaagatttctgtgttgaagtttagagatcaaaatcatctcatttttaagctcttctatgccttgtcccgagctactagacagtcttttgactgctatgtcccttccatcttgtaatcttccctgcaaattgatcaacctcactttcttttacttggtattcagacttaattagttaatttgtttaaaacaaggtgcactaactatttcatatgttaaaaacataaagtaatcaccttgtacacagaaccaaaccctccttgtccgagtttgtttctgatgttgaaatggtttgtagcaactaagacgctatccaattcaaaaatacacaactcggatggatcttgttgtttggcaccttgaagattgtgtgttggagactcaattatatcagccaaaccaagtttctttaggatctccttgatgggccatgccatttcagctttaaaatttggagttatattaagagatcaaataaattttgacagaactacaagaaacaaaattgaaatttacactgaagatttatcattttacttacttctggggctagttctccatctatgaaatatgaaaacagcagcaagaagaagggtaccaacaaaaacaactgtgaggatgatgacaatcttcctggttttctctacctttggctgcatacaaaatgtatatggatcatatagtgttggaataaagaagaaaaagatggtacttaattaaattcattaaaatcaacacaatcctcaccaagttcagcttgtgcaaggcgaacaaaaagatctgccccgccataggaaaagctctcaatgtcaataagatcttctgaccaaaccaaacaccctattc

SEQ ID NO: 299044 - DNA, 3903 bp, Cannabis indica
agaatatatcactagttctagacaacacttaccaaaaaaaaaaaaccaattattaatccattgaaactagttagaattattttcacaaacaaggggctcaaataatcatagttggaatcttttattgtctcacctaatgatgaatatttatacacccaataattcatctaaaaaataatatatacaattaagtttaaaaaatgtatttttttttttttttatttttacattttaatacaaattttttcctatttttacaaaaatttacatcaaaactcacataacaaccaagatacgacttaaatcataaccaaaatttatatagcaattcatatagaaactatcaaagcaaataccaaaacaactcaaatcataaattaaaaaataataaataagataattttcccaaaaaaaaaaataatattagtagaatttaggcaacaaaattatcaaaattgagtggaagccaatcatagtgaaagggaccataaaaactccaaacttttttttgtattttattaaataagatattatattgcgcacgtgatttattcaagttcactgtggtttcgacacgtggcatatacaaatacgaagcctgaaaatcactcacaggctttcggaccccaaattcagttttcactccgactaactaacaatgatgaaacccgatccccattttttctctcttccatttctaatcctctgcggtcgactctaactacaatctttacaaaccctccaatcacattccgccacgtcatcaatgctctgttcggtgccggccgccggtaaatccagctcgaactggctcgaccggctccggtccatcaagggtttacctacggccgaagatttcgacctcgatcacttcctcacacaaaaccctaactcgtcttcttcttttcttcttcttcttcttcttccgagttagctcagctcaactcagcgacgacaacgacgaagactcagagagctgctaatcggaatcggaaatgggtcggcgcaatgaacaatgttttatcggaactcttctttatggatgggtctgacgaaagttctaaactttccgggaaaaaatttcccaggaaacaaacaaaccccagaattttctctacatcaatgggtaatacaaccacggccgtcgttaacagtaactccagtggcgttgtggcgataacggcgtcgtttaattcggatagtaatagtctgattcggaggagaaaagggaatgttcgtgttaagagatttaaagcagttgatgataaagaagaagaagaagaattgggtttagaaaaagaagaagaagaagaagaagaggaattagagaatgaggagaagaaatttaagggttattcaaggagtgaagtgactgtaattgatactagttttgggtgttggaaatcagagaagatggttttcagaagaaagaatgtgtggaaagttatggagaagaaatgtaagttgagtagttttgttaggaagaaaaggaaagtagaaaatgatgatgttgatgatggtgatgatgatgatgatggtgatggtgatggtgatgatgatttgtcttggggagctgttgttttggagaagaagaaagttaaagctttgaattctcatcatgctattaatggtggtaatcaatctataaagccttcatcagatgaagtaagtaaagtaagcctattatatgtttttcttttttcatggtttaatttaatcttcttggaatggtattgataaacatatgttagtatggatttttggatacatttcagaatggcttatgtaggatttggtttgttttattacttcaatagatatgatttggtgtaagatttatcatccatgtgcttccatatgaagtgtgagagtttaaaatttgggtgtttagtcagagttctttattgtcttttacaatggtcatttgcctaatgtagtagctggatggtttttacacacacacacacaacataaatatagaatctacttaagatttatcatctatgctgtaacttgttttataatgataaataaatacaattctatattgaactcagtgatggtctaactgtaaatttgaaaaattctgttgctataaatggcaatgaagagattgcaaaatgtaaaagttgctgaggagagatactgcaattgcatgaccttacatcttattagttgttttttaacttttataatgtgcctagcactctcacattgattttactttaatgatagttatagaaaatcggttaccatttatagggcgtcacctcataagggtgctaagcaccatgttgcctaacagcaatgctcagtagattttgatttaagcttttcaaattgtttcaactactttgacaaaatgctctaaccatcatagatttttcttatacaaatcttggaatgatatgtagatttacagaggtagctctgtcatcatctggctttgagaataagcttgtaagaacataaaataattttttttttctggtttgccttgtgaagggtcagaactttagaaaaaaatcccgcgaagaaatttacaaagcaacgatgaagaacctgaatactacgaggaaagaaatcagtagtaccgaatcaccagataatcttagccaagatttcagaaaaaggcaagtgtagtactaacacttacacaaccatttcaaagttcaaatctttatcttccaacattgtctaaactaaactaaattggtaccgggtggtgtgtcttgcaccgcaacaggtctcggctatccagttcacctagaaaaatgaagaaggggggctcatcatctgttgtccttataaaaggcattccaacaggcaagaagaaaagtggagtaatggtttctccaaattggcataagagcactcaaaaactacatatggccaacaacaactcccctaggaagtgagtttgattgggattgggattgggattggtattttttattcataaaaaggaaaagaacagaagttgagattggtctttgtgctgctgatgatttgcacttgcccattgaacatgttgttgtgattattagtaaaatatatatatatatatatctatatatgtatatatctatatatgtataattttttgttctgtctcattggcaaaaacattgttttctgttattcttttgacatatttcttgtaaatgtgttgattgatacaattactgtacaaatttttgcttggagtcttgctgaccccacaatagcaaatttgactgtttattattggcactcttggacaatgaacagttcatttctagtttgaaatagttttttaaactttctaccactaatattttcaggactcgtcttcaatttgaagaatcaaagagatattaatgcataggtaattgtatttagtttttatggaccaaaataaataaataaagtaccaccaaaatatgagctatttagtttttattttacactttatagatttcgttttcttatattttagtttttctttttctttacatgaccaattgaattattatttgatagtaactgattactactatcaattttttactatatttatctcaatttttttttactatattaaatattaatgatatatgatgataactggtaagttttcaaaataacccgacatcatttacaaaaaaaaaaaaaaaaaccccgacactatgaaccaattattttaaaaattagtgtagtagtagtaatcacttatcactttttctaattttattttttatatacataaaattgtttaaaaaaaaagaattataaaactgcacaaagtaaaatccaatatttatagttaaaaaaagggcttaattttttttttttttaaaaaaataataaaacaaccaaaaaattacaaaaatacaattggacgaaattttaaatatttttacg

SEQ ID NO: 299045 - DNA, 2023 bp, Cannabis indica
gtagcgtgccttagcattagggcgttacaacttataaccaagtccatttacatctaaatatccacatcagcgcacagttaaaatggaaacaataaaaaggactcaaccctaggtgacttcgcctctactggatcaagaaataggagttagttacaactgttattgtaactaactcctagatctgtgatcaaccgactacataaaagtatataaacatgaaatcaaagcaaatacaacagagtacacacaaatcagaaaaagtggaagagagaaggaggaaaccctagtttgaagacttctgctccaagatccaaagatgagaaaccaagttctcgtggtgaggaggtagaagagagaagtatatgcacaaacaacaaacaacagagttagatcgagaacagagttagatctgacaagaagctccaaaatcttgtaaatctgacattattgatagtggatatcaagctaatctctgagatgagcttggcagagacgtagccctaatttttggggtgaactctgaaacaaatctggtgttttctctcccttactcttgtttttcatttgctaaatctaaatttttgtgtgtgtgggtaggattatgggttcgtgcttaggatcgagcaagttcttgagaagaacttgctctgctagggtttctatttttcgtgtgtgagtgttgagtgtgtgttgtgtttgattggttttaggttctctagacttttcttgaaaagtctttgaaccgagggttaaacgacacaagacttggtgtcgtggggtttaaacgctgccattttgtctaaaacatacttagacaaggaaaggtcgattttgaccttatatactgatatttgcctttttgttggtgtaggttaaattggtaaaattactacaacaactattcaagtaatctaatggctaaaaaaatgtaaccatgatagttacatatttaatgtaaccattcaaacctcctcctgtatatattttagtattttactcaaaacatcttttcttttataatgtaaaataaattattgttttaaaaaataaaatataagttaaaattaattgtaagtatcattgttccaaaagcaattattgcctcgataaaatataattgtgtataatacaaatttaaaattatatagaaatcataaattattaacaatttcatatgtataaaattatcaataaaagtgctaatattaaagtagtgaggcaattcgttgtattgctagattaaggctaatattataagcgcaattatcacaataaacacaattcaaaatttatatttttagaatttggtcactaatctttcatgtaatttattcaatccttattctcctttcttatacaactattctattcatttacacattctcttcattacccaattctttctccttcactttcttatacaatatctctatgttaatagattttttatttctaataactccaaagctaccagcagctttgtgaaatgcaagggaagaaaaatagtaaaaactcccaattgatcattcacttagagaatgtaagtgaaatttgtgcttggagctattgggcatgttgttccccatacaccatcttataaagaattcctctgatttttccattcctattatctcttaatgatttgggactcaagagaatttgatggagtatagtatagtctatattttgtagtattgtattggttaaataatatgtggttttcataataaatgcttggcttaatgggtatggggttttcatgatggttgcttctttaattatgtagaaggatacaactattaaaagtaatattattctgttaaaattaacattttaataagtatattttgtcattacaaaaaatacttttagtcacaaattaaaattaaaatagttatgactaattatataaatcatcattcctatgttgtgactaaaaagttcgtggctaaaagtattaattacaaaaatcacaatttgttgtgactaaatgtgtttttaatcacaatacttgttgtgacta

SEQ ID NO: 299046 - DNA, 2748 bp, Cannabis indica
taacaaaaaagagaaaggacaaacattaattaaatcaaacgactcaagtagtatttttgtcaaacacctgctcttgacctttccccgctcgtaatcgtactgccctccgattcggatcttgatgtgaccatcgaattatccgaactgctattacccgacccaattttctcaactctctgaactgcagcagcggcggcggccacaacttcggctgggaagttaaggagggccttggcgccacgcatactgaaggcagctctgtcataagccatagcagcctcttcagccgtcttgaaggtgccaagccatacccgtgcgccttggcgcgtagagtcgcgaatttcggctgcgtatttgccccatgggcggcgccggactcctctgtagtgcttcttcatggttatgtttcggacaggtagggagtgatggttgccatttccgcccccagcgccggtcggcgttgtcgatggagtagctgttgctgtagtagggtgccttctgggcataaccgacgtcgtgctgagggacatggacgcctcgtttaggacttgatatatgaccatgtcttgggaatcgttctcattgaaagggagctctagcatcatggttttggcatgagcaatttgcttcactgtttctctcgttatttgtatgatggttgtatagtgtttggatttttgagtaatatttgtatttgtaagtttgacaataaaggaaagtagaggagaaagggccaacaccaacgtggtgatgaaatttgaatggtttaaatttgttgggggagaggaaggtgatgggaaattggcaactccagtaaaaaatggaggcaattttatttatttatttggagcaattgggttagttggtgggtaggaaataagattttccccttgatttatttaacatttacatcttcttttgtgttaacctacggggatatggtagggtcacagcactggcataatacatattatacattattatcaatttggaaaattattcaggctgaaaataaagttctttcaacaaaagtcatcaatttcgaaattcactaactcgtatttagattgctaagttagtttctacaattatatacatatttttttcttgtaatttttaaatcatcttgttttgttaagactttacagtttacacctatatattaatattttggtatgtggacattctaccaggtaaaataaattgtagagaattgagccatatataagaatatgggctactccacactcattgctaatttattttgacatagaaccccatgattctcaaaatggtattagaaccatatcccttgcggttttcaagattgatgagcaaaaaatagtcatcatcttaagggagaatgttgtggacattgtctcattgccaattggttttgagatagaacgtcataattctcaacaatgatataccagagatttcatgtccctttccccaagaaaaagaaagaaatataaaacaatgcgacgctaattgagcctaaagagaggcaattttgtgtaaagagggcatgacacctatagtgagttgcattcaagagaaattgcaattattttgaggcatttaatttaaaagataaattatgaaagatatatacaaagagagaccattagaatccaagatgtaaaaaggtctggctatcattacacgaagaatggccacctcatgtggagaaagtactaagattttgggatagtttttccctaaatgccacatatcataccccatttgtacgaagcactaaaatgaataaataatctaatatatacacacatatgtataacaaaaataaaaaatgaactactacttatcacctgtttctttttgtttttctcttttgtttttcttttttgaaaaatcgcaatttcattaatagggaaacatatataccaacaataacatcacacattattcaacattattatctttttatctagtcctaaagctctctttcaaccaacttatgccaattcattagcatttctttgtaaatataagagacgacaaaaaatgaagataaagagttgctcatatcttggattaattacttcgaatataggagacaaagactctatccacaactactttagaatgagactcaacatgctcaattagcaactcaaattatggcaatagactaatgcctcctagaaagatgaattaaagtttccatcaaatagcacactacacactacaactattttcccagctccatacccactcaacttttattatgctttgtattaatagttgcaccaatgttgagcttaaggcatctcctacactactacaatgggagcccttcatcagctagtatatctctactctgacaatattaacaatgttgtggcccgagtgtatctatacgaacatgagggtctaatcaaagttcactacaaagactacgatgattcacatgcccgggttctgatttaaaaaatactgcaagaggatgctgaaatcccaatcgcaattgacgggtgcagatatgttaaggaagtagcaaacatattccttccttgtcctaaatacctaattacaacacccaaggtaacttttattattaattaattattaatgtaaagtcattttttggcaagttagttgataaaatatttttcttttatggtaagattgttttgcattcatagccgattttcttaccttgtttattcggttttagttgctcttatatatgttaggaaagatgtgttgggttttatgccc

SEQ ID NO: 299047 - DNA, 2206 bp, Cannabis indica
attgtttgcaaatgagcaactcgttcattttattttttcttttcttctttcttcatatccactatattatatcatgaatttttcttccaatattttgcagaaagttcattggggaacagtaacactggctgatgcagagaagcgtcttttagccaatgccttgcttgatttctcaaatgagcggtttgttcttgtttctgaaagttgcatccctgtctataacttctcaactgtctacaaatatctaattcggtcagctcatagctttgttgagtcctatgatgagcctacccgttatggacgtggtcgttatagccgcagaatgcttcctgatattaaactttatcaatggcgaaaagggtctcaatggtttgaacttaatcgtgctctagctgtatatatcgtctcagataccaagtactatacccttttcaagaaatattgtttgcctgcttgttatcctgatgagcattacttaccaacttttatcaacatgtttcatggctcactgaattctaatcgtactgtgacctgggttgactggtcaattggaggccctcacccggtaacatatggagaggctaatataaccaaagaatttatacaatcgataaggagtaagggaacaccctgccaatacaatttggggacaacatctatttgttatttgtttgctagaaagtttgctccaagtgctttggagcctttgctcaacctctcttcctcagtgatgggattttgaaaatttttggttcacaccagtaaccttgttagttttgttcaaccctaagatccttagattttggcagggttttattgtctagttctaatcattagcagtgttcctctggtgatatttgtttcccagaaatgtacaggttgataggtttatttttatttttattttcattacagaattttgttttatccatcacgtagagaatctgctattcttgcatggattttgagaagagaaatcggaatgtccttcgaaggaggacagcttatattggaatataattttctgttactttaataatccatctaccatatttattgaattctacaatttttggaaggcagaatgatttccatattgaattatttctctcttcaatttgaaaatttcagacgtcacttgtggcaagcaagcaacaaaatacataatttgagacattcacttaatgcatggatggtgttgaatttatgaatttatgctaatgattcccttttttgtaagcatatctttgctatattgcttttccagcacttcatattctcttttctaccacaaaatttaccaaaagagcaagccactgtcaccactcatcaccatctttcatttttcttcattctctttctcttaactggatgggttcttgatgcccaactgaaagggaccttaagaatcactcgggtgtccgtttgcagagaattgacttaaaaaaaaaaaaatgaagtgggtttttttttcaagattttcatgttaacatgactttttttttttttgaaaaagtacgattttattttatttatttttttggaaggagatattcattaaaccaaacacacagttacagaaggaaaaccaaatccagttctaaaaaggactagcagctgccccattccaactagcagttagctcatagcaaaacttcattgcaccataacttgaacagggagaatcaatatccttgagcatactattgacgtcgtgacaaatttcaatgttcaatctatttggaaagtgtaacttgaaaacataccaaacctcaatataatacttcattttttttcttcaaatatgtagacacacatttggggaggtgtatacattgaaaccaaaaaagaaataaaaaaaaaagaatcccttaaaaaaccttaaaaaataatgtatctcaaactcacactcaagtaagaatttatgtctcttggtaaattaaattgaattgcatagagcaatcctaagcacccacaacaagcaaaatcttttttttttttattcttcataaaaattcttaactttaaaggccatcaaggaccatcaaatttttacaaatttgtgagcttcaaccttaaaaagaaaaaataaataggacaaaacgatgtataatgccccttctcttcagtgaaaactgttggattaaaaatcctatgtgggcacatatgtataatgtatatgctattataaagtgtgatacaaaat

SEQ ID NO: 299048 - DNA, 2633 bp, Cannabis indica
aagtagtgatgttgatgagtagtgttgatttagtatatgaaagtggtttgacttagaagaaagggctctatgagaaggtagtaagctttattgatagtttagatattggttgttacactagctcctcaacccaagcatggtatttatagggagctaaggttaatactacaagtttttagatttttttattttgaattacaatttaactttttaagaaattttagaatttttcaagttttttagcttacaaatatagtttctaagtaattttaattttctctaatatttttttagctttgtatagttaatattaaaattttctagataagaaaagtgtagatatgtgtagcacttttcatcactttcactcttgatatcaacatgctatgtttttgtttgatcaggttgatatttgggaagaaagaaaagtttttggctctcgagggcagagtcttaaagatgaaatactgggtaaaatccctcctacatctgtaagccaagtaaagagttcgaaccctatcaagatagtcaagagggatgcacattccgtacggattgtaagtacatgatttttatataatatatatatatttttattgttcttgaacatgactttcagtgacattccagaaattgtctgtgggagatttgccagaaaagattattactgcatttcaatctgttcttgatgaacatgtcagtgaggaagctgctataaagaagtgtagcacagctctgcaatatgtcggcaaaattgaagaagatgttgaaaatgcctcgactcaaggtaaagaattcacatccaggtcttgtgcacttactatatataaatactaaatatttccatttcattagtatatataaatactaaatatttcaagtcagtttcataataccagatcatatctgaattctcttctgtgtcttcatatattctattttttcccatcaaccaaaatggctagcagcctagcagatagccacattttgtagcttaccccatcaactcaaaccctaaaactagcgtctgatgttttgtagtttgattacttttaagctttttattccaaatattatatgttttcatttaaagagaagaaattcattagaaggtatattagtatttatacctatttcaggtggatgattgattgtcttcagtcttttgtggacatttagaatggttaaacaatttttcttcctccgtttatctcctccactttcctctctcatcattctcacacatttgttaaaaaaaaaaaattgtactcatcaggaaatcagcagggatctggatatctggatgagctgcaagagcaggaaaatttactcattcattgtattgagaagcttgaaaatgctgaggcaacgagggttttgttggtttcgcagctcaaagaggcacttcaggaacaagtatacgttattcctatttgtgctcattttcctttgctaaagtttaaaagttcatgttggcttacttgcttttataaattttttacaggaatcagagctagttcacattcgcacacagttgcaagtaagaaacacctatctatttcttgtcacttaattttatttctgttggctgtgaagaagtcgatatcatattcaatttccctttttttttccttccctttttttaaagggatagaggtcaaatgacctgaccaccatcctaatttattaatagggtcctcatgtaaggctgaggaaaaccatgtaataacaagacttgaaagttcctttataaaaccaagaggcaggaacataagtcctaagttacaattggatccatttaagcgtaaatttaaaagatggcatacctctaacgcagtaggttcccccactccctacaaagatctaagaagcaaagattctcaaaatcctgacttaaaaatccacgtggctattaagaatgtaattttctcccacacaatctctgcagaagacttaccctcaataattggaatattcaaaaattttctattaggttttcatcaggttaagttattggattaatttcagatttttctaatcattagaaggcattttcattaggttttcatcagttagtttagattccacattttaattgagatcattggataatgatttactgaagatggagtgatgaaattcaggtagtcctctagctgttttgcattttgaaatgcgtagctgttttgaaattcaggtagagatttacgctggaattgattatattaaactagagaggttcatagcttaaaataatgtaaaagccaaaacttggattttgtttagcattttgggctgaagaacttaaatcacttaattcaacaagaacatatgctgagtgtttggtaaagctatagattagaagtattgtgagttggaaaaacagtaattgataaagggatgagatgtaaaatggtcctaaattttaaaattaagttagtagatatttttttttaagaaaattaaaaaaatgaccaaatataataaattagctaataaaaattataaaaatacatttaccacatattattttcttaaaaaatatatatagtaattaaattaagttatataatttttaatattgcatattattatattgtaactaaatacgaatatatacaacaatatttgat

SEQ ID NO: 299049 - DNA, 1934 bp, Cannabis indica
tgcatatctttatgagtgacatcattttaatatagtaaagtcctttaaatatgtgtctaaatcaagtttctaaagaaacttggaacataaaggtctttgataatattaaaacatctatatatttaattttttttatgtcttatattcacgatacctaccccctaagtgactaaagggtgtaattcttgagtcacttgtcgtgttttctcaagttaaattaacatttcatatgcgattaatgtcatcagttcattactttttcaaaatatattgtcttggtcaaaatgacctttaagtctattacaaaatactggagatgaaatcaaatattgaactcctaactactggtagtacttttggagatgatcatcattcaaagctcttgggatctaggatccatccatccgcttgaggcggtaagttccaacttaaatttcatctttgatttcgtacgttccctcctaattgggtcctaacacccccactcttggatcttgtgatatagggaaaactcgtcttagtaccaagtctccactatgaatttcctatcttttacttttcagttaaaatacttggcccctttcctttaatatgatgcaaggtgcatttgagaatcttccttgagttcttcgacaaagtcgagggactcttggagcatggactggttagtggcagtaagttgtccttctatgagatggtacaataagttccgctaacaacatatccccacatcaataaaccataaaaaatggcaaatgccttgtggatgtctgggtcgttgttcgataagcccataatacttgtggtgattcctccaggcaattgttcttgcaagcatgtagtttcttttttagagtggtcttcaaaattttattcacagctactgctttctcattggcttggggccttgctacgacggagacactttttaccattccgtgtttctcacaaaatttcatgaagtattcactatcaaactgctactcattgtctgagactatcttgtggagttgtggggaaatccatatcaacatacaatgttcttgatcacaaagtctaaggatctcttagcgatagagttcatcgactcatccttagtccacttggtgaaatagtctaccgctacaatggcatacttgactcccctttcctagttggaaggaatccgatgagatcaattccccattttgtgaatggctaggggctagtcatcagagtgatctcatttggtggagccctagggatttttgcaaacctttagcaggcattgcatttacggacgtattctaggcaatctttcttcatggtaggccaaaaattaggggtgttcataaaaactgaaaaactaaaatcaaacatcaactgaccagaccgtaaccaaatttttaattccacgtcatcaccgaatttggcagtcaattttggtaatatttttttgacatggctgtaaagaccgcttaactttaatttagaaattagcagacaattaggttttaattatgaaattagaatattaattataaattatcatttaatggagatttatttgaatttagaatgtattttatatgtcatatacgtaattttaagtttttgcatgttttgtgtccggcaacatcggaatgtggcgtttggccatcagaatcatattttagtatttttagtatagcggggcattatagttagacattgggaatgtcgagaatagtcgagatttcagaattgaccaaaatacccccaaagtgaattagaagctttttggttagtgaggggtaaaatggtctttttggccatttgatcctttgtctttagtgacttttatttagcttttatataatctgaatatatcgtatattagttagataaaaccctagtattttctattattcaaaaattagaaaaaaaaaacaacataactctttctctttcttcaa

SEQ ID NO: 299050 - DNA, 1378 bp, Cannabis indica
ttttgcttccctgctattttctttactgatcttgaaggaccaagttgttctaaatcttgaaggccatcatccttcaaagttactgtacgtgaaactgctgcaagtggttgttgtagtctagtaagtttttcatttcactcaaaacttagtatatatttccatagcatatatcttaatagtcttccatgatgagatgttatattctttcattcatatcatgtgtcctttactttttatttgagacagaacttgccctataagtatgtaccaaaatacattaatgatttaactttaaaattaagctttaaatttacttaattatactttttttataagtacgactctcacactattattgtttgaactatatagtatatatatgaaatgtctacaattgtgtgaaaaattggtgtatcgtaacgaaatttaaatactatattattttttattagatgccatgcaataacgttaagttgaaatgaaattatttaaaattaatttaatatgttaattaaatggatgttgttttttgttttgttagaagttttagaatggatagagattgaatgagtgtaaatagaataattagacaatatacagtgtggatatattactggatgaagattatcaaaagcttcatgatgtagtgcaatcctgcaactttttttaaagaattaggtaattaaacatgcttgattcatttaataattagtttttatttcaaatacattcaatgttatttatctttgattttacaattaagaaatgaaatgtcttacaacaaccaggagataaataaaatatgggatgaatgtgctaattttgtgaagtctaatatattgaagtctaaagctgttggcattggagaacaagttaaatatctgggatagaatctttcttgtactgcaatcatattcggttcatcgattagtgaagtttgatatattgaggaattagtacgcgattaaaggattgatgtgataatgtatttatttttggtcaaaattatttggttttattttttttaaaatgtttttgctgtagttcataaccgaagcaaaaaacgattagcgtcggtgtaccagttttttgcttcagttatgaactgaacacaaattttttttttttttgcttcggttcataactgaagcaaaaaaccaattagcgttgttcataatcgaagcaaaaaaattagtatttttagcgtctatggttatagcattggttacaccaactgaagcaaatactttatatgtcacttaaaaatcgaagtaaaaaaccctttatgtagtagtgtcggtttttagctttggaggaattagttggatgattagaccttatgtaacaccctaactaacttaggcgtattacgtgattt

SEQ ID NO: 299051 - DNA, 4137 bp, Cannabis indica
ttggaactttcaactgtattggtttctttcaatgttcctttcttctttctacattactaacctatgtgactgataaatcttttgctcgactattaattaacgtttctcggtgtcaaactctcttttctaattaaatgcttgatcttttgtgggattaacttgaaacaattgattagtgttgatacattatgttatggttcatgtattacattcttcggttccggggctaatggttattggagctggcatttcacaccaaaatatgaatgagcctctgaagctgggatgctccatctggtgtagtatggtgtcaattttggttcggagggggaggcatagtaaacttaataacctttgacatgtaatttcaaaattaaaacaattgtactttctttctcatgtttggatcctatattatctgacttttctttaactcctgaatatagtgttggagattgattatattacagttcctttcagaaaatataccaagagccatttcaattgtagatatgacaatcttgtttgactattaattttggctttcattatcagtacttctaacgccctaaaattctaagtggagataacaattgggtctacgtactaaaaggtactactgcatattaatataggtcagtgagtgatatttgtgactgctgttcatcagtcctgtcctcgcttcataatcttttacgacaaaattttgtagtagagctataaaagatggcttaatttaaggctgcagctatgctggaaaacctgttcttttctaatgagataaaaccgattcttgttattcaaaattgcattactgtcaaaccgtagaatgctaagatcaactatagacttggaaaactcggaaaaagaaaagattgaaaactctgatagtagtaggaaaaatatcaaatacttgtcaagctaatatcaatatactcgtttttaaattagtgggttaatatgtgactaaaaattagtatatttgccaaacttaattgtcaatatagtaacagggtcgccaagtcaatcatcaaatcatcttattttcaataggcaataaaactaataatagcaccaaaagataaacactgatttttgccgaagtatgcactactcgattcctccaaagaccaacttggcgtaacaatggtagatgcagataaccctttttatgacacttctttaatacttcaagataagctaacaatattgaaaagaatattaacaactctatccctgtcacggtcagtcgaacgtgggcaaagggcataatccacttttaattttgaagagaactgcatttccaaattttggggtgcctctctcctgttgctcaaccagtccactgagagacataaagcctaaccctgcaggttactgtgttttaggaccatcttcattcatgtttgactcaggattgttcgtattagtaaaaatagaccatctcttctctacgattattaaaatattaaatatattatacaagaattcaagcaaactttggaccctaactctgatgcctcctaggcctcatatagtagttgtcttgtcatatcatacttccaacttgtcattaggggcttgatcaatcgatcacaaatcaccatctctatggggtatttgaccatatcattacatttaccaccccccaccatggggtaaaatcccagcaagctttagagaaaaaggaaccagagaagagagagcatggctcaccgattcaactgcatgaccatatttgaaacatcccttcttgaactttacaccaggagcaccatgtcactaagatgtaagaaggattctggaaaacaccctccccataaattcttttgccttattttgacagcataacaccttccaccatctcaaatccgaatttgctaagacatatgaggcatcatcccatgattgccttgtatcccaattcccaatgtaccgtgtaaatgcccttattattgaaatgcaatgataacacattcttgactgcacgaacattcagaggaatgttacaaatcaactcactatctatatattcccaaaataactcatgagagaaattaatttccatctttgaaattgttataggatgaattttttacttagaaatacgagtgcagttttgtatacgatggacacgtggacccaatccctaattgggaaaggatgaagtgtcaataagcctagtgggactatccttgcatgataaaaacttgcgagaaggtgcaatttagacaagatctagtcgcacactatgtatggcataccaattatatgcaacgacaaagtgtttcccctgcacccaatgtgacgaccgcatctttatgattatctagtctgaaggaataatgtgtgtgacaactcacttaaaactcgagagttctacattatcagtatatgaatgcttaaatatgcgaccagtatagctacatgtgttctgttttatatagtctcaagaggttcgcgtgaaactcatatgcgagtagtattagagaacccgtgagtcatgttacttggaatatgaaaagtcattgtgcaactttgatagtcgtactcgtttaggtatttaataagaacggtctaaactgtttttatcatttatttttaaacatttgtatctaaattaaatgtaattaatgttataacggtcctgtctaaccagtagtatgagctgaaagattacttactttctatataaaagaatgatcccatctgaataaaactaatcacaaatctctttcaaaagtggattaagcaaaccaagctctgacgaaactattataattttcttgtctttctttacatatttgttgtttacatttcactacttgttattttagtttgaatatttgccactctaggtaaatattcgcatatctacttgtagatacttaagctttgctcaaatacttacaatttttggtattgtctaatttcttccaacaacatatggcactagaaggagggcatgtatatttctagtgtattttctgtgattctggaggaaaatcacaatggccacgaatcaaaaccataatagttacatcaacatcaacaaaaacactactccatcgatcaacgatagaactttagatttgaatcccataattgacactatttttggaggagttggatagacgaacactgtcccacttaacctgttcccacaattcaccagagctgtaggagacacgacgactcctatagagactactggtcatttcttgtcaattacacctacccacacagctgagggtatggtgcaactttcagccgcacagtacacaaccacgcaagagcagatgcgagcactggaagccgaggtagcaggtatgacacgtaaccagaacgcatccccttcgtaagagtgtgtgagaatgcaaaatctcgacgatgaggtgcataataatactaatagacatcgtgaatataccaataataatggtcattggtactatatgagggagcgatcagatgagaataaccagaaaaatccttgtttgaattaatcacctcgggactccgcgagcggtaaggggcctgctgtccccgaagatgatcaatgacaagactcgagattttgtccaccacaggatgttggtagaagcagaaaagaagagagatactgcgaggaggatgatgatgagcgccataatcctagaagttgtgctgattgaaggacccatgaggagtacaatcttgaatcatttagatcgaatagtcgcactcctagtgtgtatactagatcaggatcgattttcatgggtctacgaggtagataccacatccagagaggagatctatgagattgatgttggaagttattttactaagatctagatttacagtatgtttgattataaatctataatctaacatcctaaatatgaatttcttaaaaaaatgaattaaacacaaaaagttataggaaatcttacattgatggcagcagaataatttaattcattccgttcaaatctctaacccttgatccattctgttgcagagtatgattaagatctgaacctagtttctcctacaggtgacaagaacactacacaatcttctacactatcttaagtattgtcttaaattgtgtgggcaatcatgttgggttttatgacctaaataaaactcatt

SEQ ID NO: 299052 - DNA, 3888 bp, Cannabis indica
tggctcatctattctgtaagttcaatttttgggttttctttcatctttccttttcttctgattatatgtatatgtgtgtgtacttattgttgggtgggtactatactacagtgcagcacacaagtgcttctctgaccattaacgagaactacgatactgatgttagggatgacactgagacattccttaacaacatagtccctgaggtgagccttctcttttcttctctttcctcaaatataattcaatctcactttttttttgtcaattttcttttcagggaaattcagctccttggaagcatacactggaaggtcaatcaatactctcatgagtctgtctcaactctttatgtaaactttgattataatgttaaaatgttgaaattgctatgtttcttaggcccggatgacatgcctgctcacattaagtcttccatgtttggttgtcaactaacgtatgggacattcttctcttgttcttatgattattactatcattccatctccatttccattggctattgctaatcctatgatatttttttatttggcaggatcccaattaccaacggcaagtttaacatgggaacttggcaggtataaatttttaccttcttaatctcatgtatatgcaaagtaataaatgttgttggacaagtgttttgatttaaaatcttatgttgataatatcaactcattctaactcaattactgaatgcaacaacatctgttataaacataattctgctatgtatttgcacacagtggagggcatttttgagcaatcgtgttgatcttactggccagattttattgtatggggtacatcctgtaccttccaaagatgaatcttgaatcaaatcaaatctgaaaacacaaataaagttctaacctttcaagaagtttggatctctcccaactagagctattgctttctcaaaaatctacacgaaattctcactggttccctctaattagaagatatgactgacctttgtatagacttatcacctaataagtaaagaaataatagaattataactaattagaatcacaaccacccaataggaacataagatattgcacctgagtatgttaggcgtgttaagcatatatgagggtagctaagtaatatatggtttcctcttgtagtttgaggttcgagtcaccctaatacactacttgaaagaattagaacataggcatttcattgatatcaaagagaaaattatgaggttccaaactcttcaaaacagtttggtgtctccccaaaaagtaatttactttctttaatacataaattctcactgatacctcttgtaagataggactagcctttagatagattcagccactaacaaaaaagcaatcacagtattctaactaactaattaacaaaacaatcgacctcataggaactaagctgagctaattaacaattgacctttatatagattgtttgcattattgatattgtcgttgttggtagtgtggatttgagatatctacataatgtttttaatgtatagaaaaaatagactttagaatgtattagggtgggctatagtgtcagggaatgccgacagttttaaacattcaggagtaggcatacctgactattttccaccaacgcctattccactcaattttgtgacggtcgaataggcgtcggtcgaagagaccgacggtaataccatacccgactcttaaaaacagtcggagaatccccttattttagtagtgttggaaactcaaaaattgggtgggtcagagctaagctctttgttcttggctgatccactctcttccctttgcttcgcaagaactcgactcgatctaagtaagtcatcaattcttcgcaaaactggcgcacttcatccctgaactcccgcacttcatccttaattgtgccaattatggtgtcaatagtctcctctatttccggcagatcctccgaccattcttggtcattttttcatgctttctttggtgccatttctatcctcctagttgtctgctctgacaccattttatatgctattgttctagtttagttcttgaaagaagtatatagaagtgaaaattacaaggttctaaactttgacacctcttgtaagagaggactagcctttataaagacttaaccactaactaaaaagcaataaaagtattctaactaactaactaacaaacaaaacaactgaccctacaggaactaagttgacaagcttttgaaattcacaaaacaaacactttcttggagaaatcctatgatcttctagagctataaaataattcctttttaaagtataggtactgttactaagtctaaccaatagaactagaacttttaaatcatcattcggagcccaacaacgcagttgtacaaagcactcaacaacacattgtttgttgtgtggcgacgcattgcctggaaggtgacatgtcgccctacaacagacaccatattgccatacaacagaccaacgcgttgcctgttgtataatcaccaggcctaagttttgcgtgtaacgcgtcatctcccagggtgatgtgtcatctctgggcttatccaacttgtcaaaatgtcaccatacacaacgttaactgttctaatatttgtttaatcaactattcccaaatttttaaggtatgctttgatacctctttcgattacttttgacccaaaatatgatttttaaatgcttacaagtctagttcaaatttcacatcctctattatgggacatcattaagggtttttgttaggcgtaaggataaataaaaagggtatatgggtcattgtaatgggagtattgagatagtatatatataagagtattagaagggttttgaaggagaggattatatggttaagtgagcaatagctcttgggagagcactgttatcctcatcatttattcaatataccattcactgttttcctataattgcttcttttcttactaaattgataagaaatttcaatcagttttacaccatattgtgtaagaccaatttaggctttgtttttaacaaatcctattatcctagcatattgtagagttatgcaggaatccagtttaattttcaattgaatgcttcttcttttgtaacgaaaatgactggaaccatacaatttctttaaaatgaaaaaccatcttaatattaaaggaaaaaaatttacatggcaaaaatgcaaaccatcttcaactattggctgccaatctactgaggtatataatataatacatgttctgacaattgactaccaatctgttatctgaattcaacattctaaataatagggcttatctaatattagctgcatttcttgttttttctcgtctttcttcatattagttctattgttattattattgctatcggtgtttcagggaatatggctgtgcgagcaccgtgactaccctaccgcgcgcaaagtggtggtaaccctgaatggaatatgagaatctgtgacttgtttgttttcttataaaactagtatttgttcaatgttaatgtgccattattgctctaccctcttatattaccaccaaaaagtgagaactcttatttataagcatgagaattacaaagagtgtagctgaaaaagctccactgctttaatttaacagactttattacatttattaccgcaacaaaatttaactgaaacaaaaactgcaactaatcagctaaccgagttaattatattttacacattagcatctatgtgcaagtgggtgatccagtgctaaagcatctgtaatggtatgtagctaaaaggtaaaatagaaaattatttttattgttgttgattattgtaataatatattataatttaaatttgtcaaatataaattaattttataaaataaaaaaaa

SEQ ID NO: 299053 - DNA, 4302 bp, Cannabis indica
ctaaccatatgctcatagatcgaacctctaaaaactgtgtttttcttgttcatttcttgctgcatcactgttttgttattggtaccaacattgtccacattatactgcggcacaaactcagatccatacatgtgcctcatactacacactccattccatctctttcctcatttagttagtcaaaacgtgatttgaagtatttaatgcccagtctgccgacatgtccttgattttaatcttttttcactaccctaaattttacatcaattgtttagcaaagcccacatcatcaaactttactcttaagaaaaattgacaaattaaaaagagattttatctatattcactcaaatttgatcaattaatatgactaaacgacacttgatattttagtttcaaattcaaatttgataacttgattatattgaccaaatatgtaggacaatgttgcattacatacttccatccgagtcttaacatataagtccagcaattaacaaacaacgatcctcgagctaagcccagacatgggtatgtactataattcttctataattagataaatacaacatcatcaacaactaaaagaacattcaaaaaccatagaagccgcaattataataattagcaagtgcaatggtacttttaactcactcactcgattcaggggtaccacgtaatggcagctaataaccagtcaaatttttattccttacagaaatgtaatttagcttgcaaggggattaaccacctgaccactgaatagcaccattccagtcatattttccctgatcaagaacaggaatggatggtcagcaacaaagtctattttatcactcacacggagagatctcaacattataacagcagcagaagcagctgcagcttctgtgccttcttcattaacttcaacgaatgacttatgatatatgtccgaaacatagaggttctgacccacaggtgagtccaccatctcagtaagaccaccttcaccagagaaaggcaacaccagtcctaaaccttttaaagtatcagaagcttcgaacccaaaggaaatcttaaacttcggaatcataaagtctcccacttcaacttgttggcgaggaaggtggcgttctaaaaagccagattcagaacccattttttccaccaaagctggcaacccatccttagcatcaggaagaaagaagtacatggagaaacggcgcctgtcctccccttgcttgtaaggaagagctaataccttgactccatcgtatgcgcctacaacttgtttcttcttgctggtcatgaagggtactttgacagagcttccattaagaaggtggaagtcattatcttttgttttagaagcgtcaaactgttcactccaagctcctttaaagtataatgcattggcaaaatgagcttggttgtgctgtccactgaaccagagggaagaacctctttgataagcccattagtttctttttctgcccatgaattcactactcctgtcacctcagcagccttcaaaaaccccaagatcaatacacggaatcaattattgaaaaaactagcttgtaagtagaattactaagataactaatgaacaaataaaggcaaaacaaacactgtatcattctttccataaatacagagtggtataaatttcttttctatgttatcaataaatcttaaggagtgcttggtaggaagaagaagcggaagaaaggatatgggtggagagattactattagtgaatggatgtgaggtagagtggtaagtaatttggtaagatatctttaggacggaagacaaaagtgagtagattattctaaatgatcctctttctagtaacatgtccattctaatgatacttgagtaaaatttacataattattctttagcattgtataataaaaataagaaccaacccacatagtaattatacaaacaaaacatatcccaacttctatttctctcttgtacactgcacaagaaaagaccttctgcgccacccagatcattggtcaacaacgttaacagacgctgttcaccaaacttaagcagcatcattagttatatactgacgctaatgctttttaatgaagtcagtgcatatattgacccaagcctctcgattgcttggtggcctgtggccactacatttgttcctggtttatcaatgatttccctactccctactgagatctattcattaatttctacatttgagcactatatcctatcaccttcccctcatacagtccaaccaaatggatcctaaatgatgtgagctatcatagtaaaaggggcaaacttagaactttgtcaaattcattgatcctcttgcattctacatagcaataataacctcatgaaatccaaacaaaagttcagccagaaagaaataaaattcaaattgacttgaataaaattgctcttgaacgatgctagataaatcgtctgaaccaaaataccattgtcaactaagacacagctactgatttaggaggtagattagaaagatagccaatttgccatgcgtgatcatcaaagggagtaaataacttgttatgccaacataactgacacaacattatttaataaattcactacatttcttcttcttgagatatataaagaactaaaatggcacccctcacaacatcagaaaccttcagtatatataatgtatacagaaatggcctaattcttcgattccaaactttaataatctatcaattttagggccaccaaacaatttcaaatgactacatcacaaaatccataacccactaaaattaggtgaaattaacaaaagggggaaatcaaataaaacaataacttgtgttgaaaaaaaaaacccaaaacaattaagagactaataaaaagttgaaatgagccgatcacaaagttcttaccttggtctgaaaatctacttgattcacagtcgccttgtaagtattttcaacaacctgttggaaagaagacttgagaggaagagacctctcgacccaagcaccgttagcgaaggacaagcggggtccaccggcggaggttccgtcggcgagtacgacggcgacaagctcggaagcgaaggagttgaggtgatcgctggatttaaactttaggaaggagagaagctgatccaaggtggaacctttagagccagcggcgatcaggctgagcactacatggatcgaagaaggagagaagaccacattggagtccttgccatgggtctgaaggaggtgcttggtgaggctcaaagcgacgtcggtttggttgcttacggtttctctaacatccattgattgattgatttttggtcttctcttcgcaacaaaacagagttgtgtgaatttatttgagggagaaagataataatacaatcaaatcaaccgacatgacacgatgacattagtttaccaaaatgccctcatcgtatcaggaaaaacgacgacgttttagtagattgcttcggtgaaaagaaaagaatgaagcgtgtgttcccacttttgtagatttgacctgttgactgggagttcagttgacgcgtgttccccgcgtagaaattgaaacgtagataaacttgtcgtttcactaaacaatgaaagtataacctcaaaaatgtaaaagaaaaagaaaacagtcctaagtaaactagctaaatagtaaatactatttatttagataatgaattttgtacaattttcaaaaataaaaaatttaatttacgttttaacaaaataaacggtttatttaataatttttacaaaatataaatttaaagggtggcatatttctctaatatcaataaactttatgagaaggcatttttatgtgactgattcgaatcataattgtttgggtagataagatagttgtagactctgttctcattttttagaattaacaaacaagtagttatctttttaattagtttttttttttttttttgagggatctttttaattagttcattgtttagtattacgtactgtactacgtactatttgcatggagctgatggtctagctataaattcttcaatagaatgtacagtatttctttatataatgggccttttgtgcattttgggcttttttataataagttgggcttgcagatcttatcccacaacagaccgaccaagatgtgagaggtattaatttgaggaatacatcctttttcttttgtagaatttacatggagtatgggtttttaaaactttttatgataaatatggcatatttaactatgaaccttttatatggcttttttgaactttgtgcatactctatgggattttaaag

SEQ ID NO: 299054 - DNA, 3348 bp, Cannabis indica
tatcttggccaaggtagaggttggattagcttatcaagagcctagttggatggacctgattgtcaattacttgactaagggagagtttccccaagacatggcagcctccaagaaatttcattaccaaagaaggcttgagtatgccttatctcaggtgtgtttctcaccctaaatctaaacaaataatgaaggaaattcatgaaggattttggggggaccacactaggggtcctagtttgtctaaaaagattttaagactagggtacttctggcccactatgaggaaagaatgcatagactacatgagaaaatgtgacccttgccaaagatttggaaacatctcgaaggcccctccaaatgaattcacattatgacaagtgcttggctatttgtagtaggaggcattgacctcatcgggtctttcccaatgggaaggggcggagttaaacatgcaatagtcgatatggaatatttcacgaagtggatagaagctaagccaatgaactcgatcactgctaaaaagaccctagattttgtggttaaaaaaattatttgtcgatatggactacccgacatgatagtctcagacaatggaaaacagaattaacagtgacatattcacataattctacaaaacatgtagagtcatcaaaagcttcttcgcggttgcaaggccacaagtaaacagtcaagtggaggttatgaataaaatattataggtcacactcaagaagaaactccatgcttgtaagaacaattggcctaaagaattgccgcaagtactctgggcatactgaaccaccataaacgacaacttgacactctcttttctcaatggtatacgaatgtgaaccaatggtcctagtagctagagagtattattccctcccatagatggacgacctacgacccaaccacttatcagtcattgctacaagaattactggatttcgtagaagagatttaggaggagtcacaaatacgtctcgccgcataccaaagaaaagtagaaaaacactttaattccaaggtcaaaaatagaatgttctcagcaagagacttggttttgagaagggtctttcccactttgtaagacctcagagtgggggtgttgggcccaaactgggagggaccttataaaatcgaagactaaataggctttgggacctataaacttaaacgaatggatgggtccctaatcccgagagcatggaatgttgatcatctctgaaaatactatcagtagttaagagtttggtatttaatttcatcttcaatttttagttaaaggaaccttttgcaagttaattatgaatgctattctccttttcaattgtaaagacaagttctacaagtgactcaaaaagagtaatctatttcagtcacttggggtagtgtataaatgtaattaaaatgcataaaaatcctaaagaagaacattatcaagaaggaagcatgaattagaagcataaattaaaaagaacaatggggataggccaataaaaatgtctacacaattaaaaaagattagaaaaattacagtaaaaactccaaatcaaaaggtacttttttcagacaaatgccctaagcttgcagaggaagacgggggcgtagtttctctgccaacttggcatccaacctcttattcttctccaaaaagaaggccaagatagctttaggattagaaagggagtcaagacgaggctcaaacggttggacctcaatcacatgaaaacaccatcttcatagtgtttgacacaatgcttgcacgtactggggccaaaaaggacggcttggtagatctttcagcctcctttttggctaaatcctagaattcgtagagatccttgagctcgacaaacatatttgcaacagctcaaagatcgtccttatgtagctcctcgagcttaagcaattttgacttaagattctcaatctctttctgggcctgacgcatgtctgtgtgatcatgatgagtttgagcttcttgaagagtagactttgcctcatttgcagccttctggtcctattccttcagtgccttctttgctagaaattcatcattgagcacctcccgttgctcctcggcctccttgagcttactgagcacctcggtaatgccaccttgagccgcaacaacatatccttagtctattaaagtcttggacaaccagccaaattcaacaataatctgttcattttaaacaccacagttaacaaaataaaatagttagtaaacaagtcgcaggatgtgcaacgacttattgaggttagtgccacactcatatcctaaatctggaagagtgggctggatgaagcgcacacaacaaatcttttcgtagggagctgtactaagtcagaggcaaaatgactcatcattttttacgcaaagggagccaaggaagatcccaggaagttggagaaccagattatcatgggttccaagttcaagtctcaaacctgaaaagcgtactccccacggagaggaccatcgtaattgtccatcaactatatatttcctcaaagcccccgcttttgcatttcccttagtctggtcatcaacagcgaaattgcgcttggctattcagagttgcaagtgaacatcatcagggtggacaagagtcaaaggaatggactggatacctagaaaaacaattgctttagaagaaatccccgagtcatcaatactctaagaaggcagcataacgaaacatagtaaattgtaacttaaaattatataagacgtgatatttaattataccaacagcattttattacataaaaaaatattaactatcactaatacttttagcatttcttcactaatacttttagcatttctaacttaaaaaaaaaaaaaggaatgaatgtccaatttttttttgtttaataagatttcaggaaaacgtgagagccggaaggacccagatgaggatgtgagggtgtaattaatttgttaggtttatgtttatgtttatgtgtaggtaattaatattgttaggttgacatttatgatattgctcaacgttcgtcataggatattgtggaagaggtcttctctccatattactttaccatatttataaaatttgacaactcctttcatgatcagtatgaaaatcaaaactctatcttcacttttaatttttattttattttatttattgttttttctcacatcattaattctttactcgtccaatcgtcttcatcttcatcttattattagttattgagcattgttacagtgtacgtggtcaacaccatgaattattatatgtgagacttgctataaaaattatacaaataataatatggggattgagatagattctatgaatacacata

SEQ ID NO: 299055 - DNA, 4173 bp, Cannabis indica
aattttttgtaattttttgaaaacaaaaaacagaaaacaataccaaacatgctcgctcatcatatcttggtgcttttacgaagacaaataatcatccaatcataatatcattatccataaccaacccacatggtgggttggttgaatcaagagcaagcatgttacaatgccgaagagagaaacattttctaggaaatacctaaagatcataacatggtggaattcatgtgattttatgatctactttcaacgaaatgaaacagtctcccacagtgatttaagtgaaaacaatcttggtaattatcaaccagatgtcaagcgaagaagacttataattaccattcaagatttttactagcaggcacgggaaccagcttgactatttcgtataaagaagatttatcaaataacgtctttaactaccttacgcaaactgtctactacatgcagcttttcatacatttctgactcccaacaactttgtactaaggtagcaacataaataacattttctcttccgaaatgtacacagataatagcatatttattggcttctaccaaaaataaaatacggagttattgtcctttcacggcagaattttgttggggtacttcaccaacaacatattagtgacaaacttttatcaatgcagaaggaaacaaataacgtcaaagaacagtttgttaaaatttgaagataagatgaatggagttccatctcaaaaccaattgactatgggaggagtagcccattcatcttatatatcacaatatatttctacatattagcaatgcgggactaactcttatacagtttgttattaacccaagacaagctcctatcccaacactttcctctaatcaaaatcacccgaactccctttattgttctaaattcaaatatgaaaaataaaagaaatgtaaatggaattaaatgattttagaaaaagaaatttgttttttccttctttcgtcaaattattcattttactaccctttcttttttttcttttctttagctttacaaaactaattagctttgatacattgtacaaaatatggcaaaaattgtcttaaaaatgctaatctacacctatactattttgcatcgtaaatacatataatcaagtatatggttcatatataaatgtgccataaataaaacaagttatttctctctagtttagggaaaggaagaaaaagaaaagaattgtgcaattttagctttctattgaataaatacatatttttcacaaatgctttagttggcaaacatgatctcactttgtagtttgtaaaatggtaccttgttagcaatggtttagttggcaaacaaatatcactttttttatatattaattaaaataaaatatacaaatatatatatatatatatgaacatattatatattaaaaaatacaaaaaaaaaagaaattattaaaaaaaatagtggggagtattgtaatcaatccactcttggtgggttaatataatccctggactaatctaattgataagactatactgtccaatctttccatatccaaaaataaaatgcaccaaacataccgaagcataaaatagtccaaaataattagtagcgaaattcttttatgttataaatgttatacacttatttttattttttggtgataatgcctaaagtttatttttcaataaagcctttcagcccaagtatcccgaccagcccggtccacgtggcggatgcggattggtcagcaatctgcagtcagacttaccaaccaacccgcatccgccatgtggattgggctggccggtatactcgggctagatagcagggttctttattttatatacaaacttgagatttcagttcaattttattgtcaaatattttattatcaaatgccaactagaattgctgaacacctgtatacatatgatactaaaattttgaatcgaatgaaaacatgtctgtatacactatggtaatataattcacatttaacggtaaaatttaattagcatccaaaatttacaagcgaaaatatttaaggggtattgccacctaaaaaaaaataaaatcaaagagttcaaagtgtataaaatttaaggtttcatcctcaattacccaaaaagaaaagacttacagtattaaattaacagacaattattaaatcaaaaaaaaaattatagactaataactatcttccccaaaatagcttacacagaagggaaaagaattttccaggaagaaattgcaatttacagagatacaacaacaaagaaaggttcagataggctgaaaaagaaacgaagaaacatccagtttcagagttagtggaaaggaaaatctcaatctcggaaaaagggagaaatatatattgacgaaattagacctcgcaattcgcaaacagttgaagatttaagagttaggggcattttagtaattagggaagtcatttctgcaactctgtctgtttctgtaagcaaatctgagagtgctgttcttcatggcgttcatataaggatcaaaatagcaagagaaattgctaagaagaacgaatccaagtatcgttaataaaaaattaaaacataaacaagagaacgtgtaacttaaagtctccgaatcaaatcgatctaacatataagcttaactaaatctaaaagatcccaagaaatggttcatccaattcagtcaaatcaatttttctaaactaaaatcacagttcgttctccaatatcacaggtagaaagagggattcgcagacttaatcgatcaaaatctaagattcaaaggacgatacattgaaggagaaaaaaaccagatttaccttcctgtaggtggtgccgtcttcctcaacggtccagccagcttcattgcagagagctttaaggacttcgttgttgtcacagtgcttgggtaacttatagtttccgtacatcctcagaccggagtagatcttcgcagcgatcgccctccgacgccgttccctccgcttgttgttctctctctccttccacgtcggcattctcgtgccggacgtcatgattgccctatctaatattttctaactggaattttcttgacaaccaaacaagttgatctagcgaaatcggaccggaaaagtcacggggttgtatggaccggatgttggcgggcggtttattttttaatataaatagagtgagtctttatattagagggcaagtggagtggttaatctttttaatcatatataaaactgagagagagtagttttggaaatgaatagaattgtagctaaattacatgtgaaacgttattttgcccaatttttttgtggaaatttactaaagttgccacttcatttttcgtttttctttttttttttgtgttttggtttgcgcggaatcacggggattaacacgtgtttaggcttttcataaagaagaaccgagggctttcaaaaaaaaaattaaataattaaaaaagaaccgaggtatgatgttgggtcgggtcgggtctggtcgacgggtggggtgttgcccttcgcagtagttgctcgcctggtggtcttctgattcacaatttcaaatccatgatcaagaaacagcaaattattattattatatctatatatatatatatggtgaaatacaaagacaaaaataaacgaggattctgattatatttttagtgtaatttgcgctattaatatttaagtttaacttttaattataaataaactaagaaacaaatcgcacttcgcgtgcggttgtagtttatttagtgaaattataaaattatatgaaattttaatatttttatataattttttaaatagtgagtagccattaaaaaatttattttttaactcttaataataaaagaaaaaaaaaataattaattaatctcgtcgttctctcttgaacgtgtgtatgtcgttctctattgaacgtgtatgtttgtcttttgctgttcagatttgagtgagtgtgattgtcttttgctgttcttatttaagtgagtgtgattgtgtcttagtgttgttggttaagccatggcttccagtagcagaaacgatggggaactatctaagaaatgggctgatatgtgtctggacgaagaagaagatacagaggccattttcgacgaagaagacggtgatgaaacagaacccgatttggacgaccgctggtgtttgatgg

SEQ ID NO: 299056 - DNA, 2025 bp, Cannabis indica
atagtatgtaagactgtggaaaatcagcatcaaagaaagagagaaagagatctaaattcagatcttgataatgctctgctacagaaaggaaccaagggctagagatctgaatggaatgagtcattatattccgctgcatccaatgtaaggttttcttaaactcttatgtgtttattttattgttttagaattcatattaggatgttaataaaacatacttggtagtaaatctagatcctgttaaaatatttccaacacacatatggggcctcccccgttcccacctagagtccctgctcttatcaacgtttccatcccattgccattgtcattgcctgctggtgagcatgtattttttgtaacaaattatcagttcgtgttcagtattgtgagtttaaacataacagtagttacggttctaataatactttgcagagtatgctttccacctcagccaccgtcaaatatgtacagtcctattgcagatatgtccaatcaaattatcaaacaagttaattactattttaggtacccttttttgttcacttcttatatagatagtttattaattttctttttcttaccctcaatttgactgctaatttatcaatgttgcagcgatgctaacttagtcaaagaccaatttttaaggtcaaacatggatgatcagagctgggttaaaatctcgatgattgctaactttcctaatgtatactcttttatagtagctagggagtagattaagcatctactttctctaccttaacatggaggaaataaattatcttagatgaattcaatgacttgcttgtttgtgatttttctttttcctacactagactagactaccctccccatcatttatgctagccccataacacatataattatttttgagatatgaatatttattttgtttgattgcgattgagctttttgggatacagttcacaagtattgttgagtatggagtggagaaatggtttctctgaatttctgtaggaagttgtacttctctatttggtttgttgatgccatacttcttttgtgttggcaattttctttggttacaatttttttctttgtcctcttacattaatatattctacgtagctgttttttgtttgtttgtttatttctccaaacagttgcaggatttcaattatgcattattttaattattgcctctcttcacataaatattacaaacatatattcattgtttctggttcaagatatgatttgcttaaaatagaacgacccaattgaccacttgagtaagagaaactaaagaactctaatacatctaaacatcgaataataaaataatcacgatgttgaatgtggtatatgtccttattgacaagttagtggtggtgaaaagaaagaatgccagtacttattaatgtgtcagtaattttaaaaatgaaactagagaattttcaatttttaggatggctaatgttgtagtttactttaagtgtttgaagagagccaaatcgatatcttgtctttgtctatgatattgtattggttgtgtatggtgcaaatatctttgtaaaactacttttatttttctccctatcatatcaaatgctcttcggtcttgcagatgaaaaaatttaagaatatgcagttaatactgaactccctaaaagcttcttcagttttggaagtccaagtctattttgttccacctaaactactcagaattgctgatcatttctttctagtcttggcatggtctaacacaacactgttgaaattgttgcagggtgacaaggtgagaaggcataataattggatgaaatggtcaccgttacaggcttcgggtcgagtttccactaagttaggtttactatcccctgctactaattccagttcactgagtgctttcgaatattaaggtagtctttggtaacacttttttaattagttttctgtttttaaaagtagaaaagtaaaaatatttttcaaaaatatgttctttaaaactgtttttacttttcaattttataattagaa

SEQ ID NO: 299057 - DNA, 5523 bp, Cannabis indica
ctgaatgcaaaattgatcagattagcgttgatgtaaaatgtagatatagtagcatttctttgtcatttgtattagtatatagtaaacaatgtcagcgcggcgaagaataatcccaactgggaaactagatagctaagctagctattagttaaaccctaacgcagacctccgaaataacaatagagtgattccacatatgtgtcaagatatccacgcagaaagaacaatagaatgattccccatgtgtcaacatatatcaaattcaaatgcaatagttaactgacctttctatcaccgagcatgggcgttaatcctccagggggatccttctcaacagtagcaaaaccacttctaggatcactagtttgtctgaaacacaatgtcgtaaacaaaatgagaaaattcatcattgtattgctataaacacgcatattattagtatatctcttaaaacggaaaaattggtatcactcttcaacagcctcacagattcactatcttaagagtgaaagtgatttaaagattttattaaacttgggtttaaaaaaacaaaagaacaaaacataccctggtttgacatgaccactgaggacaagatacggagtcttcaactgagcttgagcttccctcatccgctccacagataaagatggcgtatctgaactcttcatctgcttcaacttcagctcttcatggaattgcttcatccgcttttcttgtttcattttgccaggtccctttccatggaacttatgagagagaattcgaaaggcttccttgggagtcaactgtcaaaataaagcactagtgagaaaagagatgcttcttcatgatcatcaaaaatagcaagacaaagaagtataatgtcaaaattcaacttattagttatgcaaaagtaatcaatcaaattatttaatataaaattggtggatgaatggctatagaataagcgtctaatataaagttaaaaaaaaaatccctttaatcttgaaatgagtgtttggatggacatcattcacttgtacattgtgagtgtccaaacacatctgttgattggcatggacccaccatgtaaccctattgagtcctagccgatgcacaacagagtaaacactacagcctgtaccttaagttgattcttaatctaaaatataaattcgtgagagatctataacccccaaagccaaagaatttacataaacatttaaaatcatatataacagagtatgtgaaaaggtacaaaggctaatatgatgaaaaatgcttacaatacgcccaaattcatcagtcctttcaatgcggatgtccttttcttgatagactttgggtgggtgagtctcctttgaatggcccaaagatgatgtacgagtgtcatccctcttttggcgaggtggatgcatccccttcttgggctcatcatcatcatctccaacaatgccaacaagtttactcttctttttgtccatatttctgccaccccaatcaatgctttctttcagcgttcctctctctttaagtagcttcaatgcacctgacaatcctttaccaactgaaacttcgtgaataatttcatctggaacaatctcctccttatcctccttactgggatcttcatctttttcagtatcattaacttcagaccacccaccaggctcagttttcatttcctcatgagaaacttctggttcctcatcttcttccataaaaacatcttcaccatcagggttatgggcttctgaaatataaaaaacaaacacataagtaatttgtttccattcatcacatcacatgcagtctaagttttctctaaatctaaaatatgagaacaagatttgacaccaagactcccccaatctgttgttattccttataaaataactcagagaaaatgagaatacagtaccatgtatgtacagtaaatctaaaatccaagattattacttgtgaactataaacagatccctattctcaacaaattactttgtatttttattatagttaaaaattaaacataaatatacctttttcaagctgaagaccccatacaaactcttccatctctgtaaagacaaccttgttttcctgaagctctccagtgttaggtatttgttcatcagcagtctggttgttggcagtgctggcagcaagaagtgcaaaagcctgaggaccagaggacgtatcatctttctttttgagagctaatgcccttgctcttgccaaagatttatagagctcttcatcatcatcatctgcataaactgaatcttcctcctctggtttggagggaagagtttgttccatgcgtaatgatttagatgcctcatctgctttagctaatgctgtctggtatgcaatattcctcctttcagcctcagctctctcctgctgttgtttaacagactgccgcttcccatcattacgggaaccaatatcaccaacacccagccctgcagaaactgcttctgcttcaagagcatctaggtctagcttatcctttttccgcaaggatttctttttcttgggctttttaaactgaaccatttcttcagaagtatagtaatctgatgtcgtttttccaggcaagttgagagtttcgaagcgattggttgttgaagaaccttgtaaccttttacgaagctataacaagaggaaggggggaaaatctcgtgagaaaacatactttggcatatgaaaacacataacaatataaacattaaacattgagaaaaggaacaataagagatattcaggaacaagaagagaaagtccaaaatcatatttaaataaacccaaacactgtcatgtttcataaagcataatgatttaacaaccaaaatgagcagaaaagagagaacagaataaattaatgaatcaaaggaaaagaagagaaaaaaaaaaccttacaactataaatatcatctattttgctattgttaatgctaatgaaaattaaaagagaagaaaatgatacctcttcaagtctcttctctgcttcattagtaatgcgtcctcgttcatctagagttatcccctgagtagaattatcaatacaatacagtacatcagcattcatgcattttggatttgagaaataaaaatataaagtaacaaaacagaacaaggataaaagaaacattagatgtgaaagtaaacataacgccagaaaaagaaaaataataacctcatctgttgctggatcgtcatattgaggaagcattttcttctctacatttggatcatcattgaacctaaacaacaaacaattaacaactatgagagctaaaaactttcaagaaattaattactatttaataggatacaacttaacgacaaacaactatgagagataaaaactttcaagaaattaattactatttcagagaacacaacctaatgaaagtagtcatggttcttataagagttctatcgcacagcaattaactaatgtcagcacattgaagagctaagcgaacagtaaaaatatgcagtagtaatcttacttgtcagcatatgtccctggtttcttctttgctgctttgtaagcatcatctcgctgcttctgctctccaagttccacgttttcaagcatatcgacgtctgccatgttagaaaaaaagtttatcttaaatattgagatgacatcaaagagttcagagtctagatgccggaaatacagaagatattacaaagtaaattcaccttcattaatatcgccatcagccagaatattctgatctttcagtgtcaaaactactgcaccaccttccataactttgtcaagcccgtgaaggactttaactccagctaaatctgaaccagatttgaacttaattatttttttttaattaaattagtaaaattctgatcataacatatcaggtcattcaactaaaatggtcattaaaaaaaatgaaagatagttatcaccattgcacattggttcttaaattaatttccctattaccaaagtgttcagaaagcataaccaggtttaaattcactgactaatgacccaaacaaagacatatgagtactcacattagtagtactatctgcacttttttgtgctttcatgtaaataagtatcatggatgaaacacaatgtgactataaataaatagctccaaattgattgattaagtacacattggtatacaagatggactaacgaaaattcccttttgtatcttaaaaaccttaaatcaactagtcagcactaggtacttcaggagaagtttaaactaaaaagaaaaaatgcttacgatgatgagctgtctcctcatcttcactttctccttgaacaatgttatcctgaaaagaataataacaatacttaaaaacatatgaaagatgataaattcatttccatctatacacaaagcaaggaaaaatagctatgacaagcattaacctgttcctcaaacttctttgacagctgcatagccttctgttttactacactctttttcacttcaagcttgcggctcttgctaacccaagcagaaacttccgaactatcttctgtttttttctttgatctttcttccttcattctgagcaaataataagaggaaacactagtataagaaaaagataaccgcaagtttgtaacacaaattaccctctggttttcacaatcaatgacaataagtaaatacacagaaacttgcttacttcaaaatacgctcctgaagctctgctgatgttggatgtgcttcacgagctccatcgtcatccattcgttcatcttcagtgtactgtgaagacttcccttgcttagcatccctatccttgttattctcataactttgcctagatctatcatcttttcccccatccttactccgatcgtaatctccatctggactttttctactcactctatctctggacttgtccttctcctcatctgcttccctttccttctctttaatttttctttgtctatatccttgtaattttctcttcccttctccctatctttatgtctctctctatctcgttctctctctttttccttggccctgtccctttccttatccctatccttgttcttctcctttcccctctctttatcccgcgtccgatcactatccttttcaacatccttatctttcacacggtcttttcgatctttatccctttcccgctctttttctctattcttttctcgatcatgatctttgtctctaaccttattgtctctactcctatctttctcccgctcacttctatcatccttcttcctctccttacccgagcttcgatccttttctggatctttagcctctttctccctttctttcaatgagtcatcaccactcctcctcgacctatctcgctctctacttctatggtctttctcttcccctcggctactcttcttcctatcctttacatcatctcgctcctcacgctgttcatgctcagaccattccatgtccatatctaagtctacggattccaaaatatcaacaatttacagatttttatcaatccaacagatccttgagtagttaaact

SEQ ID NO: 299058 - DNA, 1974 bp, Cannabis indica
aactaaaaagttaaaaaaaaaattaaaggtgcaaaatcgggttggtcgagttggttggtttaattgggcgggtcggacctattttcaatctgcccaattaaaagattgggcagtttgtaattttttgagttatttcggtttgtaatttttatcgattttttcggtttagtttgggcgggttattcggtttggccggtttacgaatttttttgtacaaccctagttttgatagaacattgctaacataccatcactaccaggactcttaaccggactcatcgattttaaggctacacgtatttcatctggtgtaaaaggttgtgtaaggttgccattcattacagcagtgactgtagtgggaatggtgtttaaagtgtgctaaagtgtcgatgagtttatggaagttgctatgaaaagttcttgaaaataagctgaaataattgttgttataccctgctttgagtattttgtaacaccagctacattttttaatgatttgattgcattattgttgcgtctcgaggtagcatgtgcatgaaagaacttcgtattttggtcaccattttgcatccaatccactcgtgatctttgctgccaaaaagtctcttcttgtgctaataaatcatcaagaatggtctatgaattgttgagctcctccattgagtcatgtgtcctgttgttgttgttatttattgcagaaattttttgttgcatttttttaatcccctgcttcatattcccgtacttcctggtatgccaaagctgtagtgatgaggaacagctttgcagattattgataaaaagctctgaggcatttgttgaagttgagaaattctagttttgctttatgataggagcaacttcaccatccttaagccacagttttttgaacctgaatcgagaatttcgcttgacttgttgagtcgtttgattgagagtttggacagtaacaataatagcacgatgaattgatctgtagaagtccaagtgatgtgatcaaaggctcaaactttgttgtccatttatcattaacaaagcaccagtcaagtatctctttgatcgtatcagctttatgcgaacttttaatccaagtaagcggatcaccataaacaggcaattcagacaaataacaatggtctaaagcttgcctaaagtcttccatttgtgcttcatttctcaaagcacccccttgcttgttagcattagaaagtatctcattaaaatctcaaatcacaagccatggtaaaagtggagcaacatcacgtagtctcgctaaagtgtccaagaatgagatcgattagattgctctggagcactataaaaggcagtgaaatgcatagtaggaccattcccaaaagccaaataacagtcaaataaagtagtgttaaaatttagaagtgttacattgacatcatcattccaaaggagtaaaccacctcctagacctaccctaaggacttcaagtccattattaaaatgtaaagcatgaagaaaacgagaaattacattagaaataagtttaatttccataataaataatacatgaggagactgctctttgacaagcaaacgaagatgaaggaatgcgctcggattccccaagccccgcgcattccaactaatgtttcatggctgtttgcggggctgtgaaccggccgctgctgaattgtccataaaacccgagtgatccacttctagaccagaaacactctagtttggctccaccccaggtgacaaagttggagagagcaaggcttttgttggtcccctgcattgtttcaatgttttcctcagagagagattgtcagattgcctctttatgattcagtttggggatgtgttttccttatcatttcacggagtactttattaataattctcccatatattgccacaaaataattatcgcatatttaatagtacgtactctttacaataaaatagttacgaattacttgttgggttttatgccct

SEQ ID NO: 299059 - DNA, 1812 bp, Cannabis indica
aaaagagagaaaaaaaaaaaaggcaaatccaatagtccaaacacaagaatctcttgcctcaaagggaaaagtaaaggctaaactagaaaatggctcaaaattacaaacacggtaccaaataacacattggtacaagcaattgagaagttaaaattgcaggaaataaactaaaaagaagttagtaaggttattaacttactgatggcagcaagttgagcgagaacggtcgctggtgcggaacgctgataggatcgagcttgacaacgacagaggaaaagcaaaaggaaatctagacttcctggaactttggttagattgaaggttgttaggaatatgaaaagtctaacatcaaagaagaaaaatagggggtttttatgcaccagccaggacgacataaatcgccattcattcaaacgatcctaacctcacaattaaaactcccgtgatccaatggttcgggtggtagcaggcatatggactagcccgagaggatggttgcactaatcagagtgtcattctgacgtcctgcaattaagggcatcaacattcattaaagaatcgaatcgttttatcaaaaatgaggaaaagtaatgagcagtatttgaaatgataacgtgccgcatgatgtcagcactttaagaggcacatcgcaagtcccatcttgcaaaattacaaaaaaaggacttggggtaaatgttccctaggatttctcccaaagtacgagccagctcaggaggaagccaggtgacaatgagacccacgttacatggcacgtcgccttaattactcttgaagtccattatctcaaaggagtaataacgggttggtcatctcagagaggatccagctgaaccgcgagcatctcccctttgctcctctctgcgagtgaagtatatccggaggctggtacaggaagactaataaaagatgatatgtcactcaaggatcaagacactgtatatgcatttaatgcatcatagggaaaaacatcagacgccttactctgagaatcatgtttaaggatttaagcccattattccatgattttacgagcctccatacatcaatcgactggtgcataaatgaggcgtcaagtcataaataaagaataaataacatcccaccaagcaccaataaacatcctaaaatccatcataaaataggcaattatgccctaaatcacgattgggaaattgtgccaagcatggtgtaaacaaacacaacaatattggctttttacctccatcatgggcctatcaatactccaatgataaacagaaaagggaattggtggagaaattcctaaaacactctcattaatacagtctcgtggactaaggctcattaatgtcccaaccacgttaaaaattatctcttctcatattcattaattacttcataccactttaattactggttgtcgaaaatctcggtcaacaataataatttttctttcgttattttttaagatgtgcttgtgaatataataactttgaatatacttgtgaatttatttctttgatttactaatttttaaaagtaatttttttaataaaattgggcaaaatttgatgttagtcaactcttataggataaaaatactgattattaatagtaaaaagggatttttacaaaaatactagattttaggcaaagtttacaaccgtaaaacaacaaaatagtttaattaaaatatcagtggaacaataaaaaaaataacgggttgagatgcaaaatgaccctaaatttaaaatctaagttagtaaatgtccctttttaaaaaaaattgaaaaaaaatggccaaatataata

SEQ ID NO: 299060 - DNA, 3662 bp, Cannabis indica
tgaatttcctttgaattcaaggcagctttaacctctaacattgtcaaggtttctttcccatatagtatggtatccataaaatgttcataacattttggtagggagatcaataatagaatcccttgatcgtcatccttaatcttgacacatatgtttctgagatcaagaatgattctattgaattcatcaagatggtttctgagattctttgtatcatccatcttcaaggtatacagcttcttcttcaagtagagtttatttgccaaagacttcttcaagtagattgaagcaagtttctcccataaccttattgatgtcacttcatctgaaacctctatgagcacttcatctcccaagctcagaaatatggcaatgtgtgctttaatctccatctccctaatcttcttgttgtcttcacccagttctttcaattcttctttgtctatggcctggtgaatgccttgatgaaccagtaatgctttcagtttaatcctccataggctaaaatcatttgtgcctgaaaacttgtctacctcaaaacgtgcggaagtcattgctgtccagtaatatttatcttattaagatcttgagctgttcttggtaaactcaaacctgaagctctgataccaattgttgaagaaaactcgaccaaaaacacaatgacaaacacaaaaataaagtatagaaatgagcacaaaaatgaggagcaaatgctatagcaatcaaaatgaattttacaatcacaaaaatagtaaaatggagatagattttacatggttcgaacatgaataacaatttgttattctacctactccacgaccagaaacagccttttgggcattaatctttattgattgacaatgaatcaccaaaagttaaaacatgaactgttaagagtagttcatagtatctaaagtgaagctttgcttcatttacaaagggacacgcttctctctttctctctcaattctggttccctctctctctctctctcaatagcacacactgagtttttggatcttgagttcgattggagatgatcccttttataagactttggacagtgagagtagatgtcataactgtcataacagaaagttagttgtgacagttatgacatgtttgagctagtattttgcaagattcagtgaatgtggacaaatcaattgtgaggccaaacataacattatattatgtgaacaaaggaaaactacataaaacaaatttatatatatttttaataatatagtgtgtttgaactacatttataaattttaaaaggtaatttggagagtgtaacctacaatcatgatataattgaggtcaaacagcatgctttaccctatagagtatagtcattagatatactaccaagcactaccttaaccaccttgagatgacacattgattattaaatttttataattattattaatataataaacaagattcaatattaaattatactagtagctaaatgatatcttatattgctaagcaccatgactacccattaataattttcagcttgatatgataatttgtgttctatacacgatttgatgaacaccacaccactacaatttgatatagaaaaatgcttaaagacactagttttgtctagctccttctatggtattattattccaaaaatcacctttatggcgtggcacaaagcaagatgacatgtggcggttgatagtgagttgggacggtatatagtaaagcagtaagactgcccaaaaggctttgcgtggaaaaagaaacaatatcgacaatagtactctatgaaaagagtcgcccgcttagagagaataaccagatatcctcaatcagcttagaggatgctcccatggtggcatgtccgaccaacaatattgcaaagatagaaattagattcgccttaactgcccaatccctaaagactaggtcattttagatgcctacaattgtgggattgagagaatcaagggaattgaggatatcatgggattggctcaattagcctttattgtttattttgtaattaatgtaatttattcacttgtagctctataaatagcgggttattcttattattcaggggcagattctaattctttcagagatttaattatcacgctacaaaatattatttataattcctaaataagaatatcaagaaactcacttgaccaggttattgtgatcttaatacttcttagagaaatacaatataaggggagtaggtcattaccaatatttagggtcaaacctctataaatcttgtgtgtcgtttatctaattatcaaatatctttgtaatggttttattgactccacgtcattaactaaaatgaggtcaacattttagtactttcattgagagcctgatacctctttgctctctacaaaatatttgtgtcttatctattttcaaatcatcttcgattcaagaacaatggttaaaacaaggagggctacatctagtcaactgcaggacccaatgagccactgatccaaatgtctagatacccactgacattggaatcgataaaaccaatgcacgcctgccacctcgcaacagtacctctgtgggagctagggctagagactcaatttctacaggagttaggttaggagtacagcaggcatcaccctacagggagagtgtctcctgtgtctggtcggacaatgtattcccaagaggcatgaagaaattgccttcaaccttttatcatctcttgatgtgacgatcgtagctatcaccaccgatctattcgaagtttgatgatgttgaaacttagactccgaggagtcacttgattgtttttccttagaggattcagaataaattaaaggctttcttgaagatgaagatgagctacttgcatggaaggtttaattattctcaaatattaattcgagcaaatcatcgtcaatcattacgttcacctcccccgaattcagcatggttcatctacaaaataaggacaaaaaggtaaaacattgaactgcttagatagtgccttcttaagaaaaatgcttccaacactctgaccaggcgagaaagagtatctagcaataagatttttgactttttgatgaaattttgaaagataaaggcttttgggatttaggagaaacttaaatttctaagaaaaccaaaattgggctttagaggtagtttttaggggcatacatcgtcagttgtgacaaaattcacgaccgacactattccaggagtctctaaaggatgattagaaaaccgaaggaataaaccccctctatgtcgtaaattattataaaataatcgaccacgtattaggggccttatcactcactctatttagtattgttggtaatcttaatttttttacaaccatcacactagggtttatctgcatcacttagcaaattataaatttttttaggatcatcaagaaattgctcacgttcttcatcaagcatatccattgaatgatcatcgaaataattaccgccaatatcatctacccggcgcttccctaatatatatggattatcagttaaatgtttgtcatgctaatatcatgtagtataacttttattgaaacctcttaaatacacatgatccttaatcattgtaatattttcttttaattaattacaacaatctactcatggacaatgaatatgtttggg

SEQ ID NO: 299061 - DNA, 1329 bp, Cannabis indica
attaaactatgctcgttagactttgatatctactaaatgatcatgcccctcgaactttgatatgtactaaatcatgtcccctgaactttaataaccttaaaagttcaagggacatgatttggtacagtcaaagttcagggggcaaaaatcctaattagcctttaaatttttgtgcttgtacattttttttactatttttatggttgtttttttttttttttaattttaatgtaattattttggtaaactattttaaagaaagattagagaaactaagcacatatcaagagtgtatacaattttttgataagaagagtgtatacaatttaagagatgaaaaaaatgatgaggtaacaaaaaagcttataggtggttgttttaattgatcatgatgacaagttagggctatattaggtttaggggtcccccagagaaaaggatgggctattaaggagggaccagagaagaaaagagaaggggctctttattgagagttagcttactcactcatacttggttgggaccgatcaacataaaagaaatgtacgaagtagttgttggacaatcagtctcaagccacaggctccattattattgttattattattattattattattattattgaaatactaagaggaacttggacaggtgtaattaaatattgtattttatataatttaatgtaataatttaaagtatggttagccaattattaaatgatacattaagaatgtactaaatattattagtaccaatactaatattattattattattttattagggatatgattttgtctctttcacggattgtaatccgtgatgtacgggagccgtcagatgagggaattatttgatcagacgactgagattgatctatgtgtaattaaggttaaaaagtagaaatgtaccctgatactcatttaatgtactctaaaacccatctaatataccacgaaatacatttcgtgaaagtatatcacggcacaaaatcatatccgtattttttattattattattattcgttgaatagtgatatatctgacaacattcactggcttaagtgaattattgttctgttttacacaatattaactcatgcactttttttactccaatcctcaaagttcaaccccctttgtcctatacagatacaaatacaaataccataactaatgattaatggattacttttagtctctttaagatgaaagatcactcttaagtataaaagagtgtaaaaattctttgatataaattctaaattagtaataaaataaataaaggacataatttgtcaataaaaaaaaattactgcatatatt

SEQ ID NO: 299062 - DNA, 2511 bp, Cannabis indica
aacaaaatgttgttttctagttttaaaaaccaattcacttttggttaatattttttttcaaaacactaaccaaacgtgacttgtgttttaaaaacttcaaaaagttagttttttgttctctatttactaaaaactaattttttagaaaacgaaaaacagaaaacaataccaaacatgctcttaatctcccaatccccacaaaaaaaaaaaaaaacaaaagcctatctatcataaggagcaccaacattttgagatgaaaaacaatggatcttaaactcttatgtgattcccatcaccactcccacctccaccaaactaagcttagcatgtcaatacataatataaagtaaatagttaccttatcagctctgtagcttcatcctcattggcaaagcaaaggtctacattccctgattcaagtagctctagaagaggttctctaaagttccgaaccatctgagcaatgttaaagactatataagattaacatattagacctgaaagaagtttagttttaagaacacgtcacacgagaggaaagtaatggagagaggaagaggaacaatcagataccagaaagaaacgaaactaataatattcaagatataattactcatagcattctagtgtaaaatcacagttacatgcattattactttgagtagatagttcaggtacccaaatccaatgactatttcccttataaaaagactgggcaaaatacaaacctcgacactatggtattattattttgaagtcgtttgtatggaaaaaggacagatcaactctttgatctaaacataaagagaaataaaggtaaggatacctcgaaactggccaaatccaaggacacaagaagaccctcttgtttggctatgcgtatagcagcttgaatcacttccaaattgaatatactgtacctcaatgacaaccactgtaagaaaagcatagataacaagttaggaattttaaacttattaatagtttactagtgtaccgaatttctagtgcttcaagatgcatcacagattacaaggctatttttaaagtgtagtaatttattagtacaaaaaagtatatgtctaaccttgcatcccttaaaatcttctttagttaattcatctgcctgaaaatgatacaaaatcacaggtaggtgtatgaaaatcatgttaacaaagaggaaatctgatagtacatttatatattatttttattattattgttattgtgatttacaacaacctatatggacacataaagaagaactcacctgaagtttcacagcactagagagacagggacgcattgtacgatttgccgaatcgtcaacaaggcaaacgcactgttcataacaacaagcacttagcaccaataatctcgagctaaaggaaggaaaaaaagaaaagaaaacgaaacagagtgttcaattggagctcacctgagctgtatggcccttcttcatcctcatccttgagagattcacaccacgagagttcatattactcacaaaaagctggccttgttgatcatccccacaggcaccaagaattccacaggagactccaaaccctgaactcagccctcgaatggtattggcaacacttccccccgctaaagtttttacagaagaagattcatcttgagacgagagattatgggtcttcagctctttcagtatatgctctagctcgtcatatgcaacctacaaagattttataggcaaactttcagtaacgcagtaatttcaatttaatcatattggatccaatacccttactgatcaaacacaaaaatcataagtgtgagcagtgtaagtgaaattcagttgacaagccagggggaaaaaagaataaaactcgttctagatcgatacatatgaacccaaaagcataataaattcaagaaaaatgagtacaaacagggaaattaacatcgacccagacgaggaaaaagaggtaaaattgagaaaattgagtgaggaaaagaagaaaaaggatagaggtcgaacgggaatggagccaccacgttcgccggagatttgatcaagcaaggaagaatcaacgcgggccacgtggtcgacgagggctgagggctgtagtccgagtacaacaggagcgtcaacgtggtcctggtggtggagaagggtggtggcagtgggagtggggaaggcttcggctcccatctccaggctgggggctgcgatgcgatacttggctttattattattattattattatgttttgtgttttggtaatgtgttgttaacctttccatatttatagacattccataatcactccaatcatcactgccgctaaaaaaagaagttcccactcactctctcaactctaatcaactcaccacacccaccaagaaccacaccacttcattttcaggttcccacattgccctcaaatcaagtgtttttacactctttttttttttgggaaatttacaaaatattataatttgggttaacttttacaaaatactgtcacacggaaaagttt

SEQ ID NO: 299063 - DNA, 3451 bp, Cannabis indica
tattattagtttatttgacaaaaatcagttcagggtcctatttgaacaattttagaaaatcagggtccattttatttaacaaataaaatgtctaattaataatttttacaaaacacatggtccaaaatagtatttacccagaaataatgtgtgtaaatttttcaatttttgtgtatatcatttataaatatttaaattacatattcatcttattttcaaaaatgatacattaatataaaaataatcctaaaactcttttttataaatattttaagaaaaatttaacacttaatccatcattttaataaaattaacatgaagtcccttgacttaaaaacaattaaaaataaaccccaactaaaaatttcactttataattcgtcacaaactatgatccatccttcaatcgataattacactgaatatcataaataaattaataaagaatcgaaatagaatatgcttttcaatagatcaaaacaattcatttttaattttgtcttaattaatttctcgatgccatcgtatataaattctactctttacgaaatggacaagaaaattagccaaaaaattaataataattatctaatttttttaatattaattaaattatcacaaggtaaaaatctttggtattaacccctaaaagaaactctaaacattactttgtaatatacgctataaacatctctataaaattattaattatctcattattacaattccgaatgccaaatgtactaaactcttattaagaaaagaatcaccactcctctttgctaccaaaatctccctagacactccaataatgggatcatttccttccccatcgctttccttgtccccctcatcatcaccggataattctttatcgggtaaaattagggtttatttagcctttcgatttagagaagcaaaaccaaatgttaatgtatctgatatcatgatatattgctatgacatttcggacaattcgtggaggtttgtcacattggttccgtgcataattgaaaatcaaggtgtaaaagattttgctatggtttcacttggtgattcgatttacattattgggggcaaactatttcatcaaaaacaagatcatacgtcagaagaagatgatagtgtatcatcttcggtgttgcgctataatgtgtgtacgaaccaatggtctaattgtgcctcgatggcccttccaaggtatgattttgcctacactgtttgtgaaaataaaatctacgtggcaggaggaaaatccacgttgaatagtgtagtcggagtctcatctgctgaagtgtacgatcctaatctcgacaagtggattcatttgcctgacatgagcactttgagatacaaatgtgtcgcggtgacgtggatgggaaagatccacgtggttggtgggtttgccctaaaaaccaattctgacgtaacaccacataattttatggcagagagatgttcagttgaagtatatgacacgaagacacgtcagtggggcctaatgaggggaatgtggcaattggatgttccacctaatcaaattgttgttgttaatggaaaattgctaagttcaggagattgtttaaaggtgtggaaaggtcatatagaggcatatgatttggaacaaaatatttggaatgaattggaagggtctagactaaattgtgaacatggaattaccaataatagtaccacaattcaacaattatatctcacaattgcacctattggaaactctttgtactttttggcgggttatcgaatggacggtgatgatttaccgagaatgaaatcaacggtctttaaatttgacacgtcggcttcaaatgatggatggatgagatttgagacaatagaagaggaaggagagaaagtactttgcagccattgttgtgtggttcaactctcctaaccatcttaacctttttaacattattaaaaaaaagttgtcttaaggtattatttagttatagtataagtttttatttggttttttctatgcttttttctaaaattataaataaattattgcatttgttttatgtttttttttttgttaatgttcaaataaattttgaaaccttactaaatataaatagaagttatctcatcaccttcttttatgtttatgccacatattatggtacttatttgtgtcatgagcaatggatgatcttttaacttagttttgtttttcttcttcttcaaactcaaagaaaaaatatacaaatatattaaacaaagatataaattaaaagccaaataaaaaacaataatgacaaacaataaactccaataatgtatataaaattcttattaaggatgaaaaattataatattcatgtttcatttaataattgcagaataaaaaattgtcctcatttttacctcgttttttgtttaattgggaattctcgcctgattaagctaggtactcacaagtctcagagaagtattatataaagtttttgtctctcgaactttaacatgtaccaaataatatttcttaaaatttttaggtcgttaaaaatgttctccaaactattgagatcatcaaatttaaggactttttgtccaattttactaacagaagtctaacgtgaatgaatgttcaaggagagtataattttggtacatgtacaaaattcaggaagtataattttataaatatcaaattgtttgggggttacgatttagtacatacacaatcgttatattagtaaaatttaataaaatcgacataagtctttaaatctaacaatctcaatagttcaagaaaaaattttaacgtaaaatttgacaacaaaatttaatacatatcaaaatttagatgacaaaaatcataactcactattgtttttttatactaaaagtataataataataaaagaatgaagatggtggttaacatatctagtccaaacaatttctttaagaaaaaaattaaaagattgcactttgtgttggctaagtttagcaattatattacttttaataattgaaaaataaagtgttcataagtagccggcaaagttaggttgcttgatcttatttaaaataatgctagtttttatattaaactaattttatacaaagaaaaagtatggcaaaaataagagaccaaactataaatgggcatgtgagcacttcttttaatttttaaaaagtcctcattataattattttttgccaaaactagaaagaaagagaaaaaataattaacaccccaaaatcataattacttttttttttgctaaaataattatcactacttcttgttaaactactttctaatcaaaatcttagtccacttactttagtctttataaataccataatccatcaatgaaaaaaaaattaataataatataattaaaggagtattgattactaacctcttattataatttttaagttcagctttcacgctcaaattatatgttgaaatatt

SEQ ID NO: 299064 - DNA, 2973 bp, Cannabis indica
aaattaaataaactgaaaaaaagtaatccttagggcttttggcgtcggttcctaggggtacatatggcgttggttatttgttaggaatcgatgccatatatacccctatggcgtgtcggttcctagcaaataaccgatgacatatgtacccctatgacgtcgattattttagaccctacaacgtcacctggatcagcgttggtagtgaattttgtcaaaatcgatgctaaaaggccttaaaaatcgtctttaaagagtgttttcgtagtaatgggttaaattgactatttatgataataatataggttaagattggtacatgcaaattcatgtttaatttattaatagggtaattgaaatctatttttgatgaagttggctttcatataaatatatttttatgaagcttgccatctccatcaaaattaatctatatagtactatataagaaatatagtgggtatgcatatctcacattatgtacaatctctattttgtagtatatattgttcattatgtaggtaacaataattgaaagggtattaataaaatatttaatcacatcgtgtaaattgttatcttaaataacaatcacgcactagagacagaagcaaagagttgaaaaaggagagaaagcgcaaataattgaaagcaaaaaaggttgaggttggtgaaacatcaaggaaaagaagaaccgatgtagaggaggagaaaacaatggagcacaatagtgatggtaaacaagaagaggtggagaatgaatcggaagtacacggaaggtgtgtctttctcgactttttagaatttataagcattttatgcctgagcagaaggaggccataatagctgctggttttggatcttgcataagagatgatggtccatacgtcaaacattctttacttcaatagattgttgggaatgtggacatcactgcatgaacttttaacatatatggatgacaaatcccaataacactagttgcattcagacaagtaatgggtataaaggatgggggtgaacttgttgtgatgattgggaaaaacaatatgaaagagattgagcaactccttaatcattggtgttagtaagcaactagttagcttgaatcatttggagaaagacctggaagactgctaagactacgactatctgtttgtaataaaatttgttctagtagttcttggtactattttggtgtctaagaccctcacaataatcaacagtggctatatccactctttgcttgcttttaatactatcccaaagagaaaattggccacaatgggagtaaattatttcatgaattcagtctggagacatcaccaggccaaaattggaagcgtttctggatgcatgttatttttacaagtaagaggtgtttttgtttgaattttggttaaaggacttgtaccatacatatgtgtaactccttataaaaatcttgtgctttttctacgacaacttctttatttaaactctgtggattgggatttcaggtatgtggataggaatgtggcccccatcacatggtagaatcgaaagcgatgcaaaaaaattattcgattggctaaaggataatgggggaacatagcatgccacatgtaattattaagaaatgagaagaattagttttaaaatttcaccaatgtaagaaattaaaaattatatttttgtttgtaaattaagttggcataacattctatgctattgcgtgaggcaaatcccaccaataacaacaaatgaattgaaaagttgaggcatgagatgaaagatatgaaggcagtgttaatggaagtggttaactttgtgaagtcttgtgtagttaatgctactgagaagcattcaaaagagaaggaataattggaggctgaagtccttttctaagaggatgagaaatcaaagactgaagcccctatcaagagggtgagaaatcaaagactgaagtccctatgtaggagggtgacaagtcaaaagtccttttgcaagagggggaacaatcgttagaggatgagcaatctgtgaaaagcccaagcttaatggacctgggggaggcggaggaggtaaaaatgatcaaactccaactagccaaacacccatgcaaaatgtaattgatcgaaagaaggaaaaagactatagtaaggatgtggcttcaaatgtgaagatcactccccgaagatgtactcaatatagacaagatcatcaaaacacaacctgagaagaatggaaaggagactgagagagaccagcgggaagcaaagcataatgttattgaccttgatgatttctgggaagttggcgatgccctggagatggcaactaataggggtgttcacggattagtttggtctggattttcatatttttttgaacaaaaccagtataacagttttttgaatattggaaaccaaaccaaactaattaattatttaaaccaaaccaaacaaaactattaagaatggtttggtttggtttggtttgaaacactgtttaagtggaattgataattattaatattttttaagtaattgtactaattttaccatgttttgaattttctttttcaaagtagcttgatgtacatctctgaaatttgtaactcgcacccctggtcgatgcatgcaagtttcttacatgaccaagttggttgaatttccaccagtgacattgttcgaacatcctaccattcatgcatgacttcgagctgttgagaatactttaccagcaagatctagatttactaacaagtatgttgattaacatcctaaatatgaatatctttaaaataatgaaattaaacacataagagtttagaaaaccttacattggttgcagcggaatataatgaccccttccgcttagagctctaacccttgttcttttctatcgcagagtcttatcaatatttgagcctggatctctttctctccttcagatttggttaccaccggcttactcactatgattgagtac

SEQ ID NO: 299065 - DNA, 909 bp, Cannabis indica
aaaaaaaaaaaaataacaactacgattgtcagggtagaagggtgtcctaactccaagtattataattagaagtcttatgactcatttggaggggatcgaggtagggacacaaattcaaattgagattacttctcttagaatttttagtttagagtgagagttgtaaaagcctattctatgtgtttgattagatagcctcaagtgagattgagtttgtaattggtgtgtaaacctttggtgtctttgtattattgatcagtgtattgatatcttcatccttgccaatcaataacaaagaaaaccacagccaatagagttgtttctactcggggattaggtccaagttttatccaaaacttgtgattgaacctcgttaaaatcttgtccatttcattttttaatcatttagttttctggctttagtttctattttctgctcttgtgtcttgttggtgctaaagtgcaccacaaattgtatcagagctatagggagatcagggtgattacttaagaatcaagttcagaaaactaagattgatccaagatgacatcaaccatattcgacgtggacaaattctctagttcaaacaattttagtttgtggagaattaagatgaaaacatttccttgttcatgagggaatttcagaagctttggatgaagaggctatgaaggaaatcgatgaccagaagaagaaatatgacattgaaacaaaagcttataatcttgctcagccttggagattaagtcttgagggaagtttttggagaagaaaagacattaggattattgaataaactagctgcaatttatatgaaaaagtctcgtgccaataaattacatttaaagaagaagctatacattctttgtaaagcccgcttagttaatttggaaattagcagttgttta

SEQ ID NO: 299066 - DNA, 3306 bp, Cannabis indica
ttactaaatagaaaataacactaaaactaattaaagttaagcaaaatagacacattttcattactctcctcacaatactctagtttaaaagcataaaaattaactctataacatagagttatcatcagtcacaaagcaaaagaagaagggtcctaacactgtatcagatgttatttgtacgaaatcaatggatgttgttaaagggattgctcccctagagctatttgcgatgaagaacctgccgcgactcgagaagtaatgaggaatcatcacctgagctccagtatctattccaagctccattatcgcctcgtgcttccttgagtgagataaaacgggctgaagatgtgagatctgacttcctgcaatttgttcaagctaatcgccactgtaacaataacttgagccaaggtaagcactcgattcctcctattcttagatctggatctatttttaggaacatagattagtcttttaagaaatttgagaagcctaacaaagttaagatcgagctggaagacattgaagatgagattagctattcgaacccttctattgtgtgctatgtaatgggttcgaacccaccactgcacatattggaaggattcgccaatagaatatgaaaggataaggtagacaaggtcaagctgcttacatatggaattttcctcattcggtttcactcagtggaaaacagagatgaagtgctgaatggagggtatatctttttcaataaaagaccagtaataatgaaaccctggaatcctaatatgaacttcaggagggaggatgtgaaacaagttcctatttgggtacagcttgaggagcttgaactcaagtattggggccaaaagtctctcttcaaaattgttggacaggtggggaagccgattatggtggatagtgtgacaaaggaaagggaaagattgagctatccaagagttttaattgaagtccaaatgaatcaggtccttcctaatatcttgaagtttgaggatgagtttgggatgaacaatcatgtgggtatcaattatgaatggaagcctacaatatgttcgaactgctctggtatggggcatgctactgcagaatgcagaaaatctactaaagctaagcaggaatggatcattaaggaagataaaaggcaacagaaaccaatagtggatgaagaaggtttccaggctgtcagtaagggaaaaaaaattagtgaacaggggcagccatctggtaccaaaattgataatggttttcaggttttaactgattgtgcagacctgggaattgcaacatatatgtaggaattaagctcttctaatgttcgtaatacaagtgagggggggagcagtctcttggccatgtaagttcattgtttagaatgttcgaggagccaatagccagcaaaaacaacagctaataaagcaatttattagaggccaaaatgctggttttgttggacttctcgaaacaagggtcaaaggttcaaaagcttggaaccttgtaccacaatgtgttttcgacaaatatagcatggcatcaaggaggcaagatagttatagcttgggactctatcaaatttgttgtaaacaatataaagtgcaccagtcaactaattcacttgaaaattgctgcaacaaatgggagattcgattgttacttgactgtagtatatggggcaaatgatagtgaaggaaggaaagttttatggactgatttgtgtgatttggcaactgatggaaaatggctcattatgggagactttaatgctattttagcaaaagaagaaagggtggggcatagagtgaagtaccatgttgacacagatattacaagctatgttcagcattatcagcttgaagatgtaaaggcaactgggtgcttctatacctagtctaataagcagcaaggacaaaaatagaatctactcaaaaactgatcgagttttggcaaattaagaatggcttgaccaatttccgaatgctgaggcaatttttgttaatgatggggcctttgatcatactcctggtatgttatccttgtatcccaggtggagtagtggaaagaaaccttttatatactttagaatgtgatcttcacatcctaattatttaaataagatcaatgaggaatggaacaaggaaatcagaggtaccagaatgtatcaactaatcaacaagatgaaggcattgaaacccatattcaaggagattaacagggagggttttctgatgtctaagctgcttacacacaggctaaggaagagcttaatgatatacaagacaagctgcagcttgaccctttaaactctactttgcatactgcagagttagatgctagagacaagctaaatgccacattcaagaattgcagctcttttctacagcaaaaagccaaggcaacctggatccagaatggagattgcaacacagctgtattccatgccggtatcaaatagaggcacaggcagaaccagattttgtctattgtcagggaagatggggtaagagtttctgaacctgatcatgttattgaggccttcattgcatattacaaatcattacttggtactaagatggttaataggaaaaatgtcctgaagaaggtgattttagagggccctgttcttgaaccttgtcaagctactttgttgttgaaagagtacactaaagaggatgtgaagaaggcactatttgaaattcatgggaataaagcccttgggcctgataggtattccagttttttctttcaagataattaggagctttgggagaaaatctgttctatgcagtcacatccttcttagaatctgggagaattctaaaagagatcaacactaccattctgacaatggttcccaaaatcaagtgtcctactactgttaagaattttagaccaattgcttgctacaatgttgtttataagactgcaaccaagctattgtgctctagaatcaaacatattctccccaatttggtttcccaaagccaaggaggattcatccaggggagatttatacggcacaacataatgatctgtcaagacctagtgagacattatgggaggaaatcaagcaaggccaactgtttgattaagattgatttgcaaaaagcatatgatactttagaatgggactttgtggaggagatgctggagatgctacaagctttaaagttcccagatcttttcatcaaattggtcatgaactgtgtgagaacccccatattctctatcatgtttaatggttctgtacatggtttctttgaaaccagtaggggactgcgacaagcggatgttgggttttgtgcccta

SEQ ID NO: 299067 - DNA, 3948 bp, Cannabis indica
atgtattttttttttctccatttgtggtgatcagtaactaggtaaacgttagttcatttccgccatcaaactctagggttaatcctctctcgatggttgacagtgcatgcttttaccaattattatctgttgttagaatctggattttattttgttgctgttattgttatttgttatataaaaaaattgcattctatctatgagattataattggtaggttgatcacacttttggggacattttattagtagagtttgatcagtgaaattcaacttcatgagcttttttatattgctatgctgagcttactgtagttaataaagaaaggtattagatacagctggtgagctgggttatgttgttagtttttggtaatgggtcttttgttcagtgaaattgtatacctattgtttgtataatccttgcaatggggtgacttttaggagctcatctatgtacattcaatgctataataactttgtcatggtaaaaatttgactttttacttcatctctgttaattatctgacaggaatttcaatgagtgaagccatctcagttctgtttttgagttggagtttatgagttcaaaatgattaatgaagaagtcttgaaggctgttttccctttattggaggctgtggaccttgcttcttgtatgagagtatgtgggcaatggaaggatattgccttagaagattacttttggaaatgcttgtgtgccaaaaagtggccttcaatttgcaaaaaacccaagcctcccactgtaacatactataagctgtataaatcatttcataagcggccacagaatcgaattcttcctcctccaaggatttcctttgataacttggaattttacattgacatatggattgaggatcgattaatcttctcggaagcagttccaggtgctgccctccagttgggttttaagatcttgccatcaggaatctgtgacaagcttagaacttacttagatggccctgactacaagatgacacttcctgttgaaccaagatttacagttcctgtgtgtcagactgttagtgtttctgtgcttgttggacgcaaagattctaataaggttgcttgtataattaataaatctatgtttgattatattgatcggacagcatttagggccatggcatttgactaccttgagtttgctcctgtgtaccctttttcttcgagcatccgggcatggatctctttgctttttatggaagatggaagcagcgaaggcaatgatggtgcccttgatgttttcgggattcaaatggatttctgtgatgctgcaaattccaaggaggaagttttgtggctattggacatgcttgattggaagtgaagtgttgaattgtatatagactatggagagagtgctttcaaaaaggtcataagatgctgctctcttctctgtttgtgtctgtacatcatattacttatggaatatgaaaattgttgttatattatcattttagtctccctaatagggagtaccaataatctgtctggagttgactgaatttttcttgtaccaaactatgttctatgttagaataatttgtctacgcctatatgggattgcagaatatattgttgaatgcacaaagtacaagaaaaatgttcatagaaaagtatacctcattaaatatgtaaaaaagtatatttcattatttagttttaacaattagtgaaattgctatatgcaaccaatattttctagacaaatgcatctataagcagttgagtttatacactcagaagttttgtcttccctcaaaagtttgcccaaactgccaatttgtaggagcaacgttatcaaactgcaacactttgttatcactggtggtcacttggaaagacaaagcttggccaactaagttgattccggtctgccaattttgaccccaattgcgagacatttgttgccagtcagtgctagagcccttgattttgacattaacaacatcacctgctcctccaacattgtacaacaacacaagagcccaatagggatttcccttcacctcaaacttgactcctccagttttgatacaaggaactctgcgaaaacgaacaggcacaatccccgctttgtactgagcaatcttcaagaacataggcatagacagatcgaaatgcttctgtggcggattgcaccagtttccatcaggtttggagtaatttggaggacaaaaattagtggctgtaactgtaatatgagaatgaggtatgcaccactgaggtgaatcaacgcatgctatcctaaagcaagcaccacaagtttggccgttgttgaatagtgctgtgcttagtgctgttgtctcaagaccataaccttgtttgaaaaggtcaccatagccacaagctccttctgtaaaatgttcaaaacaattaaaaatgatacataaataatgtgacaaaaaaaaaactatatgcattgtgatcacttacgcatggtttctctaccagtcatgtcaccataaaatgttgcatgagcatcttgccaatcactgatgaattgtccatcaatggtgactagggtagaagttagtgctactaaggcaatcaaaatatgaaacttagccatggctgtttggtgaaatgtgtcattgtgaaatgtttaatttataggcagaagagcaatgaattacaggaatgaaaaaaggtaataatatacattattcttattatgaccttgatttctttcaatttctctcattaatttatgatctaattaaatctgctatataaagtaatcagctgagaatggaaagttcttattgtaacagtaattactaatgtaatgaaatcagtaacagtcaatttaataagtagctaaatggtatatgcaacaagtctatttttctaaaaaaaaaaattattagttacgtacatacacacaaagaaaaaaaaaaggtttaaagtcactataaatactttgatctactgaattgtttacaagttaactcttaatacatcccaaaactgtggtattgatttccttaaattactattttatttgaagcactgatctaaaatggtcagaactcacaaatcatcatatggatacgtgtttgctatgggagtttttaaaataaataataatttatatataaggtaagattttatttaatgagatattaatgggtatactgtaaatggaattttagatggtaatcaaattaattattgattttctaaccttaagtgtttttgtaatgcatgaagtgcaagcatacaaatctttctttcttttctcttttctcttttcttgtcataaattataattagcaaatattttattgttgaagattatattagtatcaatttgtatttattatcatgatgttaccaaaataaacaaatataataggaattgttaaatttgaaacaaagaagcaacatactctttttgttaaagatcattgttaaaaacgatgacatatataaacaatagaactatggaaccattttgtgtatcatataatttatgtttttaaaaacttatttggtacaccgttttatattgtattgtattataatatattaaattgtattacattatataatattatttaatattatatttggtattactttgtattatcaaatcatataaaattataatatctttactataaatttgaacctcaaagtcagatcccgaaccccgactatggctttaacctcagacccgtaaccaatctcagcctctaactatttctaaatattataatacaagttaatataaataattttgtatgtatattaaataagattcgtttatattaaaatttataattaatgcaagataaaacttttatcaaaacatagctgatttttatttagggtgtgtttagaagtaactttgtaattactaggtagggtaattactagggtggtaattacacagtctagtaattacactatatttta

SEQ ID NO: 299068 - DNA, 3767 bp, Cannabis indica
gtcctggaaagaacataacacttactccaagtgtaagtatacttcatcgctgattatcacatcagtgtaaatccaaaacactgatgaaacagggacttagtcttttgaatcatataatcacaatcacattccactgtgttgacaatactgtaattgtgaataaatatatgttctggacttaactgattttgtgcatatattaaatatatatattaaaccataagcatgaaaaatacatgttaacataaatcacttcaaatctcttaaattgataactaatcagattgtaatgggttttatttagggcacaaaacccaacaggaggtcccaaagaacagagggagcaagatcttcaagaacaagtccttagcactgaaggacttgtggatgctcctatgaagatccacctaaaaatccacttaaaactcctaaccctagctctagcatttctattttagatttatgtactggttacaataaattgagtatcatcaatattgatatagattaatttaatggttcaagtaattacaggatttggagaaggaagatatgatcattgttgtgacaataaaagcttttgagggttcttgaagaactaattgaattgccagagggtacttctaagatatagaaagaagagtaccttgaaactacaatagggatcttaacctttaacctacttgatgcaataatcaaattgttagacaaggaagagactctagcaatgatttagaagaaattggaagagaaattccaatagaagcctcttacaagcaaaatatttctaaagggaagaatctttggctacaagatgagtcactcaaagactagattaaaatcttggtgaatttttaagaatgcacattgagctagctaattcttgagagaatgaggcactaagtgatgaaaaccaggctataattatcttaaattctttgtcagaatctttcagagaagtgaagactgctataaaatatgtaagaacttatattactttggaagaagtcataccatccttaaaatcgttagaccttgagataaaatgagaaaggagaaaactcaaatgatgaattaaatttgagccatggaaggtcacatcacaagaaactttggaataatagaggaaaagccatagcaaaggtccaaatagaagacatgggaatgaaagatgcagatcccaatcaagaggtcctaaagatcctaatggttgttatcattatggcacgtatggccacttcagaagggattgttattaatgaaaggggaacaaaaacaagcatgataaataggactcataatctaattagggagaaagtcacttatcaaaacctaagcataacaaccaagaatccaacctgaatgatggctatgacaatggagaagtctacgttgttgcttcaaaattcaataatgaatggatattagattttggatgtactttcaatatgactaataacaaatctcttcttattgattacaaggaatttagtagaggaaatgtgatacttggaaataatcaaacatgtcacattgaaggctctagaatagtaaactttaacatgtttgatggtgtggtaagaaatctcgatgggcaatatttgtgcctaacctagcaagaaatttaatttttattagtgttctatatgacattggtgttgtgagtaagattgaggcaagtactatgaagctcagtatgggagatatgacaataatgaagggacacaaggaaggtggatcgtactacctcaaaggagaagcaattaccagctgtaacaactcaatctctactacaccagaggacactaaagttatagtatggcacggaaacttagggtacataagtgaaagaggtttgaaaattatgagtgattagaaactaatatgcaatgattaaaaatttttgtgagcacaacatacttggtaagcattacatattaaaatttaaggttggaacccataaatccaaagacatacttgaatacatccattcagatttatagggaccaaaaaagatagctactcatggggatgtagatactttatgtctattattgatgattattctaggaaggtctagatttttctattaagacacagaaatgatgcatttcataaattctaggattgtaaaattttgattgaaaatctgactaacaaaagagtcaaaatcttaaagactgacactggcctagattttgcaatgatatgtttgacacatattgtagaaagacaggtatccaaaaacacagaacagtaagactaacaccttagtgaaatagtgtatctaaaagaatgaagagagccatcctaaataagactagatgcatgatgcttcaaagatggacttgctacaggtttttggggtgagacaattctaactattgtttacttaataaatatatgtccagaaagtgcagtggaaattaagactctagacgaaaggtggactggtaaaccacctcatttatctcacctaaaggatttgggatgtgctgcatatgcacattagagtgttgggaaattagagccaagagctctaaaatgtgtattccttggataccagaaggtaccaaaggatataaactatggccaaaagaaaaacatggtttaaaaactataaacaatagggatgttatttttaatgaaaatattttgtcttgtattactaacaacccaactatttcaaaaaatgtagacaaaactaacaatgcaggtagcacagttagctttgacccaggttttggagaaccaaaaactactcaacaaacataacataaagatgatgctagaaataaccagtatattgttcaggtagaacaaataagagatgagatagacacagttcaagtggaaactcaagagagttaggaggaaacagaatttgaagatctcaccaactacaagttagcaagagatagggaaagtagggtcccttgaccaaacctgaagtacagctacaacatttgggatgacaatactgcctatactttgctacgtgctatagaaatagctaagctggaacatgagacctatgaggaagccataaataataaagattcaaagaaatgggtaaatgctatggataatgaaataggttctctagtaagaacaagacctggatactagtgaaaaggtctaaaggaaagagcacagtatcttgcaagtggctatttggacataaagaaggtagaactaaaggagaaccagtaagatttaaggcaaggttactggccaaagggtttgctcagaaggaaggaaatgactacatagaaatattctccccagtagtcaagtataagacaataagactaatattagctagctcttccaactcaacattacatggaaatagaccaaatggaagtaactacaacttttctacatggtgaacttgaagaagacatccacatggcctaaagattttgaggttaaaggaaaggaagatctagtgtacaagctagttaagtcactgtatggactaaagcagactcctaagcagttgaataagaggtttgatggatttatgactaaaaaggagtttaaaagaagttactttgacacatgcctgtattttcaaagaaacaacatcaatgatgtcattttacttgctactcatgtagaagacatgttgacaatcagaaacggaaagagctaaggtaaacctggttaaaggactactcagcacaaaatgacctataaatggggatattcctgaaactcataaagaaaaaaagaaagtgagttagacaaaaagagaagaaact

SEQ ID NO: 299069 - DNA, 3584 bp, Cannabis indica
agagagagagagaactatgttattaaaccaaatatatcgcaagtacctcctctgacgatggctggcaatctcttagaggcttaaatttctcatttagcagaaacaaatctgtctgcccagaaaagtcccatatgtgtaactgcacagtaaaaccagttaaaggccagacacttgaccctaaaagaatgtcatttacaaggactaagatacttaattaccagttcagactccaagctgaagattttgcacgctcttttatagaactcagccccattttcctagataataaagaaaaaactagcttatgagtttcatacgatgaacaaactatcaagcagagagagagtgaacacttgtatcattaaccagaaaagtgacccaaagatatgcttataaaaatatctaattattcatacgaattgaaccccatgaaaggcccagagcctataagtcaatgcattacacatctaatttgtatcaattttattaattcaataatctaaagataacattctaacaagtacggaattgaaaaaaaaaacatttaatcatcattatggtgttttagacaacttaaatttcatcaaccaacctattatctaagcaccttacaagtaaaaaaaaagtccaaaaacaaaaagcattctaaatcttgctacgaaaaaaggttgaaactttaaaatatatataattctaaatcaatgtgcttgacccaccattaaagacttcacttgaatttaacatatatatgcaagacaggtcacaaaaccatattagaagataaaagtaaaatataaattttatcttaagaaaatactttttacactgacctttttgctgatcttcactcccaaagaatatgtttctcgcaaaacagaaagtctcagttgtaaaggatagacatctgccatgtcatcttctgcagctgaaaagattctaccttcctttataggtaattttgaatcactatgcctacagtgatagcacaccatctccaattaaaatgttattgtgtagactaaatttaatgcccccctcaagatcatatacattttggctaatgtaaatttgtaatcattaagatatgaaaactttgaaaatatatatatcaagtgaaaatagtgttcaagtcaattacacaagaaatatcatccacatatataaatagatatgacatagaactgcagttcatagacagaaaattaaatgcaaattacgaatataaattcattatcacccatctacttaaaataagaatccaaagaaagtgagtacaaaacagaaaattatccgaaagcaaacagaaagcaatagaaattactgattgaagtgatgtttgctccatacagcgagcactcaaacagaaagcaatatgcacaactttgaacataagttgtattaaaaaaaaattgtcctgtaatgtgaggagcacaagcacaactaaaacagatcaggattctgtcacacaatttttcatcatttataaaacaatcttgaatatctaagagtgtcagataaaaccatcatgtagtattgcagacaaatatttgtataaatatatttatataagggaagatatttttcgaatgctatcacataaaacccagttactcacaagcaacaagattggttagtggaaacattccatccgaaaattaagaaaatctgataccagttaacaaggtgtgagaactagaagcctgcatgcaaaaaacggttattatctccagtatgcatggaaaaaaatgagccactcgctatacagaaaatcttatccaaataaatgtaccgagtattgtaaagataaataatgaataatttactcaacaaactcatgccatcattagtggcatttaagacaaacaacacttcatttgtctcttacactcatctccacaactaactttctccatttacttcaaacccattaaagaagttaatctatactcaccatctaagtgcctgcacccacatttcaccagaaaccaaagcaaaatcccttcctgacacacccacttcgccattttccttactctgcgcattatcctcttcccttctgagattaaacataagatctgggttgaagatgttgttaatgatcttcataggacctccatataacgaagccgatgatgcagcataaacaatccctttcctatccgaatcccccaaaaccgaatcttgtgcatccttccaccacctgaaaccccaattcgtacatcaaatccagaactcaaaacacattgagccacagtcaaatctcggaattgcaaaagtaataatcccaaatcttacatttctgtctctccatactctccataatttctcagaaaaaaaaaataagaataaaaaaaaagtcttcaaagatttgtcctcagatttccaaaaagtagagaattgaactgattaacagtttaatcgtgcataaaatatatacctacatacatttaaatatagatacatacatagagagagagagagagagagagagattggacctataaggaactaagtagagttgctgttgggtgtccgaatcgaggcggggagtggaatcggggagatgttgagagaaagaaacctccattcttgaagagaagagaataaaaagaaagaaagagaagaatcagatcatgtgtaatggtggagatgatatgagagggagagaaaaatggcggattttgcagaggaagaaaagaagtgaagaaatggaatgacatggaatatagataattgaagaatagacacgaaaggaaaggagggaaatgataaataaaaataataataattaataattataataataaatataggaatatttctgtgaaaaatgaaactccaaagacattggccgattacaatacttcactcccaacatcttattattggtggtcgataggtgttttttttttgtggggaaatttatattgtatactaatttttgttatttttttacaaaaatactgctagatggtattttttacatttttactgtattttttttataagtttcatactgcagtatactatattaagttttcactagtgttctactggtgttttattggtgttctactgttgttttgagttgttctgctttgtgttttactggtgttttataaaaacacagtatttttgtaaaaatttccgtgtgacagtagttttgtaaaagttaacccaaatttcaatatttttgtaagtttcccttttttttaagggtaaatagcggcataagtaccgaaagttttatgtcactaaaaataaatattgtgtttatgtcacttaaaatataaaatttttggtacttatgcagctatttatcttttttttttataatagtatttttggcgataaaattctctcaactttcatttcgcttgtatttaaaattttctaaattatttaactgttggtaaatatcttagttaaatactaacatgaacgactgatatttatactcttatacatgtagcacatttatattaatacacttaaatataattgtttaataattataaaaattatttcaaaattcatttaaattttttaaaatagttataaaattcatattcttcttttttttt

SEQ ID NO: 299070 - DNA, 1212 bp, Cannabis indica
gatgttaatgaaacatacttgttagtaaatctagatcctgataaaatatttccaacaaccatttcctcagaggttcaagaagcaacaacaagatggttaattcaggaagtttttggatgttttaaagcagctacatatcaacattcccttggtggaagctctagagcaaatgcccaactatgtgaaattcttaaaagatattttgacaaagaagaggaggcttgacgagtgttaaatagttgctttaacagaaggctgcagtgcaatgttgtaaagcaagattcctcctaaattgaaagatctgggtatctttacaattccttgctcaattggtggaaaagatttgggtagagctctatgtgatttaggagatagtattaaaataatgcctatgtcgattttcaaaaagctaggcattggagaagctagaccaaccactgtcacttttcaattggcagaccgttctatggctcatccggaaggcaagattgaagatgttttagtgcaagttgacaagttcatatttcggtccaaatttatcattcttcattatgaagcggatagagatgtaccaatcattttggggaggccatttcttgctatcgggaggacgttaattgatgtgcaaaatggagaacttactgtgagggtgaatgatcaacaagtgacttttaatattttcaaggccatgaagtttccaaatgacattgaagaatgctctagaataagtgtgattgaaacacttgtggctgaaactttccaagaagaattatgcagggctgatttaggtatgaatgactttgataatgttgaaaggagttgcaaagaagatgattctcaagtcacatggatagaatccaataaaccaaccatgaaatttagcaagccttttgagtctttaaatttgacggaagggaatttcaagcctccaaaaccctccttcaagaaccactaaagctagagttggaacctttgccaagtcattaaaaatatgcttatttgggggagaatgaaatgctgctagttattatttcagaattgttggaagctgaagctaaaggttcattgctataagtgttaaaagggcataggagagcaattgggtggactatggctatataaaaggcattagcccaaaaatttgcacacacaagatactcttggaagttggttgtagtaactgttgggttttgtgtcctaaataaaacccat

SEQ ID NO: 299071 - DNA, 4550 bp, Cannabis indica
cttaggccggctgaaagaaaaggacttgtaataatattttgtaaatagttttttttttggatcctaactactgtaacttttagtttataaagtttaaagtattacaggtttattttcattcctattagtttaaattctgcgctaattttattagtaatcccggttaagggattagggcttcataagtattttgggtagcgtgctcaattatttagggcgttacacaaggagttaggaacattgtaaatatgagaagcttgttcagctagaagaccatgattaaacaaataaaagtcccagaattctatgccaccatcctccttatgcaagcaaagtttctcctaagtacatcaatgcattttttcttagcattatttccaccccaccaaaaataagcacatatacgataaatttttttttttttataaaagcttttgaaagcttaaagagattcatagtatatgttggaatggactaaatgactcacatgataagaacctcacgacctaacatagtgaaaagtttcaacttccacctattgagctttttccaaattctatcatgaatggcatcaaacaaactagtcttactatgctccataaaataaggaaggcctaagtaactctcgtgacaatcaactgccttaactcccaacaaatccacaagtttggctttctcaaaactcagaacatttgggctaaatgaaactacagacttgtcaaaattaaccaattggcccgaggccgccccataccaactcaaaagttgtttgaatctaacacaactcacatcaaaaaccttgaagaagaacaagcatcatcaacaaataagagatgagaaataattggaccactgcgactacagggaaagccaacacaacaatttattctcacaatcccttctaaccaaactcgagaggccctcaacacaaattgaaaagagataagaggacatgggatcaccttgtctaagtccatgttgtggagtaaaagatcccatgacctcaccatttaacaacaccaaattctccacagaggaaatgcaatccaaaattttcctaatccaatcaccatgaaagtcaagctttaacataatttattccaaaaaacaccagtcaacatgatcataggctttagacatgtccaatttaagagcacggtaaccatccccttgtttttttttcttctttttcttaagagcattaatacatccaaaaccaataagcacattgtcagtaatgagatatcttgagaagaatgcacttttctctttagaaataataatgatccagggtgaatgtcaagggtcttaagcaagcctgtggggccttgggtttgttatgggagcaactctatgccttgggttgttgataggggtgagcttgaggccttgggtcactagggttcttcctaccgtgtagtccgtcagtattttgaccataacttgttcaataaaactcataattggacgattcaagatgtttcaaaaatcttcgaatgagatatgtagctttcatgtttactattagatctatttccaaatttaaaaattccttattctaccaacaaattcttccttataacctaacttatccatccttgtcattttcaccaatatgtgttaaaagtacttctaatgattataataatgtgataagccctctaaaatccttatcagtggatgaactcttatcttgtgacgactctgcctaacaaaacctcgatattacatcttgtaaaattttgaggttaacaatgctcaagaacagtcggccaaagttatgttctccaagcgtcgttttagagtgaatacaaatagtcagtagtccttctctttcttagtgtttaaggagttggagagagattacatcgagagtccctttacactgttaggtcaaggctatttataagacatagcatgacacagtacatcccctccttttagggagatatttacattcaaataactaatttaaattcacattttaaatattgtgatatatttacaatgaataagtattataatattatttcaaataacaacaaattataaatatcctttacttgcgaggcttgttatctttggtaatctttctagaagcttctatttcttaggaaacatgttgtagttttctgatgaagtttgaaaccataatgatcctatatcctcaaacaaggttaaagcttctaccctgttcgtgtgaatcatcaatttgttattagaagttatcttgaacaccttcaaaccctttaacttaatcaaatactcaaacaaggtatcccattaccttgttcgaatttcacttagattgtgccccaccaggattcatgatgatacttttcttgaatcttgggacttggtaaaagcttgagttatattggatcaccaaatagcattaaaacctaaaccccatttgcactacatgaccagggttaaacatatactctctttgagtaactagggtttaaggatcacatcatagttttattctactcgaacaaggttaatcatgccatgttgttcaagtagttcacttaaaaccataaggatttatcatttcatactccaacatgatgaaacaaactgccttatttaagatcttctctttttgatttctaacctatacttaaacaaggttaaacatggtaccttgttcaaataaaggccttcaaatcctcatatcatactcgattagggttagacttaacaccctattcgagcgtgtacttcaatcttatatttgttgagtcacttattgtcttctatgtgacactcgaatgaagtgcatctcaataccttatttgagttcctccttgtgcacttcatcatttcattcgaacaatttaatgttcatcaccctattcgagtgtttaagaccttagtcttatggtttttaaaatgtaactcgaataaggggattttgttgggattttatgccttaaataaaacttatttcaatataatcttatctactaattaataaaagatcaaaaatcattttatgtttcttggttcatatgttactttcatgattatatgtttaatatataaactttattaaatcctaaacaaattgttactcatgattatggtgttttcaacacagtagaaaataattatgattatatacttcaaattatttagtcccacgatttatcaatgcactgaatttatactgatgtgataatcaatgatgtgttttaattacacttgtataagtgcaatatccttttcaaggtattagcaaagtaaatttgtatcagatgtatcggctatacatcagactagactgaaattgacaataaaaaatatattataaacttactattatattttttaagtcgatgtgacttagttgatcttaggtaaattgatcttaatcctgagatggttagactctagcttaattatactatatggtttttttgacttattcgttaccaacttacccgtaagattagcccatacttatatcttgggaattcggtagtgtaattgagtgggagcattaatcataaatatagaatctatagcttctataactatttagaagtgaaacagtgattttcttagagcttgactaaaataatataaatggaagagctcttattttcggtaattatattagtttactgaaatatcatttataaatagccaaatattttaaggataaaatacactgaaggttaaaatggtaaatttattcctacttgatgttaactgtctatagagaatcaatgactatttagattgaaatactggataatttatagtgtatctatatttattatatagagtgttctatgtaatcagagtgcaattctaaatctataatagagttaggtggaattaataagtttaagaaatttattcataaatttcaagaactgcttattaggagcttggttacataggctcatggtccccacattatttgaaataatattgcattatagactcaattaattgatttagtaaatccattagaattctaaagaagattatgtcttatatatgaatttttactacggaagggcaaatttgataagagaagaaaagagagggtttatttgttaataagacactttgtgggtctaattaatttttttttttgataattattaaatagataaattaaactttaaataattagaatagaaaaatgatattgttttggaaaaagatggaattgtttcatttaatggcacgtttactaaattgtaattgaaatcagaataaatgaatgggataaatcaaaaggaataaaaaatttaacaatcggaatcattattttattatgctgtttactaaattgactagaaagggaatcagaatcatttaattttgtttacataactagaaaaggtaatcggaatactttaaattgactaaagtaccctttatagtaaatatttatttttaatttatttactataaaattaactaaataaattcataaataaatatatactataattaatatttttttttaatcaataatattacaattgcgaacgttaaataaattaaaaaatatttattaaagattt

SEQ ID NO: 299072 - DNA, 3229 bp, Cannabis indica
tttggtacaaaaatttacaattttactgtcacgtgagattttttacaaaagtactgtactttttataaaacaaaccgcaaaaacaacaatacagaaaactaaaacaacagtgaaacaacttaagaacaaccctagaacaacagtgaaaatttaatacagtatacaatataaaacttaatatagtatttttagaaaaatacacaatatttttagaaaaaaaaattaccatcccatagcaaaaaagttggaaagtttggtgtaaaacccccgtaattaatttgtaatttaaatagcccaacaatttgaagtttgatggtggttattttggagtccgtgggctatttaaattatcatgcataattccaaatggctcttagatacctattaataaattgggcccatacttaatactccttaggcccaataatgatatactacaaatctaaactaattataaatgtaccttcaaccaacttatttacaataatatcgaaaaaaaaattaaaaatttcaacatatagtgtaaataatagcttcacaatttatttttttcattttctaggtaagaaaaacttttagttgtttatagtggcgacaaatacaatgtactaattgcctacttattcttaaaaatattcactttaacataaaatgattttatatactttttttgttattagttttgattagttatttttaaaatcacgtgttaatgattaggttatagggtaagttacatcttttaaaatatgtgtttaggtacacctcgtttttttttttttaataaaatcataaaatacattaattaacaaattcgttcaaaacaatagaacacatttcagagtaacagactccaactgaagcacacgacctgtagagaaataagagtctcttgtcaagcaataagccaacatatttgcataccgttttacaaaacacaaattgtgaaggcataaaataccgttctgaatcgcttggacacacaccaagctatctgtttccaacatgactctatcccacaaatgagttgcaatccaactcaatgcttctttaatgcctattatcttagcaatttcgggttgaacacatccaattttccccttcttgaatgctactacaataacaccgtgataattttgagatacacaacccatgctgtctggtggtctcctttgcccgtcgatgaaggtccaaggtctcgatgaaggctcaattttagcatcacagactacctcgagtcacgactaagcaaggacagttgccgtttccgtatggggttgttttaagctaggattttggtaggtgtggtatgtggaagatgaaagtgtttgagtgagaaaaagagaaaaaaaaaagaaaataaaatatttatttataatttatttatttttataattttaaattatttcttacaatattttaataattaatattatgtggaatactaaaaatttgtcacgtgtacatttgtgtccacgtggctgtctaggagatttttggatggaatactgaagagcaaaacggaatgtgagttcagtaggttttatcgttaaaatttcagttttgtggttaagtgttaaaacatgtaaagttcaggtggtttcaccgtcaatattcctatttttcaatagcacgacacgacacgacttatatttttttggcacggcacgacactactcttattttttttggcccagcacgacatgacttgtattttaaaaagcacaaaaaaatataggttggactaacactacatacatatttatagctgtactccttaatgtcatattattattggtacaataaaatatcgaatccacgatccacctctaggtgatgctaaacataagggtggctagtaacaaaaaaaataggataattacataaatactaatttttgtaaattttttatatttttatgttcaatttttatttttttatatatttttaggtattctataaaaactcaaacaaataacaacataacaaaaacaaaatccctacaaataagaatgctcattattttactagcaaccaataaaaaagccccctaaaaaaaaaaaacgctacaaatctctacaaaaaataaaataaaataaaataaaatgaaaaagtgccacgtcagaccctaatagtgtcagcaaagtcagcaaataaaaagcgagttttgcttctttcgaagctcgcctccgcctctcaaaatatcccaaattctctctctctaaccttcttctcttctccgttggagaccccaaaaccctcggagaatctgaggtaatcatcataaatctctaatctttatgtttaatctggactatttctgtcacaatcgttgagaattctcactttggatctgtttttattgtccgagtttatatgatttttctgtcaatttttgtgttttacttttaaaggttggatttttagttattttattcgagatctggatttgggttttgcttttcttttagttttacgggttgtgatggcttcgatgtgttgagatttgacttggtagatcggttgcgaaatttgtttagtaaattcagttttgtcagatctgctgtgtgaatgtgttaactattatgtttggattaggtttagtttataaactgttgttattttcatgtgtgtgtgggtgtgatgtgcacttttctgggcaaactttttgtaattgtaatctaggatagatctctcctattgatataggaagaagaactccctaatttttgtgtcactatatactgatatataatcttgtatattggttgttctgagttagagtatgtactcagatggatttagtatgattttctaaagctgtgcctgttatttgtttataatttgatccttatgcttggttttagatgtaatcttgtatgtgttacttcatttgatagatgtagtttaaagttgtaaccagtatctggatgttttcggtctttgttatgaatctcatcaatgccgttgtttgtttggatattgttttagggaaaaacaccatggataataggcatcaacatcctacagtcatgcaaaaggtagctggccaattccttagcaattctagcatttcgcgggatgctaagagctatgatgttggtttccaacgccctgccgtgtatcaaaggccggctgcatatggaaattatcgtaatgctgcattgcagtaccagtgcaaagctactactgatctgtccatggttccatcagctgcttcccctatctt

SEQ ID NO: 299073 - DNA, 1464 bp, Cannabis indica
ttttttaatttttatgaacttcagaaatgataattccaaaatctatatttaaaaataagtatttaattgttgagtatataatttttttattatttttgtttaatatcatgtttttagcttttatgttttgattttttttgttaaaaaaactcattccttttttgctctttttttttattgtatttaattttttattatttttatttaatatcatgcttttaacttttgatttttgatttttttttgaaaaaaattctcatattcattgtcttaaacatgacacaaataaggtccaaattctaaatcgtaaggtcaattggtttgtttttacatctaacttctcctattttcaaaaatatttatataaaaaattaagaaagttaaagtttgatacaattttattacttagttatcatcaaataaaataaataatttatttcatgtataatttaaatttttttaaatatccgttgcaaagcgcgggttatttactattttatgtattaatgattaactaatttataatatatagatatcgaaaaattttatattcttgcatgatgatatgatctagtaacggtactagagaattaaaatcttatgccgtgaataaaataaagtacaaaaactttaatcaaatgttgctagaatggtttactaatgtctgtcattcgatgcaagaaattttgatatggattgctgatgtagtttgacatcatagtaaaagtgtcatatataatagagattgtatataatatgaccgatatgtaactatactgtctttgtaaaacttcttgttcgtttatcataaaaacattcatatcacaaatgatgatcaattagttaatcaacctaaatctcgagatgccataaattcctatttatgttacccattaaaatatcttagatatgagatttacaacttctgttttgggagtctaataatgttgatggttgggaacatgatttgtaatatgtaatcctgactttttgaatggatcaaatattagtttcctttaggtgttaactttagtacaaaaatgttgcacacaaattttgatgtgtgttatcaaaaatattatccacctgacgtggcatgtccatgtaagccaagactaaggacacgtgtatacagtctcgctaatagaaagacaaagtctccttacaaggtatggaaaaaccatcaagtagcaagagaaaggagttaagcgattcgtcaaggggttgcaccacaatatttggcctgccaactggagtacataggtcggctaggttgagcttgtatgcccggctagggtttgatcacaagctagccgaccaaaggtatttttaggccaaggaagggcccattcgaccaaggaagcctgacctctgcaagaaaaaggtgtacaaaggctggtatgacctacagaggttggccattgttacgaaaaatatgaataatacgcaagtgcacataatcaa

SEQ ID NO: 299074 - DNA, 1633 bp, Cannabis indica
attattctagataaactatttgtatttttacttgtatttaattaaataaagaattttaactaaactagattctttctgaagcatattttaattatttacattaaatattccaattttaaaatataaattagttttttctaactaattttttatatcaacttaaatttgaatatcttttgaatttaaaattagttgcggaattcaggggtttttttttttgattaatggaagggtgcgaaggcacaccataaaaacaacaacaaagaaccgagttcagaacaagagcaaagaaaacaaccagaaaaaaaaacacaaaactgcagaaacaaagattacttagacaaactaaacactaaagcaaaataaacaattaaaccattgctccagaaccgttgcttcgcgaaccaggatcccactccaccagatcgtccatcaccgagccatccaactcagaaggctttagagatccctcaacattcttgaaaacagcccatttcgcaatattgtgcaccaaaaaattgcactttctggaaatgtgattaatgtcccactccaagagattggtgcaggatttttggaatcttgattttgccacttgaagtctgaaatccgcgataggcgactccgaattcctaaactctttgaccacccccaaattatcactctggaatagtactctattcaatcccatgttagctgcatactccgcaaccaaacacacagcatgagcctcggccaacagtggttcggtaaaaagggctctcgaggttgttattgacacaatattgctgaattcatcccgaaagacagcagccagcatgcatcccgtagaagagatggccacattagagttacagcaaagccaagatgcgggtgggggggaccaagtcagaacatcagtcaaattcttcgttgataccagcatgtgatcttcatttttatgtctaatgagagtaattaccttgatgatgtctgattctatctccccatgcactctcttgtttctttctttccagatttcttccacgatacagagagtagtagtcatgaatttataaaacgtaacatttggaggtcggttgcagtcaggtaagaaccactcagtccatagttgccaattagtaacctggacaagatcagttcggataccccaccccacagtaaaccagattgcttttgcaaaggcacaattccaaaagagatgcaaagaagtttcatggggctccttacacaacacacaataatccgaaacaccatccaaaaaggaagccaacttaccttggtcggaaggatattacggtaaagtttccaccactgaagtttcaggcgggagtggagcggggaattccaaatcattttccagttctcatttcaccaccaaaggcaagagtcatcaatctcctcttccgaaagctctatatttaggatggccttggcatcttcatgttcgaaccattccctcaccataaacacgttccatcttttgtccgggagcaagaactgatttgcccaggccactccataagaaacatctttaagaggtataggagtgcgattggaagatggaacccatgggtcaaaccaaattgacgtactcacaccatttcctatccttctgcataatcctttttgg

SEQ ID NO: 299075 - DNA, 1490 bp, Cannabis indica
aacaaaaaaatcaagaaaaaatagaaaattataaaaaatgctacacaaaagtagcaaaagtataaaaaagcaaacgatgattatgataccaccagtgcaatgttgttcttggaaaaccacaccacaattgcaggccagctttaattcccaagagttttatccagtcaaaagtcaaatatgtactgaaaaaacgatacatttaccaaatgaggaaaaacatatagtgagaggggggaacaacaatttataaaaggataagtatggaaagctgaaattcttaattttcacaaataaggaaggttgtaggtaatccagagttgactatgtgaaaccatggtcatggtagccatctccataggcttaaaaacaaacgacgcatttacctaatgaatatataccatcatatagggagagagaaaatcaattaaacaatgcttgctagttgctatctccatgaaaactgcaataacgtccaaaggccaaatcaagaaaattcaagaaagaagcactaagcaatatgtcacacaaaggaagtgaaagagtaaataaggaatgatgactgattccaccaaccaatgcaatgttagttcacaagagttctatctattcaaaagtcaattaaatacagaaaaaaccaacacatttaccaaatgagaaaagacataggtaaagagtaacacaacttcttatttctcgcaaattaggtaggtaattggaaatctaatgttgaatatgtgaaaccatggtagctatctccagaagctgaaaaaacaaatgcatttacctaatgagtaaatactgtcatataaggagagagaaagtcaatttatcaatgagaagtaaataaaactagtgttcttatttttcacaaagtaggtcagttgcaggaattccaatcatgactttgggaaaccatgcttgctatctccataagaactgcaatgatgttcaaagtgcaaaacaataaaaatcaagaaataaaggaaaactaaaccataagtttcaacaaataagctcaattcccttccaaggttaaaatctttcttaaatagaccccataaaacaagggaagccttagtcgcatccatgatctaaaatattctggagtgaagacaagtgaaattctcctcaacaccactcaataaaaagaaaattattagtttggagctgcactttataaaaagttgcctacgtaccctattacttaatagggatcaagctccacgtagttcttaaaacctgcaaaataatttaattagtaataaatcatgaagacaaataaacatatccaaatagaaaatttaaaatatacacaatcgactaaagaacactttcatacataaaaatgtaatcgagaatacaaattgtacatttattaacaaaaacaaatctcttttatgtaaaagatgtagggctcgtttggtacaccgtttaaatcgtattgtattatattgaattgagttatatatcatatttttatataataccat

SEQ ID NO: 299076 - DNA, 4427 bp, Cannabis indica
ttttttttttttaacgcttttcataaaataaataaataaataaatgttgagccctacacaagagggtaatgtctattgtcgttgacatggaacgagatagccaatcggagacaaaagaacacgttgtccaggccatgtagaaaaacgacgaccaataaaagtaaaaaagaaatctccatatttaaactgaaactccacgcttattcaggaaagacccagaaatatttaggtgcatcaccatggcttacgttgaacgaggttagcaatatcccctttttctcaatctttcccttgtttaatcatcgatcttcgaattatgtatctcatcattttgaatcacatcaattaatgctattacaaattttggttttagggtttttggtccccgaattaggctaatgatctatttctattgtctcgtaccgtttgatatcacttgggactttttggattttggtttatgtaattcgatctgtatggttggcgtgtttttagttgcttatgttaaatttatattttgggtgtgtgtggttaaatttccacagttgaagaagaccttcaattttgtttctttttctattcaacaaggttgatatttttatgatacttttgtgctggtttcagtttcattgttaaatagtattcaggtgttgatgctaaccttgattcatttgatgttatttgagtagtcttatgtgagaagaccggtgaaataccgaaggaatttttgagttgtgataagtggcatagagttatttttttgcaatattttatctcaccaatgttaaatgtatatacatatatgatatatgaggagagaggactcagcttgacaatgttattctaagtttctcaacaggataaagtgattccaaacatgccccagagaacaattgatttattaattatctgtgctctgttaaaggatgtggatgttagtagtgttaattcttttgtattatacccccctctttcttttttcagtgctcattattgttaagttctattggactactgatcatgaatcaattatggtgttttcatcgtaattttctgtcctgaatttgtttatacctggtcttcaagtatacaaattatttccattttgtattagtcaagtaatacaggttatctgctgtcgacacctctggtaattgttgtatctccatctgttatggtcagtaattaacaccactctcgggaattcaacttaatagggtacctagattagttaccatgtttgtatgtattttttctgctcaccaatttaacagtatacgtaagaagtttatgatccatagttgtttctgtccctatttacgatatctccttttaaattttatggtggttagcctttttctatgccatcttatccttgaatgtgccgtgatgttatttactctaactttgagctctttcatgtctattatcattgagttaagtagggccaattatctcatctaagtctagtgtagtgtgtggagcatctttgtcgattttcttaaagaacattcccataagtttggctattggtacttttagcaataaattgctaatttttttctcttaatgtgatactcaagtttctaaattttgttttatgatgccacccgttacttgtggcccatttgtttttgaacttcaaccttttgtataagttatatattgaatcaaaattgtttctatctaccttacttgggattagcaaattagtatgagtggtttctgtgtatcagtgagacctgcgttagatgtattcgaggagtaatatgtcatgtattgtatgttgtcttgaatatcggcttattgctttgtgagctgaagtgatcaaagtatgaactaactgtacataattctgtaggcgttgttaaatcaaagcgttcgatatggcgactcaagacaataactgattttttttggtccattgtaaacctcataggcgtgttcttctcaaccatgttctcggtaaaatctttatcacaagtgacaagtctttaggattagtttttatttgtaacgagacactgcttatattttcttgacttttatatggtagatggaaaagtcggatgcctacagaaaaggctcggcttctggaaagaaatgggatggcggtggtcctggaggtcctgggggaggaccatatggtggtggtggtggtggtccacgggggcctcgaggtgggcttgacaatgttcgtggattggacagtgttcgagggcctgaccatagtaagttcatcatgagcttgtttcgacttaagtttttattttattatttttccaaaatattttctggtctttcactcgctaaatcaaaacgtgtttatactcaactatcagattctttacctgcctgtggttcctgctgcggctgagcgtggactatgtggaagtgcttgaagcgaatacattgttgttttgtttggaatgttatatttctgcataattaagttgtgaacaagtcttccaacaagaggacataggctagagcaaactgacttaaacttataagtatatattacaaaatttaagtattggtatttcatgcacttgtataattttattattaccattgtgaactgatgtggcacttttccattagttggcagtttgcgaaaactgcttagcaactgagttgagactgagaggcgccatgaagagagagagaatgttgcttgttgagtgagaaaagaagaccattactgatcagtactctggttatctttcctccattttctctcaaccatgccccaacaaatgacattctatattctaaagaaaggaccctgaaaatcaaatgtgctattttaaaccagtgatgtgaaatcaataactaaaatcatttatctaaacctaacctatgatctacttttcaaaaaacagtgtctcgaccaaattgatggcaaagtaattgaagttaatattagagttttttgtggcaaaatcttttcaactgtcgtttcacttgcatttaaccttctaagctcaaatttcggcggtaaaatcccccaaactactgaactaatagcaaatttaaagtgtcattcagttaattgttactatgggttgcttatatgtacacttttgtacacataacacgtttatattggtacacgtttaagtgggaaagtgtttctaaagctgaaataattaatgtactaattttaatgtcactttttttgcagacaaagtttgtgtgcccatgagataatattaagtttgtggactatgaaattttaaaaggtttgcgtgactgacgggccaattgtataaaaaagtggattgaaaatattgaagagcttggataggagagggcggacatgttaccttcagacggagtaactcaggaggtgtgaaataattgtattgcttactggaacacagaaaaagaaaatatacttaatgaaattattaattttagtaatactttacgttatagtcaacaataaataattaattttaacacaaatatattaatttcaggcaagatcatcaaaaaataaagaaagttgtggtaagatgaaactttaaggaggatggggatcaaagcctatttagcacatgttgtcgatggggtaactttatatatttatttgtgattgataagtattattttttggaaaaataataatgacacttatttttacttaaatataagctaacctcgagacaggagaacttctaaatattgtggatacttttcagaagttccactaagacaaaaattagcgcaaggaatacgcgcaacaagcttatgtaagtttacattgatatttattaatttatgaatatttctttcaatttgttttgtattcaaattgattatttaatttaattaatttttgtaggaccaaatagttgaattggttgtaaatcaatcagagtccattgaggatcaccctgctgaggatgctatagatcccactcagtagccatgagacctgcatgttatgacgcaagtactaggtgagtgatctcgacatctgagaggttttggccatctcccaagattaaaggcagttgaggccaaaagagcaattgccacgacttcttctgtctcaccgactgttactatggaacaatatgaggccttacaaaaaaaaaagtggaggaggcacatcatgaatctcagtattcgaagcagcattatgaaacacaacaactctacatcaagctattccaagatcagtttgagtatatctctcgggttgtgcctggtttcaacatgcatcatatggatcttctgtcattccccactcctcgtggtgctggatcgtcatcgcatcgtcccacgactcaaaacaataatgacgatgacaatgtccaactttaaaacaatatatattttataattaacttttgaacttgactttttttttattgatcgtcaacgtcttttaatattttgtttagttactaacttta

SEQ ID NO: 299077 - DNA, 4017 bp, Cannabis indica
attaaaataaaaaattatataaacttttcttaaaaaaaaaataaaaactatatatacatgagtcagaaaaaaattataaaaataaaatcaaaataagtattgaaattaacataaaataatgtgagaaaaaaaatttaaaaaaatattaaggataatttttaaaaattatttaagtttatattatttttaataatgagatgtatttatcattttatatgatgcaaatagaactcccctaaataaataattatatgttaactttttaattatttcattttctctccgatcattttagagttttttcccactaaaaatttatcgcaaaaactgatgtgtcaaaatataaagcattggttcgttcatgtgattcataaaaaaaacatttcaagaaaaaaaaataataaagagataaggtggcactcattctcccttatcattaatctcaaaccacctaaaaatccaaaaaaatataaactcaatcatatatgtctaaatattgttcttccacatttgataagaatcatacacttaaagataaagaaaagatattgatatagatatctatgaccaatgatgaatgatcgaataagaaagtaaataataatatgtgcaataatataatatatttttaatattgagtctcatcaaaatattatactttctttgaaatgataatggatttaacaaaattttaacaagatggtcacttaataataatactatatttcggaggataaaatttactaaatttgaatatagtaaaggaaagctaaaattaatattttggaaccacaaatcattactaaaaaaataaaataataaaatgagtgcccaaattaataatatatgaaatatattaagtgaggtataatattattatttggcgtaaaaaaagaatgatgagcaattttttattttaataaatattagaaaaaaagaatgaaaaaaaaaagtgtaaaaaactaaaatgatgagaaattttcttgagattccctactaaggtgacaattatggacacaaaacccgcacgagtctcttcattggattctcttacttatgctaccctaaccttagacacactgacacacccacatttctgactaacttcctatctcatcactttctttcttttttctaattaattcttctttttcaatttaattacttactatatactataatccatcaccatatcacattattcaaattcagctacaaaccaaaactatatgttaccactccacattatctttaaataaaataaatagaaactttgagctgtgagatctctgctgtttttggactcagaagtttgtccagtggcgacattcctaagaaacttgtgtgtgtttttttataccaaaaaagcagaaaatggttaaaccctttttactctgcaaatctttaatttattgcagagactagtactgatgaataagaagagaagaagaagacaacagaatttcacatcacgcacaatgcggtgggtgtggtgtggtggggtgcacttttcttatggtggaacccttttcttcagtagtacatgatgttaatgctttttgatgagatattacttgtcaatttaaggcaaaataaatgatattaataaatattatcaaatacatgataacatatgattatttttttttttgaaataataacatatgattatttagtggggtactatagtctctaagaataatatatatgctgatatatagtacattagtacccttaaaaacactcatatgtaccagtcctatattcaatgactgctgctattttcagtgttagacattatatatatcacaatttacttatatattaaacaaaaaaaaaaatttatttatgtatattaaatcaggaaaaaataattacttgagaggaagacgaagaagagaatattgtgcacaccaaaggaagctgtatatatgcttcttttttttttccctttccatgttgacttaatattaagcaaaccaaaacatatgattacaataaataataaaccactctcttctctaaataaataaaatttaaaaaaaaaaaaaagaaatcaaactcagagcactttcttatactcccaccatatggtcagccacatacatattagaaaatactaatatacagcaatattaagtactccatcactacactattacttgatcattagtataccctacaaatttgaaacccaataactcaaattaactattgttaattaataaaagaagcaaaagctaatagcagtagtagtaatctctctctcttgaaaatcattcaaacgctatgatcaatcaaaataaagactaattaaaagttggtccataatatataaaaattatattatgaagagtagtcacacacacacattattaataataatactatttttttttcttcctttttatttcaaactgaaataccgcgaacagctaagtagaagaaaagctctaaatctggtggagcaaagaaagcaattggagttctctgaagggagaaattagtagaaataaccctttgtttttttggtgctggtggacacgtgaccacatctggtatacgaaatctcttacctttgggtgttgaacaaccgctattgctgcttgttgaaacgacgtcgtccactgcttcaaactcaatgccttctgttttaggcaactcatcgtcgttggaagaagacgaaaacgacaacggcgatgatgatgaatgaataccatttgttgtcgtttcttcattcttttgtcgttcaactacattcttcttcaactgatgactttttctttttcttttgttaatacttctgctactactactactactctttcttgctgctgttcttgttcttgttcttccagaaggccccatttgaagaaatgactacttttacaataagggaaagaaaaaacagagagaaacccaagacagaaaaacttaaacttgtaccctatatgtatatatatatatacagacacgcttttaaggcttcttcttctgtaaagatcaagactttagaacaaacccgtattggagatcataatcatgacgctgatcagagagactgtatataaatatatctctttctctgctatttcttttttcttataaatgctaacaaaaggtcactttaaaccttagcagaacagaacactactcaaaaccttgacagaatcatgactttgaaattaaagatgaagaagaaagaaaaaaaatccccaaaaccctgttttccgtataagctttagcttacttgaaaagccctaattgagaaaaaaagaatgtgaaaaccctaccgaggtaaaacagagaaataaaccaagatttcggaattctaggtgtgttagctgtttatatgggacaaatgcgggcagactgaccgctgcccgtgatgagagtttaatttttttggtacattccatttaagatattaaattaaaataatcaatacagcaacttgctttactaccacatagtctcaaatgaataagtgaaaacttataatttttatttgtttatttgatgcaaggataggcttatttataggattaatttttaatttttttcctttcaaaaccccacttgttccctttgggtttattttatttaaataaccaactaattaataagtgggaatacctgagcagtgtaggtgatcaatattaatataatataaaatacaaaaaaagagggaaaaaataaaattcaaaaattgagagatattatatgcatatgtatcttatacatacatagggattatatatagaatactttggggaaaccacaaaaggatggccacatgcccgaggaacagttaatagttaagattctcattcatagttatctatatatttgcttctaccgtataaaataaattatatatattaaaattgaaacattgtctgtatgctaaatccccttccgtagacatttccattaataaatattttatttgatgtacaatctcttcttccagtgctgttttgtttttattttattttgttttcttgtttttttttt

SEQ ID NO: 299078 - DNA, 4414 bp, Cannabis indica
aatatggtcgagtttgatgaagaggattttgaagctgcaatcttgtttttacgagccaaatgggattggtgcacaaacaaacctaccaaaacagatgtcacaataatcaactggtgatgcagaataatacttgaattataaagaaattgaactcaaacaattgccaaaatgccaaaggccaaataactctggctgctccattctactaatcagtataagttttcagactcaccaaacctccagcttccccagcagaagcaagatgaagacccgggcttagtttgccttccctgtttctagaatatctttgtttggctctgtcgtagctacacatacacgaaataatcggtttgagtgttttgtaaaaatagtccttacgaccataaatttcaaattctatggttattttgcaattaacaatttcatattgttagattcgcaaattttcctatctgtttatgaaaagattgcatttttaatttagcatacaaaagaagatagaatttaaaccaaaggaaactcgaaagcccaaacgaaataatgattacaaatcccaaaacagaaaaaatcaaagatcaaatcacgaacacttgaacttacaagaagaaatataaaccccacgaaattgtggagccaataactgcaggagagaagccagcgtagagccctctcaacccctgaaagatgaaaaaacaacactgagataagatacaccaccttcccgatttatcaattgtcaagctagaacatagtaaaaaccaaaacttgcctccaagcgggtaatggtgaaaacagcatgaacagtattcttgtaagttggaagattggacactcttccatcgttaactgcccaaccaaatctataataagtcaattcaaatacaaaaacctaaaaaacacaatcacccagatttcgaattctctcggtaattgttttaaatctggagaatcagagagagagagagataccttgaaaccttgtacggacaacgtcgagagggtgcatggcagcgactgtggcgaatccggcgagggcaccggcggtggcgttttcccattgccaccggtctgattgcggctgtgacgccgccatactaaatttagtttgacactcacaacattttaggcgcggattctaacgagtcaagggagacaatgggaaacgacgtcgtttcatatgtttcgaagttcgaactggattagttaaacttcctaaaaaaaagactgcggagacgacgtcgtttcatatgatttgaactagcagtttgaattgtgttctttattttaaactaaattgcatatccggtttttgtaaagaaatcacaaccacactgcgagatcttcaaactacaaaaattataccgcgataatttgatacagtgttgaataatttacaccatcattattatcaaacattataataaaattttaaaaaattaatcaaatgaaattttaaattgtctctacaaatatgaaataattgtctgccaacctaaacactccaaatccaaacatccatctcaagaggattcatgcatctactgccttgttggggcttggttttgtgtagtatcatatcaactttttaagtagatgtattgactcctttgatcaaatttaattaggttcatattgttagtcaacatgataaaattgcatggtttaactttaaatcactataacgtatacaagtccttttttctgatataaagattttattgtctaataatctttccatgacatttttttttgtcagtcataattttaatattgtgactcatttttcattatgaaaaaatatctttaaggtgaaaatttaatcatagctttggtcaatttgattatatgaaaatctatagaactatttttaccgattcgtacatatagaataccacgataatcattgaactttaagtccaaattaagaattcaaattccatttaaaaaagaatcgaatgaggtaggaaacaataaacaacaacacaaattgcaataaattttgctatcttcatggtttttttttttgaaacatgcctactgaaaatagaacaaattacttggcatgaatcccaagttattaattcatggaaaaggaaaaaccagcttataattgaggccaggaaacttagattcaaagattgaattcaaaaactgtgaactacccttaaatctgctttctaaagttacaatgaaacaaaaaaaataaaagcaaagcgttgtatcaaagattgctttgcattatgaatatgaagaaaccaaagtgagaattctgattccttggcgatgaaatggctattagagcataacatcacctctctaaatcctactactcacagcttcatctttaatagtacaagcctcagaagttcagaacttcttgttctttatccttttgcccttgctgtaaatctacaccaaaaatttaaactacaaatcaggtaataaactattataatctatacaaatttaacatcttttgttctttaaacattcactactaagctcatacaaggtaacagaagatggataacaatcgtttccctctagcaatgctagtaccgttcattagatatgatatgttgaataaaagaaaataacagagtcaccataatcagatgttttttaaccaagaaccgactagaccagcagataacagaatgactttcaatagtgccaatttcatatgtagcagcattcattaacatgccccagaagagaccaagcaacactagcacaagtgcataagattttcaatatcccaaaaatctagaagatgctggttaattcagtgtttaatgtttatttcttatacattgtacctaggcaccaaagtaaatgtttttcaagctcacatgctagttatggagacaagatcattagctaagctacagaattaaacaaacaactcaaaatctaatccacaattaaaaaactagatgagatgaacaatgatcaaattagatactaatcacattgtatgacaaaactaacaactacccagaatcaaatttcaaagatttgatcaaaatatcacactacctcactccattgagactttggcaccaacttccttcatcttcgctataatggtctccgcttcttccttagtaacccctttcttcaaaagcgtaggcgctttctccaccaattccttagcttccttcaatcccaaagccgtaaaagttctaacttctttgatcaccttaatcttcgtagcggcatcaaacccatcgagcttaacatcaaatgccgttttctccaccttcttctcctctcccttcgccgcaccggcaccgcctttcccagcgccccttaggtcaccgaatcccattccaggcatcatcatcaccatcgtcggcatctccttcacgcccaatttctcacggaggacctccgtcaggtccgttacctcgagcaacgtcaaacctgagatctcctccgcgatcgcagaaactcgctccggcgtaggttggcttagctccggcgaggccgtggtgtagggtaaggttctgaagcattggaagttggggttttgggggtttagggttttactaaatcgggaaaattgtggggcaatgaatcggaaatacctcattttttatgtggattatgattaagcagtgatagtagcagtgggattgttgaaggtgagtgaaggtgatgcattcatggctttgaatgttagaacaggtggtctgtaaaccgatctctgacataaaccctaaacggtgagttgagtgagttgaggaaggtaacgaggaccggtcatggacttgggccttgggctcgttctaggctcctagcccaacccattagataatttctctaaactatcgtctatgcttttttatttatgtcgtttttacatatttatgtcgtttacatatttttgtctattgttgtcgttttcaaaaattattctcgttttcactaaattattgtcgttcctttaaattcttgttgtttccctttatatgttttgtctttcttttccttgttaaaaaaaaagtccaaaccattgtcctttatccttcttaatgtcgtttcgtgagaaaataggtcttcccttattttgtcgttttcccttattatttgacaaaaatagtattgggtgattctacaatacacccccttttaaaagggatgtactgatgcaccctctacttgtttcgccactaaaaaatttttttagtctaattttttttttcatattcatgtacgttatagctatttaagataccttacaaaattttgagagatttgaaataatttacaatatagaaaacaatgttcaaacagtctattttacacgcgtataaaataaaatagtcacgcgtgcaacacactgcttgaacgcaattttcggtatgttaaacttttccgaatttcttaaaattttgcagggtgtcttaaa

SEQ ID NO: 299079 - DNA, 3930 bp, Cannabis indica
ttacttttctcaatattccaggcacaatctccttgttcaaggccaacaatttttaggtttattatataaccagttctgcatgttccagtatcttttctagccaatataaaaaatcaatcagattcatctactacttaagacccgaaatcaactctacatgaacgcttcagaaaaggacaaccagcaaagttatcattggcaccacttcactaccaactttcatcacaaacttattacaaattttaaaattcaatattcattgatttgtaaatcattctgaaattcaaaagaaacttaccggtcatactcaatattttcttcaggagatactttcaagttatttgcactttctaaggccaacaggtaagctactccgacctgtcaaacagaatgattgccccaacaaaatgacataagttcatccaaaaaaatggatgtgttattctgtagaaaactaatctaaagcttccaccagaagattagagaacaaattagacaattttactcaaacgaaaaaacacatattacataagagtaacccctattctagagttctggtacaaaggcttcactagccaaacaacccaccgaaacatatggagaatgaaagaaattacctggaagggaaacaataatttgtgaaacatatttttaaaatagctgaaggtaaaatattagaggcagaacacccaggagttgtcaaaataaaactagttcatttagaatcttagaactcaaatcattttgttgtaactaaatttctgttccttattgtttcttttagtgggaaaaaaataacttacagcggcagaagagctaaggcctgaactgtcaagtccgtcagaaccgcgcaggtaccctatgataccctacaaatgtaaagcaaatacattaaagtttggtggggtgccatatttattctattatgaaatcacatatggttctatgaacatgacaaaataaataaaacatatcaccagcacatttcacctgcataaaatatccttcaaaaccatgtctacaaaagagattgctggattctacatgcaaacattttcaggatgtatctatgcatatggttgcttcctcaaaaacattcacgagtttgcacttcatttcaaagagaggaaaatgcttgtataaaatatttttgtttagtttgtcgttgtaccaaagatatgtagtagaaaaacaactaaataaaataaaagttgtacaaaaaagaaggttatttttgtttttgttgtttaggggatttttcttctgcctaaattattattggtaaagtataactttggccagctaaatattatgtgttatagaagtgtacatagacttagctatgttttaattatttactttttcaaatcctctacccaaaaatcttagcatagtaaagcatgaaagcttttactaaggagataaacgatgtagaatagtaaaaaatgaatattaaataaagaaagaaggggggtagtgaacaaagatcagtaactaaactaagcttaaaaaaacattatctagactgattaagaagtacaagaaaagccaaccagatgatatctctctcacctgggaaatatggttcccctttctctgtagtgcgtatagagctcctcttgcatagttgccccaatcacattcttcatattgtttcgaagaatcatttgcatcattcttggaaacttcaatcttgtgtttagggtgcacaatttcattaacactataaaaccaacaataaaaaaaaaaaattaaatcttgtaaggagaaattgtcacatggagaagcaggaaactgagatctcattgtacacataaagttagaattattctgaaaagcttaagctactacaaaatgaacaaactaaacgatactttaatacacctggtaacttattggcagacattgagcagcacaaggtttgaaacaaaatgacatatcatgggatttagtcagaaacaattgtagcggtaggatgttagctattaattttcccagaagttaagctgttacatacagcaatttgaaatagtttttatcttaatcattattttgtccccagctatataactggaaatagctgtttacccgatgcatgagtggagtgataaggatcaagagtgggttttttcttttacctgaactttacttctcctttaaactgtcctgagcgtaatacaacctaccaaaagacatcaataattaaaaacaaggaaatgacattggaaataatgatataaaattttcaactcagtttataccgtactgatttatacagtttttcaacaaaaacctgttatacaatgttacagaacattttgttttaaaagtaaagctattcaatgaatacagactgtgactttattgcaatcagcatgtctgttatgatgaatactcttcagaacactcagagaatgagagtatcagctgagaaattttgacttttgtaagacataaaatgttattgaatcaaaaagaaagactaaagcacaaattggattagagggccagaggttgacctaacatatagagctaaaaaaaatattagattacatttctcagctagcgttaattgaaataaatatgtgaacaaataagaaaaagacgtgcgcaaaactttactcaatctcagagaatcaatgtctcctgaggttgtcttcaatccaacagaatgatcactaaggtgcacctccaaatcattctataaaaaaaccagacccccaaatccaacaaaaaaactgaaaatttctagtcaagcagagaagtaatcacatgggaagagacatgcaggggaacccaattgctagagcaactaatcccataaatgattgaagcaatgggtcaagacctgaaaattggtctgcaggttcagacatacttttacataaacaagacagttgcctggacatttcatctggagcacattgaaggtattgaccctattacaactaatgacaactaagcaaaatttcatgcttctcttggcaacaatagacgggcaaatgaagtgaaaggctcgaatgaagtaaataaagaaagagtcaagcttagtactttcatttgacttctctataagaaacagaagctatggtagatcacttaaaacaattacagaacaaccttggtatttgatgtcataagcacaaaatcattcgcttctattcattcccttcaatataaaaccattgtatggttcaacagacaccaggaaatcacataatcccagagctttagaatgaaacaaatttggttttgatttaacataataccctaccataaacaattgacggttagatgtcacaacccaacctaagtggccatttcatatagttcttacgtctgttttccaccactgcttttattataaaactgattactacaaaatataaatttttgatccataagccttcaggggtctcgaataagctggtggtcaatttgaaatatatccatcattcctggatatcttttagaaattaatagcttcaattttagattttataaatttagatttcataggtttttttatgtgaaacttggctctgcgcctaaccttataataatttggtacgaagcaactataacaattgctatgtaagtattcaaggactcaaatatcaaagcttgtgaatgtgaacaacatgcctgaatattcaattaacactcttgggtaatttgcaagttcattttcacataatgctactcagtaaatttgaagtcaaagttaacatgtacaattttctgaaattgtgagttacgtcctccgagttggttagattgttacagaagagtttgtatcttacctgactatcactagaaggaataaatcctagaagtactcctctattaattgccatagctgaaaccgtcccaccctgcaaacagtaacagtgtataaaaatacccttagttaaaaaaaaaagaaaaaaa

SEQ ID NO: 299080 - DNA, 1101 bp, Cannabis indica
tactttctgctgctgcaaacgcttacagtttttatattttcttatatataactgacatttgcaaaaacacggtttttcaaaaaagataacttgtttgtgaaatggattaattgtgtatacttctagaatagagattggtagtaataccaaccactaactgattgtagctggtattggaagagattagtagctatcaaggaagcatttaaagcagagattggtctgcaacaattcaaagccttgaattacaacatcaaaacagggcatggcctgttatttcagcaaacagagaaggtgaaatgggttgctgttgtgtaggacagattgtctattccgaagtatcgtattatactttggttggcttttctacaccaacttaaaaccaaagaccaaattgcgaaatttgaacctttggtggatcaaacttgcctattgtgtggagatgtgaatgagaatatcggtcatttattttttctttgccaatatagcaagaagaagtgtttgacggaggttaaaaggtggatggaatggaactcggaagccgtggatttgagtcaattaattcgttggattgataaagcgaagaggctgagtaagattcgaaaaaaacatcatccttgccgctttagtttatcatatttggagagtttggaatgatgtattttggaattaaaagctttggcacactttaaacactgtacagagaatagaataagagatacaacttagaattactttagttatgcctaaaaaagtgtaaactaatgatagggattagttctctaaaatttgtaaagaaaaaatttagtagaactttagttgatttgtgatgtaattctatatttgtttggttgtaattgattgttgtaaatttaaaagtgagtaatacaatgatttttatccataaaaaaatatatataaagatatagcaaaagattgtattttttgtaaatatataaaaatatttaaaactaggtaatgtagccgctctttgtgcggcgagtttgtatattttttttttcaattttagatatttatgaataaataaagtattgtaaatatttaaaattgttaggttttatgccctaaataaaacttatt

SEQ ID NO: 299081 - DNA, 3501 bp, Cannabis indica
ttttttatgtcgttcctctttatatgcagatatatgcagaggccaatgagggggagtttgaaaagtttggcttccgcgttttgcatgagttttgtaagcataatcagagtgcacggtttgattgattacctttctttcaccgagctgaaagagttcatggacttctgcacagcctaagaatcaaacatacatgcatgtataaaaagaagaatatacgcatgaatatttgaatcttatcataaattattgacatctgccgtaatattttaggaaaatcaattataaatttaaaaaataatgatattccccaatattttttacattgtttatggttggagtattatgggatgggctggagataccttttttaaggtttttgtattcacaactgacagaaaagaaagagacaaatgggaatgaaaaacacgtgtgtagtacccttttcatgggaccagaattcgccgaatggtatagaaattatttctttactagtgtaaaagattgaaatttgaaactacacgtctttacagtaagcaagatcttgttttatcttaatgtgagttatcccacgcctcaaattaataatgtatttgtacttcgtagtgatccctgcattatatttttattataagaaaagtcgttcagtgaagatggtcagggttgacccattcgatgccgttttaataaacgaaaaaaacaccaacactacacagcctcacttcgagttggacatatgtatatatatatctaatcctgaaactaaaatcacttataataagagagaaaagactgagtcagaccaaagagaggtaataataaagcgagaaaattaatggaggagactacacacagtcacagatggtctcttgatggaatgactgctcttgtgactgggggcaccagtggaattgggtaagaactaagaagctcttttccatcttcttttattttgatttcaagtatttttatacaataataatatgtgatatttaagttatgttgtggctgttgtatcattgttattaggtacgctatagtggaggaattgtgtggactaggggcaatcgtacatacttgcacttttaacgaagctcagctgagtgaatgcttgagtacttgggagagtaagggatttagagtcactggttcggtctgtgatttgttgaacccatcacagcgcgaagagctaattcttaaggtctcttctttgtttgatggaaaactcaacatccttgtaagtggcctaactatgtctaactccaaggttttctaataaatttaattatgcaaaaaatctaatcattattaggagaaaatttttattagtagagtcaaattctgtagttcgtagggaaatgattccgtattttaaacttggaaaaattatttatttattatatatataagtgtgtgtattttagttatattaatttttgagaaattctatacaaataaacatggtttaatctgttgaacatgcgaaacaagcacataccaagtacctatttgaatcatgtaagaattaaataattttttgatactggtgaaagatcgaatataaataagctatatgctttcataattgtcattataatttgttcactctttattaattatcaagggcgaaagcatgttttttcttatagattaaaagaactcattacatatgttatattaataacaaatatatatgcatacattaattcttttagtttcatttctttcttaataattttcttgtttctcttggtagataaataatgtaggaacgacctatataaaaccaacactggagtacacagctaaagatgtgtcatttctgatgggcactaattttgaagctgcgtacaatatttcccaacttgctcatcctcttctcaaagcttcagggattgggagcattgtgtttgtggcctcagtggctggagttttagcagtaaatgttggatccttatatggtgcagctaaaggtattgaattctctttgttgagtacttagattaagaaccaaattagaaaagaaacaataacaataaattcataaagatagacttatgtaaattgcaggagctattattcagttgaccaaaaacttggcatgtgagtgggcaaaggataacataagaatcaatgctgtggcgccttggttcatcagaaccccacttgttgaacctgtaatactcttttttatacgttaaatactatctttgtttgtaggattaacccataatagtattaataattattattattattttaattttatgtttttctttgtaatgataaactagcagaaagtacataaatttcatacatttattgtgtttctattgcagttattttctgaaggatttacaaaagaagtgaatgcgagaactcctcttgggagaattggagagccaaaggaggtgtcatctgcggtggcatttctatgcatgcctgcagcctcttatataactgggcagactgttggtgttgatggaggaatggcagtgaatggaggattattttcttgaaaacaatcaaggcaaattaattaaaataagtttttctatttgatatggggagcttaaataaatctttatcttgtcttgtcttgttatgataatttgtttgaaaaataattatctacgccaattagaccatcttaataaactctaaggtacattttgtgttacttagatcctatgaatgtaatggttggaatataataccttagctgaaactatatatgtttgttagttgatttgtttctttgcttcatgttttgtttggatattttaattgatgagtaaattgaataatctgttaagaaatcaagtcaatcaacccacaaaatatgagaattgagatatcttttcattaggacaattgattataatccattttatttatatcctgatttcttttaattatatagctatgtcttaaataggcatttattagagtatataggatttgatttagaatttaagttgtattgtatatatatttatcgaaagttcaataaaatacatatcaatccttactgatttttcatggtaccagagcaaccatgatcctaaattctatattttccacatacaagaaatcttcttcttgctgatacacatggcaggaaaagatgaaatccaaaattcatcaaaatctgaagctaataagtttgatgatcctaatgatcccatttatctccatcattctgattatattgggttgtacttgtttgtcacacaatcaataaatgaagaaaactactggacatggagtcgtgccattatcatggctcttaaaatatcaaacacaaagaaagctttgtcaatggagctatcaaacaacccctcaagacttccaccacaaaatttcaacagtggaaacattgcaacaaccttgtaaaagcttggagcatgtttggtattgttttctgttttttgttttaaaaaattgtttttagaaatgagaacaaaaaatagtttttgaagtttttaaaacacaagtcatgtt

SEQ ID NO: 299082 - DNA, 3251 bp, Cannabis indica
aaaaaatacaaacacctatatgactcattatgatatgattagtccatactaaaaaatagcccaacaccatcgaccccacattcaagctaagatgctcaataccataacactccaagaaaacagaagttgaaataattcaaccaaaacaaaacaaataaataaagtaaattccatatatattataatgtattttacttaattataagttactgaaaaggacttaattctgagtataggatcgtctgtattgtatatatgtcaaccatcgatctttctttgttgataggaaaagtttttttaccaataataatggaaggactacattaaaccacaactattattggtaacttatcataaatgggttagcacttaacaattttctttttctttctttctaaaagttaatttgttgggaagcaaccgatttttatgctactcctttttgtgggatatcttttcttctttgagatttactacaaataataataatgcattacgaaataagcacttatagttaagaataatacttgtcattatcatagtatgtttacttaatacatatacaaaaaaagacagaaattggttatggacttttaaagggttttcatttcttaattctttaaacattcatataattagatatttaaggtatttaatattgtattttcatgaaactttgtaagtagttaaaggtttttcatattatttatttaattaaaatatatggaataaaaaaaaaatcatacctacttttgcagattaatgaaaacatacatgtgtaaagcttatatagttatatacatatatattatatatatagatatagatatacacttgcgtaaccaacttagaaagctatatataaatatatatatattactgagttccaaaacaatgttaaggagatttagacgtacatatttgtagtaggtgaagatataaaggtcattttccttaaggaattaggaaccgttgagtcattgaaaattaaaatagtacattacaaaattaagagaaagacttcatttttttttcactattgaaaaacatcatcaaatagtgtaattgttgtcacatacatttgctttttaatgaaatagacggtttagatgatatataattatgaagaaattagggttgagataaaggggcccattatacaaatgatggtgaagaagatagtacaatggtgtccaaataaactcaagggtgatgaatgaaattgatgatcagaaattagagagaagagaagaacaaataaaagggtcattttctataggaccccatgtgagttatggttcatcttcataatatatataataggacaaatccaactagtgcccttcaaaggaccccaatacctttttatggaaaagggcatttgagagtgactgacttggaatatcttaggcacgtgtcgacatgagtttggattgtgtgaccttggtgatgagcacactacttccctactaatcttgtctcttgggccattatttcatttggagaaatactaaaatatccaattttgtatattttaatctaatcaaattatagctaatattatttgtaagacgtcttctcgtactaaatactattagtgtttaataataggttaatgaagatttttgttttttgaactttgacatatattaaatcatgtactttaaatttttttgacttattaaattttttcttgaattattaaaattgttggatttaagaacttttgtctaattttagtaagaaaaatctaataagaataaaagtttagaggcatgatttagtacatgtgttaaagtttgaaggatatgatttggtaaatatcaaagagcataatttagtacatagacaatcacgaattagtaaaattgaatgaaattggataaaagtccttaaatccaacaatcttaataattcataaagaaatttttaacgaccaaaaaaattcaggaaacataattttagtacatgtcaaagttgagagaacaaatattctaattaaccttaataataatattttatagtttagaagtgaacttatatcatttgtttttactcaaatatatctatccccgtgttggtttcatttatctttttattaataaatttaatcacacgctaattataatttttatcttaaaattaagctaatgaatgtaacataaatctaatcacttgaggctagctcaagtggccataggtgggtgggtgtgtgttggaggtcctcggttcgagtcccaggtaaaacatgaaaattataattaatatataaacggttaaataaaaaaaaaatgtaacataaatcttacttacacatagcaatgtgagacaaactcacacacactaaagtttctttttaataaatttttatcatatttactaaattttataactaattgtatcaattgtgaagctagcgtgcaagtcattttcaagtcacattatcatgtctaatacaaattattatcccttacacattttagtaataaaaaacactaatatataagaccccccctccctcaagggaacaccttttgtccccaattattggccatgggaacccacactcccccaaaacccaaaagtttattaggaatttagtgagaaacgaaccatggtcgttggtagttgatacttgaggtttcttacaacaattgaactctataatgggaaaattatgtctaattaatatgatgaccaaagaagactaagataacaattggtcgacaacctccaaactataatgcttatagttgattatattataaattattcttacaatttctttcggctcactctacttttcttttttgggggaaatcattttgtgccctttatatgttgatttctcactttccatgaatgaattaatgtgaagatttgtgacccaaaaacacaaaattgcttaatataggacttagagatgataatcataatactaaatgtgagctaagttaagttacaaatatatgatgaattgttcacttcacaaataaatgttagttgttggaaacaagataaaatttgatttgaccaaattaattggtattgggtccatagggtgcttatagttctaacccatgcaccctagagttgttcacttatgagatcatgggtatcaagtcttggaagacagaagttgtgacagtcagtagtcccgtgatctgtaaggggaaagaccgagtaagctgtacaatccaacaccgcctggggaaggtcaagtggggtgattcagagactgtgtaggtatg

SEQ ID NO: 299083 - DNA, 4000 bp, Cannabis indica
ttattctgattttttaagattggtcttgcaaatatagctgatattgcatctggtaatgatgctgtgcagaacattgttattttttttaatccttttttcttttcttttttgctagatttgttttagtgttgtttaacagttgttttgccatgactatttatttgacgtcgatttcatagttttttctcaatcttactggaattaataattgttttctaattgttctgatgttcctatagtggttgtccgtgggtgtggaaaatggaggcctcattttattttttttagtgtttacagtataaaaaaaagggctaatatagtataaaagttatttctgttgtgttgcggtatttttctaaagattgggccaaaagttaatatttttataaatttcccttttaataattacgttatgtaatactaaaaaaacatattcttctctaaaaaatttatctaccattaaaaaggtgatcatctcttttaattttaattctgtaatttttttggttatttttgaaataatcccttattattagcaggccacttaataattttattctatctatatgtaatttattaatttatttttttaagatgaacaaagtacatgcaaagctcattatataaataattaattgtttttcaaatatttaaagttatatgattatacttcttcacatgataatttgtttttgataaatttattatatcaaatatttgtaaaaaaaaatttgttatagtattttatgtttttttttgttttatttataaatataaaaatgtaaaatgttgtatcgaattgaaattttaaattataaattaaatatatatttttttatttcctactatatatataatttttttttccttttatgttaacttaaataaaaaataatttatgggtcaaataaacactaaaataaatgcttttattgacgtaattttatcaaaaatactaaaataaagtacttgcgctaaaaagtctcgtggaacccaaatggaaaaaatcagggaagattgcatacaaagacaaggttgggcaaatttaatatagtagctaatacaaaatattgggtacgtgctaaatgatggcatattttgattgtcaatttagtatgaaatgtttgattgaaattgaagtttagttgtgatggagaacaaagacaaatatatatcaaaactatggtaagatggctttctggaggtaaagttttcaagggcaggtgcatggttttgatggctgcatgtgcaatacttgagtacagactatgattaaatagtgttgagaattatgagattacatcttaaaacctaattggcattatctactttttattctatgtgagacaatgtccacaatattttcgcttaagatggtgctattttttcttcattaatcttgaactgtattagagtagacatagtcactatctgtataatagaatcacttgctcgcaagatatgactctaatatcatgttgggaatcatgtggttccatttcaaaattaattggtaatgagtggagtagcccatgtttttatatatgactcaattctctactatttattttatttggacaatgtgcacaataaataagaatgaagccttatggaatactaaagtgttttacaatggattgaattgtaaagaaagtgaaatatgatgtaaagaatagggattaatatttttgttgtgtcaaaggaagtgagcaaggaggataggagttggatggaaagattgtaatagattgaggcttttttggatttaaaaaagtactgtttagtttgtaaaaatgttctgaagtaatatatcatctctttatttatataaaaaaaataataagggatagtattgcacttcaaacaattcagatcgaaaaggagaatgaagtcgatatattgaaacattaatgactatatataacatattgttgatgtaccaaatatattggagagtacaataataaagtgtaacacactgaataataaataattattattattaggagaatatactcatacatgcatgctcctcactttaagggagtccacctccgagaccacctccagctccagcacctccaccaaaccctccaccagcaccaccaccaagtccgcctccgccaccccctccgaaacctcctccaccacctcctccagctccaccaccaaggcccccacctgcaccagcacctcctccaaacccagctccacctccaaagcctcctccggctccaccaccacctccaccaccaaagcctcctccaccaccaccacctaatccgccaccaccacctagtccaccaccagctccagctccagcaccaccaccaaatccaccccctgctccagcaccgccacctccgcccaacccaccgccaccgccaccacctaaaccgcctccacctcctaggccaccgtggtgaaagtttttctcgtcctggaatgaaactttttcattcccaagcttccttgcattagttgtactagtgcaaataaaagcaccgacaaccacaagaagaagaaccttacaagtcatctcttttgaacaattagagaatataatatttaaagctaaagatgttccttttaatttggtaagtggagtgagtataatgagaaatggacttgtatatatataaatatatgtgtaagtataaatatatataatagatgtaagattaccagatcatagaactaatccgtagaacagttgagaagatagatcttcaatattaaatattttgcatcttctcatctataaaagttcaaaaccgtgtttcgacaatcagttaataaatgcagtccagaattcccaactgtaatttgaaaaagagaggcaaagggaccctgatacatttgctgctggcccacatgtcacaacttgctctggccaatgcctaatggccagctaagtgttcccattgctgcttttctaatgaatttcatgaatgactactcctacctattccagcagctttaaattttgcatggactttttgcatggttttgagcttcgtctctggactttcatgtgcttaattctgccataatatttgttaaattatttatagaaatttatagctagctagctagagctttatatacgtatccaattattgtcactcctatataagggttgtcgtatacgttgaaaaatgcaaaaatatcatttaaagcattacacagcatgcataaatatatattggacaagctatgtggtgattattaaagagaaatacttaaaagcaccagtggtgcttaacaccctcttatgtgtcagtatcgctattggttcaactaggtacatagtttaatataatagcttttaggaagtatcgctagctaatcgccacgtgatatatcgagaaagtgctagacaccactaatgcttaataacaataatattgacgatatgtacatcattataactatatctatttatataaaaaaaaggaaagaaaaaaataaaaaataaaatagtggtattttatgttaactttttttctttttttattaatttctgaagatttacgataaatgttttagaaataatttgatattgttttgaactatttttgatgttgtcgtatgtagtataaataaatttattaatcttatttatttctattctcttatattaatcttgttattttcaattagacaatgcagagtagttagccactttatagcgtcaataacaacaaaaataataataaaaaaaaactaaatactataccaagtctctagtagcataagttataccattttacatttagttttatttgtataaagttttacgtcgagctttgctagatgttacgtgtgtgctaagatggtatgttgtaagctaagtgatactcataaattggccaagtggtggtcaagtagtggcgcatgttgtggcgcatgctcagtggcggaactatgttatggtatggggtggccatggccccccctaatattttgggaaattatttttaatatatatataatttat

SEQ ID NO: 299084 - DNA, 6624 bp, Cannabis indica
tctctcctctctctctctctctctctctctctctctctctctctctctctaataatttgaataccgaaaagaaaaacctaattgagtgactaattagtttcatcacaccatgtaaactacatgtacttcttcataatttttcataacttatatataaacttatgtatgtttatacatacgtcctgctgtggtcatgctaaccctaattcccatatttgaattttatttcatactattaatcatcaaatcatctactctcagtttcatatatatatatatatatatgaatatgcgttccatatatatatatttaatactaattgactcacacatgctccaatttctcatactctaatttttacttcaattttgtcagtatatatatgaaattaggatgaactataaatatagcattttagccactatatatgtatatatcactaaaaatatccccacaagctgtctcctccgtctgagctaccgggagactcctcagacaacggcgagctcattcgcggaggggaaagcaacattccctccgccatttccaccaacagattcggcataccgaacaatgcatcctcatccataaactcatcataataatgataatgctcaaacgacgtcgtttcgttattaccactattatcacgaaacgacgtcgtttgctggcgtctcgcctccaatgctgtaagctccgccttcttaaatgctgcagcggctgcagccgcgctgcgaatgtccccggctgaggctgaagccgggaccgggtactcacggattgagttgggaaaattaaggactgcctcagctccttttagggcaagagctgccacgtcgtaggcggccgccgccatctctggggtggcgaaagtcccgagccatatccgggttggcgtacgtggttctcggatctccgaaacccatttcccactccgacagcgaatccctctatacctagggtgtttactactacttctgctgctagttgaagccattgatgatgacgtggcctggttattagggcttataagggtttcacacgtgtaagacgatggtgacgtagaagtagaataatgttgtgtagtttgaattggagttgtagtagtactagaagaagaagaagggaagtcaagattggtttggtctaataatattggtttacttggattgttattagtttggtcagacatgagaatatttatatgtatatataggtaactgatatgtatatatgtatatatagagagagaggaaattaattaaatgtgaatagtagtagtagtggggattttgaggacccatatgttagatttatgagtacttaaatgataaaaaagttaatgcgtggggatgtcgcgggtgataccccgtagccaaaaattcatataaaggaagtatacaaaatcagtagtagtgtgaccttattgtagaattgccaattgggtatgcactggctagggttttggactatatactagcaaaccattgctgaaaatgatatatcgaaaagtaatatatgcgtaacattaataataaacatggaaatatatgcattgtcattgaattaaattgatggaaatatgtatgtacaatagtacaagtgcacacgttttaggcacgacaaatattatatatccagctgtcatctaaagttacaaccatgtatcacattttctctctctctctctcccactcaatagctttttaataaaaaagtttcagctaaatttaaatgtttcactatatttatttattctttttattggaaaatcagtaaatttgtattatgcacaaaacaattacaacaagtataaggattacttacaagctttaattgatccaatgcttcaactcaatttctatccctttgactcaacgtatcctttatacaccaattaattctatcaccaatctcttttttaatcccttacagaacagtttgaacagtgagaatatgaaaattccataaagcacaattcttagtcttccaaacactgtaaattaaccagagaagctattaagcataaaaaaacttccttctaaagcgagatattctcttctttttaatccaacgaagcatactattaagatcactctaaggagaagctatgcctgcccagatcttcaaattctctcaagacacctcctactaaaattgcagtgaaaaaagaagtgttggtggttttcatttgcttcaccacaaatcaaacaagattttccaataggtataatttaccaaacctagaaagtctatctctagtaaataacctttatttagatgtcatccataatccaaacctatgtttaggaatgcaaactctgtcccagataaaataattactccaatttttctttttgtctgatctaaaaaaatcatgcatatcagcaatagagtaattattatttattaagctcctttggttcattttactcttcataatttttttggtttggacaattcattttccaatactaattactatttgatgggcaatcataatctcaccaattctcatcttttatgtagaactcattcaaccatttcacccataaattatcttttttagaagtaatggcccacacatacttccctataacagcacaattccataaagcttctttgaaattaaggcctccttcttatttttggtttacatatttctgaccaacctacagctcctggccccaagtaattttttttttccttccacagaaaggctctacaaatttaagcaacttgattgcctgtttttaagtagtgttatacccaaaattcgactacacttcaaaaagtgacacgtgtctggaatatgaaccatctgatataataaagttatatcattaaatgcaagataaaataactcgttaacaaatacttaatagaaaatattcataattcgctaactatatagtcttaagcgagataaggataaaatgttataaaaacttgtattgacgagacactgcttgcctcggagtacactgtcaaagtatatattcatctattcgaagtagaataaatacaatcacacatggcgacctcgggttatgtatagcgaaacagtcatctcgctattttaactattaaaacttaatgcggcgaaccatctgctaacacttagcgttttctccatacaagatggacaaggagaaactatggtggtgataatacaaaacccagaagggaggaatgaagaaactaataattctactggatatatacctagaaatgaagatgcatatgatccaactaggtatgtaccattagtagaattggaaaatacacagctccagcaatgcttagccgaatctaaccgacgaaaggctgagttagaaggagaggctgcaacaactagggtgaattaaggaactaatactcagaattaacctgatccttggataagaagaccacggggcagaccttgaggttcaagaaccaggagacatgaagtaaatcaaggaaatccccaaaacacccaggaggaacaacctggtggtactagggatgttctagttgatgaacaacaaaataatcaggaacaacggcgagacgttcctcaaagatcccaaggatttattaaccaatggaatgaacgtaatgatatacaagaggaaaatgttgcatggtgagcttatgttgattcactagtgatagtgtcgccagtgaaggcatcattgaacttccattaacggtaggagagccaccgttatctacgacactaatgcaggaattcttagttgtcgatcttccatcagtttataatatattgatgggtcgccctgcattatttagactagggacagtcaattcaatcaaacacctatctctaaagttccaaacacaagagggagtgggtgtggtacgaggcaaccaattgttggctcgcgaatgttatcgcatagatctttaaaatagaagagctaatcatcaattgatggtggtcataaccgaagaaggcgagaagaaagaagaggatctagaccctagaattcaagatgagaataaccaactaaaatgaattgaagagctagaagaggttgttttagatccaaacaatcccattaaatgagtgtttattggaaagaatttggatgaaaaactaaaatagcagttaattaactttctgaaggcaaactaggatcaattcgcctggagccattcagatatgatagggattgaccttaaggttatctatcatcatttgaatatcgaccctaattacccagtaaaaagacaaaaatagcaacccttagactccgagagaaagtgggcactttaagaagaagttgataaattattgacaaatgactttatatgcgaagccttttatcgctcgtggatttcaaatcctattcttgtcccaaaaccaaacggcacttggagaacttgtattgattttttagacttgaataaggcatgtccaaaagattgtttcccactgccatggattaaccagttagtggatgcaaccataggacacgagctgatgacgtttatggatgcatattctggatataaccagatcaaaacgaatgtccctgatcaagaacacacaagttttgtaacaaatatgagactttattgttatagagtcatgccatttggtttagaaaatgatggggcgacatatcaacgactggtgaatgggatgttcgaaaaacaaattggacaaaacatggaagtctacgtcgatgatatgctggtaaagtcgataaagagtaaagatcacacgagggaccttgaagagtgctttgggatgcttaaaaagtacaatatgaagcttaacctgaagaaatgctcttttggagtctccttggaaaagttcttggtttcatagtgaatgctagagggattgaagccaatccaaaaaaaattaaggccctaattgagatgtcttcaccaatgaatcaaaaggaagtccaggccttgacaggaagaatggcagcattaaacagattcatttcaaagtcaacagataaatgtcttccattctttaatgttttgtgaggcaataagaattttgaatgagcgaagaatgcgaggaaacttttaaaggcataaagaaacatatttcgacacctccagttttggccaaaccaataatggagaaactttgtacctttatttagctgtctcagaacgtgcaattagtgcagccttggtgcgagaagagggaaacaccagcaacctatttactatgttagtaaaaggttactggaggcagagtcaagatatccccctcttgaaaaacttgccttatgcctaattcatgcatctttcaaatgacgaccgtatttccaagcacatcccattaaagtcttaactaatcagctactaagacaagttttatcaaaacctgattcttcaggaagattgataaaatggccaatctagttggggcaattcgatgtaacctaccacccgagaacatcaatcaaaggccaagttttggctgactttctaattgaagggataatctcagaagaagacctatttgtcaagcacgatactgaaacttagaaattatatgtagatggggcttcgaatgagaatggcttagggccaggagtcataatgatgtcgcctgacaacttcaaattccactacgcattaagattccaatttgatacttcaaacaacaaagcaggatatgaagcttttttggctggcttgagaatagtcgaagtactaaaagttaggaatcttagatgctatagtgactcgcaattgattctgaatcatgttctaggtcaatgccatgcgaaaggattaaggatggaaaaatatttagagaaggttcagaagaacttggagaaatttgattattttaagattgaacaaattccaagagagcctaactcaaatgtcgatgcactagtaaaattggcgtcgcaaaatgaactcgataagttgaatctagtaccagtcgaagttttgagcaacccaagcatatgtgaaaaggaaaaaattgagatgatagacgccttgccaacatgaatgacacccatagtcaaatatctactaaatggagaacttcctacagacaaaactgaggcacgtaatctcttgtattcattgcctctcttacgatgtgtgttaccaacaaaagctagtgaaataatcaaagaaatccatgagagcttttgtggagaccatgtacgttggcaaagtttgtcaaagaaaattatctgttaatgatactattggctaacaataaataaaggcacacatgaatttgttaagagatgcgacaaatgtcataggttttcacatatacctcgtgtaccaccaacaaaattgagaatgatgacctcaccatacctatttgcaatatggtgaattgatctgaatgggggattaccaacaaggtgaggaagagcaaagtgcgtagtagtaacagtcgacttcttcacaaaatggataaagactgaacctctagtttccataacttgttaaaaagttctcgattttgttgtaaagaatatcatttgcagttttggaatacaaattaaaaaagtatctgataatggaactcagttttacagcgagttgttcactaaattctgtgaaaggaataagattttttaaagcttctcgtcagtatcgagaccttaagcaaa

SEQ ID NO: 299085 - DNA, 4064 bp, Cannabis indica
tatacattaaacatataatcatgaaagaaatcatgtgaaccatgcaacataaaataatttcagactttttattaattagtaaatctgattatattgaaataggttttatttagggcataaaatctcaacttttagctctctaaccttccatccgagattgaaccttctcaacaataaaattgaaatctcttgacctattccccttaacagcttaacaaacaaaggaattctaaggaactattcctccccagacattatatcataacccaaatcctctgtaatcctcaattgtaactgctgtccataatttttagagaaaaaagatccttaacttatggaagtttatctattgacgcgactaataacaatccttagccaagacatctgtgatattctccatattaagggtattagcttgagtgaagaaaatggtgttgtcagcatacataaggtgagaaatcgaagtgctagaatgtataaacctatacccttcaatcgatccttgatgttctttagtaagaattaaccaagacaaaacttcagagtacaaaaatgaaaaggtaaggggagaggggatcctcttgccttagacctctttggggctcaaagtttttactcaaaccaccattcatcgagtctggaaactaacactagaaacacattgagaaataagtccctataatcgttcatcaaatccaaaggccaataaaactcgattaacaaaacaccattccaatttgtcataagcttttgacaatcacatttaatgccaacataagccatactcccctattttctttccatatcttacacaacttatgagcgataatcgagttgtcaatgatccacctccccttaacaaaagcaaactaaaaaggagagattaacttatctagcacagagaaaaatttgttagccgaaatttttgcaactattttatagctcacattgcatagactaatggggagataatcatcaaaacttctagcatgattctttttaggaattaaaacaatgaaggttcaatttacctcatttatgaatctccctgtggaaaagaattcaaggacaaagttaactgtccgttgcctaacaatctcccaacgatctttgtagaacttagcggggaaatatcagggccaggggacttgagctgaggcattttccacacaacatccttgatctctctaggagaaggaatggcgcaaagatagttactttcctcacgattaatacatagtttaattagagatataatctcaggctccatcgaagggtgagaagaagaaaggaatcaatgaactttgatctaaaatactctacaacaagccgttgatcatcgatccaatgattcccatcttctgagatagcccaaataaagttcttcttcctatgcacaagcataaaaaagcatgaaaaaatcgagaatttctgtccctccttcaactaactccctcaatttttgttgccaaatcatgtctagcctcattcatcaatctctaaattaatagcactttcagttgtaaattctcaggggagggaggacgattttgaagatcaattagtaatttctccaacacaactaatttccttttacagaacccaaaagaatcaacattccacttagagagcgcatgaatagtaatgcaaagtttggtacaaagaatgaaactttgatagatgctaaccaaatgttcccaagcttttttaataatgtttttaattccccatccattgtccatgcatcaatatatctaaaaggctttttaacatgagcattatcaagataattaagcatcaaggacaatcggtgcatggtctgaatgtcgaattagaaaattattggtgttggctttggcaaaatgagataaccaagatgtagagcagaggaccctgtccagcctttccttaattaaatggttcagatcttggccattagtcctagtaaataaggctctgattccttccaaatccactaccctactatcaaacatgaattttcagagccctcgctccttccatatctgtcataggcctgcccccaaccttgtcatcttggcaaagaatagaatttatatcccccatgagtatccaaggttcttccaaaacttaaacaacacctaacatatcatcttagaaactatctcgatctgctctcttgggaggagcgtaaataaaacacccataccaaggcttaaatttcctatcctcattgaaactaataataattgtgtcactctctagataaacaacattaatatcccaacccacacgccaaaaaaaagcaacccttccagctaccccagcagaggaaaaagcaacaccttcattaaatcctaatctttgccaaactcctttcatgtcctgactactaagtttcgtttccatcaaaaacaccacatctgaattaacgctatgaataagagatcgcagtgaattcattgcctgggaatgccaagcccccaacagttccaagacatgattaacatgggagaatcgggggcatgataaggcccgcctcctcagactgagaaaatccaaaccatcttcatccttggtttccttaatcaaatttgagtgagttcctccctcttgactgacttgtttgccatggtcacaaataatcccctcttcagagctctgttcttctatggtaatactaccttggcttacaaagcagcttcgtttaaggagcccctggtcttcctcatccaaagagacattactctcatttaactcgttccctaattactcggcccatctggcaactgatccaaccttcttttttatccatattaggaccaatagaactaggccagaacaattattgaagcccaaaagttccatgcgaacaaagcccttaagcttatgtctaagtttttgacaactattttagtgagggggtcaagagaccctttgaaaactattgccaaatgtgcaatttcagaatacgtgggtccactacacccagtaacattcttttcaagattcatatccatacctttgcgcaccacctttctgatccaacatctgcatgggaatagggttttgcacaccctcatccatactcgtcatatccgtactcatttcctttcccacctcagcctcgacttggatagtattcactccgttagccactggttctaacaactctccctgttcctctaagaattcatgacggatatccgtatccactagagcatgttaaaaaagaagcccttgcccgagaagagtaaggatttcttgcctcttaagttgttctagaataaccccagcatccctgttaacctcaacttgtgcattagctataccattatcaacattctcctagggctcatccccgagattaagagcatggaactccctttcagcatcttgtatcatgatactttcaaagcaatgtttttttcgagacccaaatctgacccaagttccatacataggtacatagcggttcatatcattcaggatatgtattctacgtcttgaacataccatctcatcgtgccctactatgcctcacttgaaacaaaacctaggaagttttcatatttaaaataacaccataaactaacaccttcttccatagggagatgaagacccacaagaagcgatttcttatgattgagctccacacgaagacgaagatactctgcaatagggaaaccattcctccacatcttgtcgatgctactcactccacctattttcttggtaatcgcattagcatttcgatcagtgaaaaagaaaggtggcacatcataaacccgaacacaaataggaataacttcccaattttcatctctctgtcttccatcttctagcataggcttgagaatcagatggccccacaaacctcccacggacttctagcaaccacaagttccacttctttctttttttgaaaatgtaaagtataaagattacccccttcagggccgtctcaaggtcttgagaggcttagggcaaaatttgaaatgaggctcttttttttacaaaaatttaaaataaatattatttaaattttgacacaatatcgattttaactattttatctccatata

SEQ ID NO: 299086 - DNA, 4220 bp, Cannabis indica
ccttttccctatatatagtagccatttctctcttctcttgaatgcacaacaacccacgaaaataagagagaaaagaagagagaatttcgaaaatccttgtgagagagaagtgcccacacacatcactcagtacctcaatcatagtttggaagactgtgaaggatcgcatccaactgaaggagaatcggactcagatcttgattatactctggtacagacaggaatcaagggttatagatctgagtggaaggatgacttaattccactaccatcactgtaagttattcttaacttttatgtgttttgttcattgtttttagaagttcatatttaggttgttaaatcaacatacttgtgagtagatctaagatcctggtaaaattaattccaacaagtttgactttaggatattccaaagtcgattatctaagattgtgattctaattttaccttcatgatttgggagacttcataaaaggatatggatactaagttgaagtttagcatagttattatccttagactaggggaaagtttgagagaagtatcaagacatctgaagacatgatgtcagcatgtatgataagcttgaagggtcttgaaacaaaatctcacttaggttgtgattttatacagtaacagttgacaggttattagtggtttggcaccatatgaaaaattgtagatgaaaggagctaagtcacccatccataaggatgaagtgggtgaatggaaatggaaaaaagtaaccatggagtttgtggttgggttaccaaagattacagggttgtgtaatttcatttaagtgataatgggttgatataccaagttaatgcacttcctaccactgtggacgacatacacagtggattagtttataaatttgtacactatggagatagtttgacttcaggatattccaaagtcgattatcttaaattgtgattctaattttccatattttgggagagtttataaagggatatggtaactaagttgaagtttagcatagtttttatcctcagactaagggaaagtttgagagaattatcaagacatgctgtgaggatgtatgataaacttgaagggtcatgaaacagagtctcacttgggttgagattttatacagtaacaattgacaggttattagtttgcaccatatgaaatattgtacatgaaaagagctaagtcacccatccataaggatgaagtggctgaaagaagatatcttggaccgaaatagtctgaaattccagtacagctatagaagaattagagctcgtgtgctcatttacaagatagacataaaagcaatactgatctgaagcgtaaaatgtagagtctcggttagagaatttgtttttctccgaggtttacctttgtgagggatttggagatttgataggcagatgaaaagttggggaacaaggagattccgttagtttaagtcctgtggtgaaacatcaagatagaggaagtgacatgggagtttagagttgcagatgcagaatagtattttggtgtgctcaagtaaattttgaggacaaaattttcataggagagaatagttgtaatatctcaaaaattaattataattaattaaaacatattttataatatatgaagtaatatagatattaggagaataaattgagtaagattataatcttactaggtgaatatgagaaaatgagcttaatttatgaaatgagaaaattaggcgcaatttattaattacaaagattttattgagttgtgtgggtaaaatacatgttaattgtgaaataaaatatattcaagtccgacaacagtggaaactcgattggttggccacaaaatttcacgacaatattagaatgtgtgattgtattgggaagtgtgagttagtgtagagttattgggatattttagttatgactattttacccctagtcctggaattacttagaattttagtaagggtattttagttttctttttttcttttcttttttttttcctatctaagcttatcttacgatgtttttgccacttagtgaattttaatggataaaggattttatgttgaagcttttagaaaattgaagaaaatgtaagataaacatcacttaaacctatctccccctctttcccttgttcgacctagaagaaaccagagaagattcaaggatttcatcaattttttattcaatccttgtcaaataatcaaccttaggagtagttcaaggttggggtaagttcctttgatccctttccttgtttttctaagcttaaagttaggttatatggagaaatatggtgattttgggtttgagagttttggtttggtttagaagttatttttgttgattgtttagcctagaactaaggtttaattgagtctgttttgtggttatgcatgttggaagcttcaagcttgagcttcaatggtttgtgtatattgttgtgttttgagttggtggataggtttattttgggtatataatctgttttagaagtattgatatggtttggatcaaggtcaggcaacatttagtttgaaaactcaaagttttgcctactaatgcgaaccagtggaccatttgggaaccagataactgagacctgtaaaattggtgagccggttggggccatttttgggtatcttcatttttgtgtttttatttagtgtatttctacgctctttatcaatagagaaacttccgtgtttgtcattaagtgctagaatggattaaaatgagctgtaaacttgtttaccgtggttatgacatagcgggcccatattgtcaagcgttttccactcaagttgaccgacatgcttgaattttaacttgaggtaagaaaagtacaattgtaccacatatcatgtcaatatatgattcaattattaccgtctataagaaagagttattattttattggttgtctcaggcaacagtacaagaaagagttattactctaatttgaagttgttgttaatttttttacttatcggttgcctcattagacaacaataatgacattgattgtctaatcaggaatggtatcgaaaagattgtctcattagacaacgataaataatggttaatttattaagttacgacattggtttattggaaatggcattagagtcataatttcacaattttggagattttatcaaactctagacgtattatttaagttatatatgcattatgtaatttttatgatttttgctcggcgacaacgaaatatgcgatggatagccatttgagtcacttgggtaagtcgagaacctttttcttagaaggatacatatttatgacaaatagaaaatcgggtttgagcggggttatggcttttgaccattttacccctaggctttatttagtaaaagtaaaaaaggcattttggtaatttggcattgagtgataggtggttagttagttgtgtgacacctagctactattttattcagcctagattaactattttcttgaggattaattaattaggaaggaaaaacaagaaatagacaaacaccactcttattcttcttctctttctcgaaactaagaaggacctaaggagttgttgctgaagttttgcatatttagcaaggtttcaactgaaattctttagctcaatcaaaggtaaccctagagctttaatctttgtgtagtttaaagctttaatcttgacttggttatgcaattttgtgatatagtggttgtttaggttaggttcttactctaggacgtttccagaggttattttaagtttgaattaactatttgttgttggttttgctactttatttgtggaatgggcaagtttgagcttgtgagctcatacttggctcattaatggtagaattagattcatgggttgtatgatgtttttacctattggaatatattgtttgaggttatcacaggttttctggaaagtttggagaagtttgggcacgttttgatcatgaatcagattgttttactggtgcaaaccggttaaccggtagtgtaaaaccagttaaccaattttgtgacaggtttcccgaataagccgtttcggcaattcgcgttatttcctaagttttggttgtttaatttcttgatgtttagggtattgttatagtagtgaccaatagcaaacccttagtgggagtttgggtttcccggattagggttttgacatgtcatttacccgtatacgtgaatgtgactagggcatccatc

SEQ ID NO: 299087 - DNA, 1729 bp, Cannabis indica
ttctcttgcttgtttggtaaaataagtagctccatccttattatatcagctggaagttcatgatcacaatacaaatggaggttgagacgaatattttagaatgtgacaaaaaattcatacatatatatatttaatataatatacactgtatagtacagtacacagacagaaaaagaagaagccaaaacggtcatattaattggccggaagagaagaagacatgtatatattagaaaaggagaaataaatgcactatgtatatttctatgcatgcttgtttctaactatgtcctgtaagtaagtcgataattttagtttcattttttatttcttacataaaattatgaattttaaagctagaaaaggagactagtacaccaaactaagtgataatattaagtttcaaatgttgagatttctggccggccggcctatattgttaacagctcatcagctctacataaactgatttctgaaactaattaattaaatatggtttcaaaatgttccccaataataaaatagaaaacaaaagactcagttaaacttggatcttaaaagaaaaactctttagagaaaatgactagttaaacaaaaatcaaatcgaaagaaaataaaaataaaaacctagccaaacaagtgagagtatgtattttaattatataaagagtacaccctagctagttagaaaagtatatcattaattagtaaataaattaattgtttcacagtagaataattccccttagaaccacctctttcctcaaccatatcaagatgatcatcatcgatctatatgtataggtataatcaaattaagcattaccccattttaatatatatatatatttatatgaatgtgtattctagggtttcttacaaagagtatgcttgttgttgtgcatccaaaccttgagaacatggcgactcacaccagtgtctaacgaaaactgctccaccgcagactcatcgtgcttctgaatcctccacccaattctctccgacaactcaagcatcttctctttctgcacagcagtgaacttggtccgatacctcttcttcctcttcgacttcgacccacttccccctccgcctccagtactactgctcggaatgaagcatcttcaccctcgtctcggctctgaccaccaccgccgccgcctgaggtgactcccggaagggccagaggccgtggctgaggagtattcaagttgttgaggtacccagatgggtgtggataagatcgatagtaagttagggaacgaggagaactggtggtggccatggtagagttggtaattattaatgctttggtgatgatctgatacagtagtagaaggagtttctttgcggtgaaagttacggtggcagttgcaggcagcacacttgagtgcgtcaagtgtgccttcctcccctgttctgttagaatttgaggataagatgaatgaggttccatcccaaaaccaattggcaatgggaggagtagtccatttctcttatatattctattatctttccacacactagcaatatggtactctctaacatcccctgccgctatgaactcacagcaaccgtcaacaacgtggcggccgaagccggccgcatgattcttttggcactctctatacctgatgaccgcagcgccgccgtgttagacttttatttgggcttacattaaattttattggttttattaaaacttgggttgattggatagttctttgct

SEQ ID NO: 299088 - DNA, 6085 bp, Cannabis indica
tcttttttgttttgttttagatctaagctcttctttctattattgttttggtttgtgttgttttggcatgatttattctgtttgttccaatttttgatatttcaaagtttatatcattctattagcctaattatcatttgctcagactttttgggaaatgatttcctattttagcttatcaatgaatgtttgtattgtgtttggtatctcaattaaaaaattatcaatttttttttttatcgaaaaagaaactttaatcttaccctaaaataaatttaataaagtaaaacttctataatgacaattcgattcctaaagtaaagttttattttttgaaaatagacaaagatcacctcctaaaataaatttaataaagtaaaacttttatattacccttatcatcctagtctagagatcaactttgataattactaaattttctttccaaatattatgtgaagttaagaacatgtaacaatagtactttgaattgttttccgaataaaggaagagatttcatagtacttccaaaattgaaagcagatcaaattttgatatataaaagcactgggatatgaattgcaaacccaatatgcaggacaagagaagcaagatactcagatcaaaattttctatttgaataatgaaaattgtcaatagacaatgcagatgaaaagagaaaaactaaacctgcttactttttcttttgcttttacgagactttttcttaaaaggagaggtactcaacctgtgcttgagaggaagtaacaaagcttgacgccgcatctttcttttcgctttcaattcccctgcattagatgaaattaaataatctcagacagaaaattacataattttgggtgaatgtataaaacttgttcttccagaggcaatacaagtaacaaactgaataacaattcataaagaaggtatacctggcggagatttaacaatggaaagatgactgcattctgcctcaatttgatcctccattgtttcatctaatggttcacaatttgcaactggtttattatcctctacaaatggaacaaacccaggttcatcggattgttcctcttcgtgtaaagccgaattattcgagggcaaacattcttcttgatttaacaagtcctcattcatcagatcatctattgcctctgatgatgtatcacaaactataagattctgttcttcattaacagcaggaagatctgtatctttggaaagagtcaaagtctcttccttatagtcaacacgaaaagcggaatctaaaacatcagatttgtttattacatactcatttggtgaatcacaagtttgtgcccgaatcaaatcactatctacagcgggctgacttggattagttgcttctaccttcatggctgttgtcaattctccaatgtctatagaatctggcaaactgtctgtatcagtagagcataaaacttgagaattttgatttccaaaggattgttgcttaaatcgggcttcataaaatgaagttgcacttggtttaggaagatcaagcctgttgtgctgttttaagtctccatatgttgaatctagtactggagttgcttcagcaacaaaagcaacatttttgctattatcatgtgattgtgaatctccagatatcaaatccttaacttgaaatccatgtgaaggtaaacttccaataatggaactgaaatcaatggcttttgaatttttggatacatcatgggaagcagcaaaagacttttcaagatcctccaactgcaaatccccatcaccactagagatgggatcccatttaaacaagtcactagaccagggtttatcagattcaatttgttctcctgatgatatcacttcaaccttgatggcatctttatgaaattgtttttttctcaaagctttcgttataagagccctgcaagacagtttaagtataaagatccaaggtcataaaacatagtgtcaacatatatgagaagcctttgcaagttatcatacctacaatttttggaaacagctgccttagcttgttcaagagagagcccaagcagaaatgacaaattcgcaacatcatatggccctcttagttcaaaaacagaagaggcagcactagagataattaaattcttccctcgagtccaatctacaagtaactgaaagttgagcagcataaaacatagacaatcagtaaatataggcatagctgacttcaacctaaaatgaatatacgattatgagtaggccctgtttgagagagcttcaacatttgtaggagtagcaatgatattgacattcaagaacatggtgaataatccctaagccaccacaggatgtggatctattaagcaaatagctgaaccacaaataatgcaagccaacagctatagcaatcctattgtcatcaggataacaaaccttcctattcatcactaaatttgtaaacaagtgcacaactttagcaaaaaagacatatcaagttctgacactgtaaagcctttagtgtcctaataatatgaaatttcaatcacataatggtgcaaactgaaatttcatgaatcccacaaaataataatatgaaactaaaacacatatcaacataccttatcaaaaactagcaaaaaatgattttaaacaaactgttgctcaagctcatggccaagtctttacatgataaaattcggggaaaaaatataattcaaactgagattatccaatttcaacattcttataaactatttttaattacactattattttcaaataacttccttaaacctcaccttagcacttgttatcatttgcctcctcgcttgaatatcagtaatgaggtttgaataggtaatttcgaaaaacacaccacgctgcatcagaaggagaagaaaaaaacaagcatgtcatacatataattatgtcacataattttttttttcaacttttctaaaggcgaataagacctttatagcagctttaaccatgggcaacttcaaacggaagggcagcttttctgagaagtcgatcgcaataatatctacctgcgagaagtacccacaaatgaagttattcattttccgagaaaacaaacacacctcataattaaaatgcaaatagcaaccaaagagataggaaaatcacaaaacctccaatctttcgcaggcctgatcgaagatggtctgattcaagggcctaacagagaccaaatcgtaagtcttcaaaataggatttccagaattgagagcctgagcttgagagggactatcagcattgacagtaaggcgcgtgtactgtcgaaaaggcgaggcttttggtacaccaaggaggccacggtggaaatagacagaggaggcgagagagggggagagcttgaggagagaagagagagtaagaaggggaatggagcaacgatcacgttctgacatcacacccttgatggtacggttgtaagcaactccggagtaaccgagctccatggccatagtagctagcttgatccgagtagccttatcagacggcaaggcctccaaatatggtatattgagatcaaagaaacccattcctactccctgcagaatgagggtttaaggcttcaattcagggttttagtctttgctaaacaaccataaacttttttttatcagtagcttagaagtgaaattttgaaaaaataacattgttacacgaaaggtggaggagttatcatccaagaaaactcatcatgatcattagtcatatactcacaatgaaaacacagatagcacaaaccaaattaaagtcaaacatagcaggaaattgtgcaaacccaaagatagttaagaacatggagacagtacaaaactctaaaaacataacagtgcaaaaatgttatgtgagaattgtgcctatgaacataaaatcactcaaaactaaccaaaacaacataaaacattgtattttaggctctataaagataaaaatatatctatacatatgtctacattaaaaattaattaataaataaataaagggaaaaacaaagaagaaaaacacaacaaaattccaatgagtcatttttacaaacacatggtatgcatcaaaaaataaggtgttcatattttcagtctatgatgaaatcccaaatttaatatgcattaccaaatatgaaaatactaaaggaaaaaaaaactctggattgaagaatgtgcaagggaacaaatctccagttcaaagaagttttgtacaaagcaaaaaagaatacaaaaaacaaaaatggaaaaaatgaaatagaagttggagagttacgcgtttgaagaagttagaaggcgaaggtgagggtggcggaagagagtgagcggcggaggtccgacggtagcgggagatgtgggttgttttgttccctccttcctctcttctccaactccactcttaaaaaattacatttttacttcttttttccttttaaacaattgtaaacttaaatattttttctcgcgaactttgatatgtaacaaatcatactctctgaatttgttttgccgttagaaattttcttaaactatagagattgttaaatttaaggacttttatctaatttcattcaattttactattccattgattgtttatatactaaattatgctctccaaactttatatctaccaaatcatgtcccatccatattagtaatttttttaagacaaagtccttgaatctaacaatctcaataattcagtggaatagggacataatttgatacaactaatatccatttgcaactaatagggtacctgccgggagtaagataacaatatcccaagtttttttttcaagggctttcttcacaatggttggaagaatacatgccatgagaacttttagtttttgaatgctatatttggctatggtttgcatggggtattcatttgtgataggaggacaaaaggagtagatgatgaggaagaaagagatggatatgagatataagagtgaggggaaactatttgggaggaggaagactgggatacagtttcagattgacagagaaggaaaaaagagtttgacgatgatgaaggtgttgaagaggaattaggtggtgtttcaggtacaatgggaaatgacacaacaagtggtgtgttggattttgtgctttaaataaaactcatttcaatataatcaagtttaataattaataaaagataagaaatcattttatgttacatggttcacatgatttatttcataattatatacttaatgtacaaaattctattaagtccataacatatatatatttgttcatgattatagtattgtcagcacagtgaaatgtaatcatgattgtatgttcaaaagtttaattttcatgatttgtcagttcactggatttagactgatatgataatccgcgataatgtaatgcttacaccttgtataagtgttatgtcatttccaaggtattggtaaagtttaccaatatcagatgtatggagtatacattagattggaccgacattaattttgaataagatattataaacttaccattatatctttctaagtcaatatcactggttgatcttagatttatggatcttaatcctgatatggttaggttcaacttagttgtattacttgtgttcttcaagttttttgtggatgctaaccaatagttttggcaaatatttacattttgagaacgtggtagttcaattgaatggaaacgctaaacatagatatggaatctatagcttctataagtatttagaagtgaaacggtgattttctttgagcttggctttatagagataaatgattgaggtctcatttcagtaattatattagtttgctgaaatatcatttataggtagctaagtattgttagtataaaatacattttaaagggtagaacgctaaatttgtccctattcaatgtagatcatctatagatgatctttgactattaggattgtaacaatagataatcataacgtaattatatattggtacatataaagcgttatatataattgagagtgctattcaattccgaatctatatgcaaggaggaatcaataagttaggaaatttactttgtaaattctatatctacttatt

SEQ ID NO: 299089 - DNA, 6355 bp, Cannabis indica
aggtttgatctcagagtgttatttgtgttctttaagttgttagtcaaagcctaccatttggttcgggtcacacgtacagcttgggacatgatagtacaattgagtaggagcgctaatcatatatatggaatctatagcttctatctggtcatagaaatgaaatgatgatttccttcgaccttgacttaatagagataaatggaagagctcttatttcagtgattatattagtttactaaaatatggatgctaagtgttttaaggataaaatatattgaggggtaaaacggtaaatttgtccctacttgatgtaaatcatctatagagaatctttgattattgggattagaacgatggttaaattttcatctatagatgatctttgattataagaaatatgcattaaaaaatggtaaggatatttcatttaagaggaatgactcacataggctaagggcaaagtgccaaggtgttggttgtccttggatgtgttttgcatctaagattggtgatactccaacttttgtcatcaaatcatacaaagacattcacaagtgttctagaaaaaatacgaataaatttgtaacttctaaatagttgaggaagaagtacttgaatgagttcaagatgaatgacaaatggggtattgctgctttcatgaggaaagttagtaacgatcatgtgatagacataacaagggataaggcatatagaggtcgactacttgcaaccaagaaaattgagggaagttatgaggaacaatatgttgcactatgggattatgccaacgagattaagaccaccaatagagattcaactatggagttcttcacaaaatatgacgagaatgaacaaccacatttcaagaggatgtagatatgctatttagggcttcaagatggattcaatgaaggttgtagaccattaattggtttagatggttgtcacatcaaaaggatacatcctggtcagctactaactacagtaggaattgacacaaacaacaaaaagtttcctgttgcaatcgttgttattaaaattgagaataaatactcatggagttggtttctcaatcttttgagggtggatgtaaaaattgaaaactcaaacctctggagctttatcttaagaaggtatagaacaagctctaaaaggtatgtgggaagaaggtataccaaaggcagagcataggcattgtgctaagcatttagagaaaaaattcttaaagtatacaaggataaagttttgaaggatttattgtggaaggctacaagagaaccaattgtgagatgatttgaagctgcaatgaaggagatcaaagtgttgaatgaaggggcttttaattggttaatggctattggtccccatcactgggctagattacattttacgactactccaaaatgtgatatatagacgaatgatatgtgtgagggttttaacggaacaaggacaatattggatgctagagatagacaaatattgtcgatgttagagcagattagggtatattttatgcaacgattgaccaaaaatagataatctgttgtaatgtggcagtccaatattaggccaaaaatataaaaaatccttaagaagaataaggtggaagctggctcacatttgccactcaaatcaagggactttgagtatcaaatcataactaggtatgggggattgttctctgtggatttaaaaaattaaatttgcaagagtaggagatgggaactaactcgaatcccttgtactcatattgtggctacaatttcgcataagagattaagagagatgatccagagttgtatgtaattaaatggtatagaaagaaatactatctgaaagcctactctaatcaaatttttccaataaggaatcaagaagaatggcctaggactggtaaggtgccaatgatcaatccattaagcaagacaaacctggacgacctcaaaaaaagcaggagagttgaacttgatgaagttgttggacctacatcaaagaaactaagaaggagatacataaaaattagatgttctaactgtggtacaaataccaaaaatgcaataagtatttgtgttgcttatcatcatgatcattagtttagttttgatgagtaaatctctgatctttcaatatttcttttagacaactaagaccacgcacgattctggaacttatgctagaaatagcaagccaaaaggtattgcttaagttagttcctcaacatgccaaactaatttataaggaacaaatgccctcattgaggtaactctatttaatacttgtgaattttttatgattttttttactatgtgtattgatagtatttagtgctaaattttatgcagaaaatgatatcaataaacatcaacacaatgcaagacatgttgagaaacaataatgaggttgcctcaaaaaaacacaaagcagtagggttaaacttgaaggactttttgttggctggaatgtttatcttctgatgattggagatgtttactgcagacctaaaatgtattttattttaattttggatgactttatggttgtgtaactactgaaatggtgctttttttatgattttaagtagtgattaggttactgatatggtgctctttttgaggcttcattcaataccatattttcatgactttgtactgttatttaggtggctggaatacttttgttgaagcttttttggggcttgaatgccatgttttatattaggtgaactcatgttgttattaatggttgttgaataaggttatggaacactttcattaatgaaaaatttgaatgttaaattagccttggagactattgaatgttgttattacaggttgttgagttttaatttaacttatatttatattcagtggacataaaaaatgatacaccaattaaattatccatgtgatacaaaatttgattaagtatgttcacaagtcacaactgattcaaaaattcattgccattgacacttgtatagttcattcacttaaaatgttgatataacacactacctcctatcactacaaaataaatgggattgcagccattttgcctattggaaaaacatcatgagcttggttttgatttggaaacttatagatcagatcagctcttgcaaagggtggtgagctttgtgttgaaacttcatatggtaattaattatatatatacatatagatagaaagatatataattgtccaatgatatgaaaatatttttttgtgaacattttaataggggattttttggagaccaaagttcaactctttgtctcaatttttataagtagtactaagctcactgtgttgaaaaagaagaaagtatgccatgtttatttaatctattaattcttgatttacatgctgaactatacaaggattcaaatgatgaagctacaaatgagacactctgaactataaaaatgatttatgaattgaatgaaaattgtagtgtacagataagaaagaaccaactatatataattatatatagttaaacagaagaggaaatacaagaatacgcctaacttaaaactatctaaccaagcatgttaatgacttggtcaacaaataaagaaaaaaaaataacaataaaaaacatttataaggaaacttatgtatactaatagttacacttagaaacaatgtataaaaattgacatgagtggaccaaaatttgaattattattatgagtacatgaaaagaaaactacaacaaaatatttgaagcatgagagagagagagagagagagttaattgctttcatggttagaactacaaacaccaatcaaagcttgtatatcattgaagatgatggtcactggtctgtcaaaacatagattttgaccgaaacttgaagatcacaatccactttgaagtgagcatggaagaacctctgttcctgtaatatggttacttgtctaaactcagcttagataaacaaaagttgctagtattagaaggagaatatgagattttgccttgccaagaaaaataaatcctaattgttgcagaatgaggaaaacaaagataaagaaaaacacataaacgaagatgaagaagaaagagtaatttgcggtataaatacctaagtttaacctctgcttgcaaataagtacttaaatttaatttttgacagtaataatattaatacttaaagaatatttctggaacttcagtaggtacttgcctgttagttgccaagttaatatctacgtgtcattttcttattggtatatttaaataaaaataaaaatttaatgatttggaccaatcaggactgtcctatggctattgacttgacatttaacagtcaggtgcgtacagaagttataaaattataacttaggtattattactttcaaaaattaaacttaggtagttatctacaaccgagagttaaatttaggtatttacgccgcaaattactcaagaaactgcacctattatctctcaccttttcttcgcatatgacagtcttctttttagtattgcttctccttttatggcttccgtcatcaaagactttcttaacgactatagcctgacatctggacaataagtcaattatgttaaatcctccctttacttctctcctaacatggatgagtatactaaacgatccatcaccaacattcttaatgttcctattcgcgaagatatcgagaagtaccttggtctccctcaatcttttggcgctccaagaaagaagctttcaatcacctttatgaccgggtctgggctcatttaaacaaatggaactctactttcttctcaaaaggtgggaaagagatcttgctgaaatctgtagttcaggctatttcgtcctatgccatggcttgtttcaaacttccttttagcttccatactaaactataatctctcatagctaacttttggtggggtggcattactcaaaccaggaaagctcattgggtggcttgcgaactctttatcgctccaaatttaacggtggccttggctttcggtctataaaagccttaaaccaagctatgctggccaagcaggcttggcacctcatccaatctccccagtctttggtggcctctttgcttaatgctcgttatttcccccattctacattccttactgttcacaagggtcgatgacccttgctggtatggactggtatctcttggggtaaggaacttctcttgtcagggcttaagaagaaagttggtaacgatgcaaatatctcaatttatgattatacctgggttctggggtatggtaagcttgcctatctcaacgttccttcaaatcgagccaatattgtatccactttaatcactgccagtgacacctgggatgttacccaacttcacaaccttttccccaatgacatttgccatgccattctttccatccccctccccaacacgcacacaccagattcagtctactggccctttacgcctcatggcaattacacaatcaactcaagttatcaccatgctcatacccttgatatccaacaagaacattccccctcagactcgtttaatcaaaaaaattggtgaaaatatttttggttcttacctatcccctccaagaccaaatattttgttgggacattttataacgatgcacttcccactggctctaagctttaatagcaacgaatcatccataatctagtctgccaccactgccagtgcgctgaggagaccctggcacatgctctttttcgattgtttaactgtctagaagatatggaaactagcccccttctatgaatatactacttaatataaatactatctattgtttttatattacatcttatttctaacattttctctactagagatttttagtatttttctttatttgttatggaaattgtggcactacaagaatgaacaattataccaacaaaaagtttccaatccacaaatggttcttcactagacaacgaatcacatacaacaataccagtttcataccaggcccccgcatcttcactggcaaatctggctagtctttctcacccgcaatgggatccgccactaactggtcatttgaaattaaatactgatgcagctcaggatatcaaaacttgcaaaacgagactcgactttatagtcagagactgtaacaatgttattcttattgctgcgtcctttccttgaattggggtcttttctcctcttttgatggaagctctctctctccaatagtctcttaaatggtgtcttgagaattctcttagaattgattacattgaatctagggcattttacataaatgtatactttttcttaaataattacaaaaaatgtgcaaaaaaacacaattttaaaaatgtacacatttgaaaacatattta

SEQ ID NO: 299090 - DNA, 2437 bp, Cannabis indica
atttttgaattaacttaagaacgtatttaaatcatcaaactttcttaaacactaatatattgcattcggtattctacttttaattgacaacattataaactataatatttagatacacataataataatctcaccttataactaacaattattttttctttaatttttaattgtatcactttcaactaacataagaaaaaactagcataaaatttagtatacgtgccttgcacgtagtcttttgctagtatatatatatatatagattatagtaaagttaaattattttttttttaaaaaataataatatcatattttatagttttttgtatgtaagaatcttttaaatttaaaaatataatttaaaatttgaatagcaaaaaattaaaataatttaaaatattttatcgtgataggaaaaatgtagaaatatatgttatatgcaagactaaaatttttaatcgcctataaaaaataataatgtaatgctaattttaggacaaattaaagaggatgaaataattatttatatatagcctataatatgtggaattttttctttaagaagtacttgagtaaaattattaaaattttaaaaaataaataaaaaatataattaaaaaaataacatgtagtaaagctttcttaaaaatataccacctcacatgcatttgtgttttttctttatattatattaagaattaatagtaataataaaacttgataaaatggaatcatgcattatagatgattatacatgtaatctctctatacctataaaataaatttatatatatatatattaatagtagcaatattactagaataatataataattaattaattaatatccatccaagttacaagaagaagatattattgatgatcttgatgaggccgcggctacttcaaaagtgttagatgtagaagaagaagaagaagaagccgaggaagaggagaccgcggtggcagaagaggcggattgtttgccggtgagttgctgaacaaggcccatgaactcctccggacggacatgaattatctttggtgagttgagatacaccaccacgggtggcggcggccttggagcacgtgacctcttcgtcgagttctcgtttattattgtcaacctcgaaggtctagggccattcatcatcttctatatacgtactaatttatgattaataacctaattaatctgtaatctaattatggtattaattatgttatgttggaggagagacactacttgttatttataggattgaaagtaaagaagggtccatttattaatttggagtagttaggagtataataaattaatatattattattatgaatttgaaatggtctaacatggctaataaagaattagtaatatttgatggttatatacacttgtattattatcaccgtgccggcagtccatatatagaaactttataattattggattttttacatatattaaactatttgaaaaaaaatcaattaagtattcgaaaaaaacaaagaagaaaaagtacgtactatcgagcaaaatagtagccaagtcaaaagtcaaagtcatgcatggcaataaattttctcaacgtcttcatcagaataacttgtcaactcatcaacactacaaaacatctgagtttggtctttagcttggaatatctatatcttggattatttcagaaatactaaaaaaataataaaaaatttgatgctattatataattttgaatttcttttttgtatttttacggactttttattttgttaaagaccgttgtttacactttgcggaaatataatataatgttacgacaatatgaaaataaatttgaaacaatataaaactgccaaaatgtaaattaaaaaaagttcatatatgaaaatgtaaaaaaattctattttttagtatcggagagaaagggaaaaggtaagactaagttaaaaaattaattaataactaattaagttaatatgtgatgaatgatgatgatgataaagtcatcattgtatatatgtgtatatatgttgactgtgtttaattagttgataataattgtttgacttggccaggaacactttaggttttgaattatatcttaaccgtaattaacggctaatggacacttacggaagaacatatatataataagtgaagtgactatatctttacacataaaaagtggttatttaacaaattttattggtttaacagaatatactttaaaaataaaaaaaaaatattctgttaactttaacggagaagatcgcctcctttgattaatgccattcaaaccaaaatacattttgtgattcttctttcttctttaacaaaaccatattgcgattctttacgggacttaactatctccatttagtctttctctcaatagtcaggtcctatctccaattccattacatttcctctttctc

SEQ ID NO: 299091 - DNA, 1808 bp, Cannabis indica
aattacaatataatacaatacaatacaatacgacctaatacggcgttccaaacgagccctaattcagttatcttgtggaggttaaaattgatccgatctacgaaaatatatgctgaaaaccccctcaatttagtccagtatctagattttcctgaactttagttatttatttaattttatttagtgttgttatgccgaccattgagttgaatgaatctagaacagcatgttatataaaacacacgtggtaagagaactaatttgatactcatctttgagttgactcatttagttgctctcattagcaaataattaagtaagacataaaataatatatatgtactcttctatgcaatcccataaaacatggtggactcatcagtttacataaagtatgctggaggcaccttttgaaaaatattttatcttatctaacaagggtgaaagaaaagaaagcataaactgacggaagtttaatggtgctaactcttagtttggctctaggtgtgcatctgtggtcattattctcatttttttaagtctatgctttttgtcaattatctaaaacagctagtggaacacgcaaaaatatttgaatagtcagtgcttttgacaatgttctatattagtatttaacgaattgatgttggcttagctgctttttccttctccttaagaatagtttaattgtgtttgattgttacaggcagcaaaggagtttgaatctgagcttaagggacccgaagtgacagaagaagcccctgtggacaaacctacggcagtgattgaagaagagaagcaagataccaaggtccccagctcaaaagagactgtatgagattctattgtattagttttatttattatgatacttgctgtaacacttttttaccattacctgaatcaattttttaggcagtttaataatatggtcaatatttctcaatatggtaagtttgtttgatctctatttacacttcccaagatggtacctccgacaaaatatcatggaattactatattgcttttcaactattcaccatgaaaccgcgtcaagtataatgcatatacgtatgtgtgtatacatatatacataccaaagatattgattataaaattgagcacaaacataaaggcagccacctttatgtattggaaaccaactagacgagcttagtcagctgacctgggcttttggggcatcatctaaatttcacttgctcttcctactcatatgttatcagcgtatgcgaggatttctttttctttttgctatggtttgttctcttgtgcttctttcatttttttttattggtgtgttttgtagtttcattagtgtgccgaagttttcaataattaatattaaattaaatcaaggatattcaggtaaaacataatacacccaataattgagtaacaagtattcttaattacaaggaccacatatatggggataatatatagtctattctttattttagaaaggctgttagacttcaccccttctaaacaattataaatcattgcgtggaatatttctttcttttgagggtgtatagttatagccaccaaaaccccttttctctgtactccttttcctctctgagtcacaatttttaattttcaaaagtgatgactatatacaatattatataggtaaaaatgtcaatttaggccaaattttattcccaaatcattagtgtattaatattgttagattaggtcaatttttcatcacccaaagttatttcgcccattttttaactctctccctccattctcgctcgctctcttcaagagaaccgaac

SEQ ID NO: 299092 - DNA, 2071 bp, Cannabis indica
gattagcctttcctttcttgattgatgtgatcctttataatggagtcgtcacttgtacccttgattatcgtgtaattactaaaagatgagtttatgacgtttgacacatcctcttatgggtgttcctagacgtttcctcaatgctccattaaatgtgagctgacagttcatctccagttccacaaatccagaggagttcatatgcccttcacttcctggagaggaagtcgggctgtcttatgccaaaaaaatctctcctaagtacatcagtgtaacatctgtttctttcacattatatcaccccaccagaatctagaacagagctgatgaatttctttaatgaaactagtaggcagcttaaacaagttcatagagtaagtaataattagattggatggcatatttaataagcacctctttcccaacaatagagaaagactgagatttccaactaaacaacttattccaaacatgttctttgagagattgaaaaagacctttcttactctgcccatcataacaaggtaaaccaaggaacttctcatggaaaacaaccatagcaacatcaaggatagcagccatgtcagcaacatcactagaagaaattcgagagctaaagcacatggcagacttagtaaaattcacaagttgactaggagccttaccataccaatccgaaaattgtttaaaactgtgacaaacaaacactgatgctttgaaaaagaaaaggctttcatcagcaaaaaggagatgggagatctggggaccagtacactcacaagcaagacctgagagtaagccattcacacaataacgttgtacaagagcaaacaaaccctcagcaccaattagaaatagaaaaggtgacaaaagatcaccttgtcaaagttccttgctaggaataatattacccaatatttcaccattcagatttaaaacatagtcattcgaaaagatacatgcatgctagaactaaactgatccatttctcatgaaagcctagttttttcataaggctacataagaaacaccattcaacacgatcataggtttcacacatgtcaagattgagggcaaaagcacaagttttacttttaacacactgtttcagatggttaacacactcaaagccaatcatggatttatctgtaataagacgtctagagaggaaagcactctgctcatcagaaatcacagaacccaaaatcttaagtaaccgattagtcataaattttgcaataatattgtaaaacacattacacaaactaataggatgaaaatctaaatcatgtttagggtcatcaattttcggaataagagtgataagagtagaattgatacttttaataagcccagcctcattcaaaaaacggagacaaatagagctaacttcaggaccaacattattccaatacttctgatagaaacctgagacataccatccttaccacttaccaggacttttagaaggactcatttggaaaagagctttcctcacatcatcactagtatagggtctactaagttgatcattcatatgagaattgacctggggcaatagcattaagaatagaatccatatcagcacaagcaagagaaccaaaataaaaatagactagaaatagtcttgaaagacacccacaagattatcttgcctgaacacttcaatatcattcttatcaaaaatagagccaataaagtttcttttttttttcttcgagcaatgagcaatggcattcttatgaaaataagcaatgttggagtgtccaatatttttcttctttgtaatgaagtacatcttattccttttgaagagacacataatatctttcaaattagcagctgaaaaaaaaagcatccaaactttttaattattttcactttttcttaatactagtaagttacacgtgctaccgcacgtgtgtgtttagtatataaattatatattatattaattaaatttactctttaatatttactgattttatgagaataatttttcacaaaatttaaaaacttaattaattaagttaatatttttttttttgaaaatataatgtatatgtattta

SEQ ID NO: 299093 - DNA, 2998 bp, Cannabis indica
taaataaataatataaaaaatatttatgagaaaaaaaaaatcaaaatttaaaatatgaaaaattaaacaaaattagaccataaataaatttaataaagcttctaataacaaatagtatcagaaaagacacagatggtattaatcgcgagacgtggcattgggacccacactacgagacgtgtcatgttaaatcacttccaaataactattaatcgcgagaattacgaaggtttggtcacctctaggaggagtccacatggatggtagatgattttgtcttttcctcttcgcgagtaaactcgactcgaagaagagacgaagggatagacagagtatagcatactgtttgaggttaagtcattgtatatgcagttaatgcggcatgaggaaaaacatcctacaaattatcctgaaaagacatgctcagggtttaaatccataatttcccaattttataatgtctcatacatcaatagatggatacataatgaagcaaaagacaagtatagtctcactaaacacctataatatgtctaaacaaatcataaaaaataggcaatcatgtcctatgatcaaatttagaaaattgtgcaaagcatgactcatacaaacacgacaataatgaccttttaccataattatgagtctataaatactctgatgatgtatagaagaatagactcttaggaattctctgtaaagaaatacattaataacagtgactcatggattaaggctcattaatcaccaaccatgtaaaaaagttctcttctttaacttctattaattactacaaacaactctaattagtatttgtcaaaaatctcgatcaacatcttagtgctttcattgagaactgtaggaagcttaccaaaagaggaaatcataaaaagcctcatggcataatggtgctatatataaggaacacacttcacatccacaacagcctaagacacaaaaggtctagaagaagaagaggcagattttcttatggatgctgaaggaaaaggagacaccaacgatcctgagtatacaaaataagaggagtttgaagcatatgatgaagacaattacacggaactggtggcattgagcccaaaatttgttgaccaagaggcggagtttgtggaaaaaaagagcaaaacaaaagaatgcaggaaatattgatcattatgaaaaaggcaatggaaaatgcaggcattcatgtaaacacaactgcagtcctaaatttgtaagagaagacgggggaaggaccttctcaggctgcaagaggccaaaagcagaaggataagaagcctagtcccatcaggtaccctcttggaagacctccccaaaacgggaaccctacggtcattcctgaaaagaaaaaaatatcatgggatccataaaaagtttgttctgatctcccaaaaaggaaaggtctgccaaagggtagatttcccaagggaaaactggcccccaataccacaaagattggaaaagtgtctgtgcaccaagaacaaagggaaaaaaaaggggtctgctaggaaaggccccctgatcaacttacaaaaaaagtgcaatgataggcaaagagacctcaaggtacatcttgatcagaaaaaaaattcacttcagcctccgagagtatcctaaatgaagggactttggccgaacttgttatcctccataaggacatagcaagggtgtcccgaagacaaaagggagatgacttggagtcaaattgtgaagatggggagccttgtgccagaaatatactcgaggctaaactctcaaaaaatttcaaaatgcccggaatgactttgtatacgggtgacacgaatccaagtgatcacatgtctagaatgaacaaggttatggcagttatgagggttaacaatgatgccaaatgtttatttctcactgatattgggaggatctgtagaagaatgtaaaaagctagaacctagattcgtgaattacgggaataagttgtagactaatttcagaagacagtttgttgcagccaaaaagataaatcttgaagtcagtgccctgactaacattaacaactacctttggaaacctagaagaactttattaagagattcaaggaggaggcttccaagataaagaaagttgatgatggacagctacaagctggtatctgtaccagaactcccttcgggaatgaactacaataataaggtgcgtctagccttcaagattttcagaaagaagctcagaaatatgtcaatttggaagaggctcaaataacgggttttggatggtattaccctattagaggcctaggtatgatttcgaagtgccattccctggaatcacacttcttgccactcctcaaacaaatgtaacacctagtgtgcaatttcaagaaacacccgaatatttacaaaatccagctacggccccagcccaatctgactacactgactacagaccgcaaggtagtggccccactcctggagctttcacgtggtatctcactcagtccacttcacttgcagtaagcatagttgtaaatccagaatccttctggagtaaaagatcatctaaaggaagcacccagagtgagaacaaaaagccaaagagaggatcctgatacaatccccagcatactcaatatactaatttggtggacacacaaaaacatgtgtatttagctacaagatagaatgttcactactggaggtcgccttttttattctaagacagttcatcgagagatcccaacaatagatgcgagtatcataatgatattggagatacaaccaatgaaagtaaaaatttaaaagacaagatggagagcttaatacgtctaggccacttgtatgagttccacaaatgagagaagggaaagccggagctcaagcaccacccagaggaacgatacaggctctagattcgtaggcccctttgggagcactcccacctaactgtaacgtccccgcttcaagcctccattgggcccttacacccacggaatgaatggctctta

SEQ ID NO: 299094 - DNA, 2529 bp, Cannabis indica
taaatatctccatgattatagcttaattaaaatccctatctttgtggaatcgattgtattcgattgagataatcatggaatttaatatttaactttttagaattcttctcctatatttttgagatattgtattatgtatctttcttataaatagtggaaccataacactattttgggatccttttttgacattctacagagcagttactttggaaaaattattgtaacctttcttgagattattaagaaactcaattggtcggacccttatgatttgaataactctctaagtaatgcaactaaaatgggagtatgttattatcaccatcaagggattgaacctctataactcttatgtgttcttattactttattattttattattatttgattcataatcacatcgctttaaagactgcatatcgttgactatatcgttgactaaaagcgaggtcaacattttggtgctttcattgagagcaaagagcaaaactttgctcttagcaatctacatctttaattgggttgacaatggttttgacaaggagatcctcatcaaccaagccacatgattcaatggcaacaaatcctaatgtccaagctcccactaacttcagggttgacaaccccaacgcatgactaccacctcgagggaatcctcccacaattcctgccaatgttaaccccagagctactaggattacaacacccatcactagcgtcacagacgatgtacaagaaattggaaccaccagtacccagtacactagagaaatggggtcgggtactggacaaccatctatgggagagcctcaagtagagcttggggatgatactgagctggaaaacctgaggggagccttaggacaagtgtagaatcacactaacaactccaccacaatcagaaagaaactcgagcaattataaaccatgcatttgaatagtagaggcaggaattccaagagtggatggatcagcaagctcagatcatgagggcccaacaagaggaaatcaattgttggtccagatagaataccgacctgatgattcaaccaatggattaagggcaattgattgataaccaactgcccaagcgagacaatgataagggaaaaggtccctatattccaagtgaacaatagtatgagccagaggaacgaccgaccaactacacccagtcacctcgatgagatgggccatctaactccagatctcaagatcaaccagtagaccacatggtggatgatcaagtgtgcctggtgattaccttgggaggaacaaccagttcaatttttatcctcagcctgaaggacaaagagacgatgtactgcatcgaccaattgtggggtctcgaggacatgtggcaatgtacaatcaagatggacgagtccaagtctatgggcaggctcagtataccagctagaaacctcatcaaggtcaaaaaaggtctcatagtggattgtcgtacaagagtaagaatgatgatggagttgatagtggacaacacaacaaccatcgtcgtgataatcattgtacccacgacaaaaatcaagaaaatcctctaaacaatgctaatcctcctaggtcagcccggtgtatgagccaacaaaacagaagagctctaggcgactctgtcttctaaaggatggggcccagtactgatcttcgagacgatttgaatcgtaaaagaggaaccaagatggacactttgtccctccgcctaataattagccaattaatgtggagaactatattccgcaaaacaaagataacttcgtaccttttaaagctccaagagggtagcaggtgacacaggccggttatcaggtaggtcaagtaaatccaggggtgcaagtccaattggttcaacttaagagcctcattcaaggcttgaccggcccaaaactcactgacttggagcttaatcagataggaggttcaacattctctactcagatcaattcctttgatctttcgaccaaattcaagatgcccacttggaagatgtacatagggaaagaggatctgttatctcatatcaagtatttcgagatacaaatggacctgcaaggagtaaaaggtgatgtacggtgtcaaatattccctgctaccttggtggaggccgcctagtgttactggctcacccttttaggcagtaaaacacccgtgcgacaccttgacttctctaagccaaggttagtcttccaaccatccgagtaataataggatcaatttttgcacacacttttgtctctcgaacaacttctgccgagtcatgctcccaagcatccatgagtgcatccatgcatcgaggctctatagttaagatactcacactatccataggttcagactatgataaggcaaatcccaacaccatcgctcacctaatcaatcgtgaccaaggtagagtgtggggcaagatgccaacaccaaactgacgtgtcaacgcttctaatcatgccctaatttgatattatgtgaacaactcttcctcatcgcccaaggactcccatacgtccatggcc

SEQ ID NO: 299095 - DNA, 4887 bp, Cannabis indica
cttgcatctcttgtgcaaactaaattgaatgcgtttaatcctgcgataagtttggctttattctcttcgccaataacacatctacttaagaaattcttgatcacatattatttggcgttgtatatatactttcttgtattcattttgttagttattgtattattggggcatatattccttcttgaactcctatattaattgctcgaaatataaatacaacataattgaacatcaaatcataagtatgataaattttacaactctatacatgtatcaaattaatatgctaaaatagatagatattatattaatgaattttcttgacattgtgtataatagttataataaaatttgattaaagttggtagatatgcttaaactttaaaaatagttgacataaattgaaatattaaaattctttgacaaaaataaaataaaattaaaattcatatagagaaaggcaaactgtagcaatcgggtctcccaatttatgttcggcctcagcgttcattttcgccacgtgccctctcacacatccctagacattcttaatagcacacatttttttttggttcatttgtgtcaagagtaattacactcaaattcaagatgaaatcaaaatcttaacataacaaattagaatcatccaaaaaaatataagcaaaataataaaacctcagaagttttctttgttatatcactctgtagaaagaacaaattatattatctacacagcctcacacctataataaatagacttcaaaactgaatggtaggaatcatagccaaagaaaacaaaaagtggggaagatttaccaaatgagaatggttaaatttaagcaaaaatttcggttagatcatgtctacgacgacattgccagaatcgaatcacgacaaaggaaccaatactgcttgtaggggatgaacatccatggcattggtgaaggaagatcagccaacatggtagatcccattctataaataaaaataaaaagttcaatcatataattttctactcgactatggaaaaatttagagtcagaactcacaagacagtaaaaattaagcagaaaatgtcaagttaccttttcccagtgaggatcccgtacgctgaagcggcaatagacgatcgagaaatgccagaaaaaatatttttgtagtgaggcaagattacttgtcctgaaatatataataaaagtcccattaaaagcttgaagaggtgggctgcaatgtggtagagaatgagataataaactatgaacaaactattacgaaagataataaactctcttccaaaaaaaaaagaaagggtgaaaagaaaattcttacctagagtcatgaagttgctgtggagaaatgaaatcatagacgaagttttctccttcgtgatgtcctttttcatctgcaagttctcagaggaagagtcgaccctttctgaaggatcactggtatcgcactgacatgatacgatatcaaaccatatgccagaaggaaaccttcttggctgaaccaaccgaaggaaaactttgacatatgacgtagcatgaataactgaaatagcgactccaatgagcatacatacaaggctaatggttgtgtccaaaatgctaaagaaaatatagaaaacagtagttgtcggcagtaaaagcaggagtggtgtaaacagaagcgatccaacaatgtgctgcttcacagtgtagttatagctatctaatctcattcggagaggattccatttttgacccctggaaaacagaaagaacaacttaactaattgtgcctaagaaagatatggttatatcaagaaagggtgtgacaagaaagtacctgaaaagacgccataaagatgctattgcttgtatctgagttgaatacaaaagtgagatcacgcaatggatagtcgagacatgtaatgttgctagagtaatcaaatctatgatcaaagcagcaggtagagtcacaccaaaaatgatactcaagacaccaaggactttaattaagaaagtgacatcaaaacccatgaagatccaaagagttgaccaaatctgcactgcattaagtgaaatcaagccaagtactgctgcaagttctgtgtttaacttgaaacctgcagggacccccatcaaccacacacaacctgaacgtaataagttgttcgtaatatcatctgcaaaattaagtacccagaagctggcagatttagcatgaaacagcagcacaaaaccaatcaaatttccgagaaatatatcggtggctaaacttgaccacaatgaatgcctctgcaaagcagctttctcagcatattccacacacgataaagaccttgattaatagaaaagaagtaattagtcaatgcatggaatgataaaaataaaattaattaaagtgagagcatgaacaaaattgaaaatcaaacattgaacagttccagcagaataaatatagagtcatcaaaagacttcctagtaatctttattattaaccctccagcactttcatagaaaatagccacaaagcctagtttgataaaaatcaagaaacggaaattcatcaacaaaacaataagcatacgagttttttgttaagagcaatacttatgcacatgcttcataaaatgataaagatatggaattcaattttctaatttcatcaaaaatcagtcaattaacatggcatccgatctagaaatatcaaagtacacattaaatgatagaatttattacctaatgcccctatcttgaaggaagattggccagtacaagatctgagagcatcgaattctaatatttaacccagctgtgtggaataccttggttgatgtaatgtatatccatgagcttgatgtgtaactcaagagcctgtaaagggactgaagaatgatataaagtacagtggacactgaagccacagaaatagcaaatagatgccacaagaatgcaaaattcctgaaaatgacacaatatgtaggcatcactcgtagattgacaggatatgaacggaaagacagaaaggtgacattcattaagaaaaacatgagaagggaataataccaggaaacagatctctttgcatccaaatgtctcctgaataagaccttagcagaagtggcacaattaatggccagaatggtagtgtcctgaatttgaaataaaaaggaatattaaatgacaaatgtaggtcttgaactgcccaaaaaataacaatttaaaaggttgtttaccaagtcacaaagtggctgcttctggtgaagtttttcaacccatttgggctttctaagaggagctttcacttgttcgtatgaactccaagaatgtgacgagaaatggtgagatccatatgctggtgtctcataaaatataaactggatttgttcaaggcaaaaataactgtgttagcaaccggtcaacaataacaaattattatgtgtatgaaggagtattgtcaaagaaaaagctcatcagaagaatctatgacttacatacgtgaacatcacaatgcgacacgatctgaccattccaatgaatgtgatgcaatttaggaatgagaaaaatgtctcttccaaacttttcatgcgaataagcaacaacctggatccaactatttcccttagaaatcggtctatctcgttctactaaccgatcaagtttatgacactcgcaagaccattgtccagagttatttccattgaaacctggaccagacttcaactcatcatcttctcccattccaactcttgacaattcaccattgttgctaacaccaacagaaaaatgacctaataaagagagctctgatttatcctgtaatgacattggcattttttcgtttgtttcatgtagaattccctgataggaaatagtcatcagtaccacaaaaacagcacacagtaaatatgtcaatcaaagctaaactataatccactctctttttcaagagacccttaagcttgacccaaattctattcttggggtttcttagaaaactagattaatcaaatgaacatgtacattttcacttaatgtcatataatctgattcgaatgttaataataatacaacatgaatcatgtaacaaattgtgattatgcttacatttaccaaaaaggaaaactaaaagaaaacaaaacgaattcaataaattatcaaacacatggaacaaagtcatttgagtctcaaatttattgaaaagaaaaagcatataattagccatttccacgaatttaatacctcgaatccagattccaaaccagaaagcgaagcatcactggtcgcaaaagccactacaacgtcgagataattacaagaagaagaaacaaaccagccgaacaagaaggatttagtagaggacgaagttgtgtttagggaaagctccttaggccaccaaaccctacacttccttttcatttctcaccgtcaaatcacaacgaaacctcgatcgctgccattgccgtagttcagtaaagcttaggtgacagcgtagataacggcgtagagagaaatggtagggaatcgggaatcgagaatggagagaagaaattctggttcagtttcagatggatttgatgaagaagaaggtaaagacaagttttctttactgtgtgtgtggagttcgaatttggatactattggcttctctgcaacgatgaacaaaacgctgcgtttttgagaagctttctttctctgcgtattacgacatgggcttttttaggcccgtttgataagaataaccacttctaatgatttttgatctatacccatgtttagtagaaattttaaatatataattttttttggaaagtaatgaatatatcattgaactaaaaatcaatgttcaacaactaaacatcttaaagataatatggaaaaatatagggttaatttcacaaat

SEQ ID NO: 299096 - DNA, 3822 bp, Cannabis indica
acagtgatagacccagaatttttgattagtgaggcttaattattataaaaatatttattatttactttatattaaaattataattattttgtgggggctttttcctattttgttgtataattatataattaatagaaaattttttttaacactaattttttttagtgggagctataacccccacactttctttactgcgtccgtccctgtatacatatcatactatgtattataagagcttatatactttctcataagaaaaaataagagcttatatacccttcacaacaaaaaatttgtctaactttttgaaattttttcattcatatcctttctttctttttgtcttgtagtgtatatcatttcttattctttttctgtttgccacatattaatactgtaacaatgtgacaccattcaagcaaaaataagaaattgatggcgttgactggagctaactcgcgcaacagtagaagacaaattgatggcaatggagctcctctgaacgcagctcaactgatccaccctgctcaagaagctccataggctgcactccccaacaacaaccttcttccactaaatctgtgtcccgatagatccaattacaccttttagagatctttggttcttgctgccaccagagcctataatcttgaaggatacattctaggaaaaatttctcctccaccacagaatcttgaaggtaatttccccaaccctgctttccttcaatggaaaagattaaaacaattcctcatgcattggctgatgaactctgtctctgaacaaatgtttggccacatcattaactgtcaatcctcctccgagatatggagcattttcgctcaactttttgcctcaagatctagggtcagagttctgcagattcgaggattacttcaggccaccaagaaaggttcatcatctatagaggaataattcttgaagatgaaaagttatgtcgatgctcttgctgttgttggacaacaaatctctgatgaggatttgatcttgtatatcttgggaggcttgggacaagaatacaaagctatcatagttaatctcattgctcgtgaaaatcctctaagtcttcaagaagtccaattcatgctccacagtcatgaattaagaatcaaccaacacaccatagatactctctcaaatgttcaagccaacctagctaatttctctcagaataacagctacagaggaggttataatggcagagatcaaagatccaacaatagaggagaaagaggatacttgagtaattggggaggaagaggaaacagacctgtctgtcaattatgtgtaaaagcatgccacactgcacataagtgctatcacagattcgatatatccttcactgggcctgcttcctcaaaaaactccaatagtgacacaagttttgaaaatcctcaagtcaatcttgctaaaactcccattaccagtgatatatcaggggcctggtttcttgacacaagagtcacccatcacatgacaacaaatttccaaaatttgcagaactcagtggactataaaggaaaagccaaagttgttgttggtaatggtaaatctatgcctatcttcaaattggttctcattctataagttccaatattgctaatcattgtctcattttaaaagatatattacatgtcccaaatgtcaccaaaaatctcttaagcatttctcaattcaccaaagataataatgtcattcttgagtttaatgatgtgtgttgtcttatcaaggacaagaaaacgagacaagtacttctaaagggtactcttagtaatggcctttacaagcttcaagtgcagccctcaaagccaccctccctacctcaaactcaattcagatcaaggcaacaaaataaaagtagtacaccagtagccttcaattgtactactaccagcaaccctgtgttagataaatctaaatgtctgtttgcttagcattgtaggcttggacatccatccaagctagttttagccaaagttcttgcacatgtttgtccttctgttaaatgtaataatgtctatttttgtggtgcttgtcaaataggaaaactgcatcagttcagttttaagactactgaaaataaaaccaaaacttcctttcaattggttcacattaatgtttggggaccatcattttgtacttccatggatggttacaagtattatataagtcttgttgatgattttagcaaatttgtgtggatatttcctatgaaaactaaagctgaagcacccttgatttttaatccattcaatgccttggtagagagacattttaatactaaaatcaaaagcatacaaactaacctaggcaaagagttttcacccctcaaaaaccaccttctcactactggtataatacttaaaaactcctgtccccatgcacaccaacaacaaggaagggtagaaaggaaacatagacatgttgtagatgtcagtttaattctcttagcccaagctgagatgccactacaattttggtgggaagcttttgtctcagcctcatatctcataaatagactcctacccctattcacaacaacttctcaccctatgaaaagctgtttaaaagtgcccttgattacaacctcttaaaaaaatttgggtgtgcttgtttccccctactaagatcctatcaaactcataaagtgtcatttagatcatctaagtgtttgttcatagagtatagtatgtcccaaaagggtatagatgtcttcaccctagtggaagaatatatgtggctagaagtgtcacatttaatgaagctgaaattccctataagactttattttcagcatcatcttctcccaacactacacctgtctctgtgatcaatgccaatgaatatcaaattcctcatcctacagtaaaaaaaagtaaaaaatactgcttgggaatttcaatatccaaaatacatgggtcactatatgcatccaagccgaaagaaaatatatagtcttacataacaagttgatttggacaggccttatcatgttactaattttatactatagtaaaataaatgtgaaaactatacctttgttacaaattatttaattaatttattaacaattaactatgattaatttagatcatgcgatccattaacaatttaatcatagccatttaaattaatcaaataataggttttatcaaaatctattaatttaatttgtaaaaattattaacaagttaattatggttaatttagattcttgcatctattaacaagttaatcatagttaatatagattttactaataaattaattcaattaaaaataaaacaaacaaacatgtaacaaacacacatgtaataaaatatataaaatattattaataaatatcatagtttaaattttaaattaggttgtctagataatattaatgtaaatgccgcttagtttaatttggaaattagcagttaatcatgtttaattatgaaaattatttatagctatttaaataattatttatactgttattattgaaatctgagatgcattttatgttatttagtagttttcataattttgcatttccggtgcccggtaacatggaactcggtgtttggctcagtaaaatcacaacttagtatgttagtattgtgggacggtttgttagacattgggaatgtcgggaatggccgggaatttagaatttcccaaaaataccctttagtgttatttttgtgattttagtgtgaaggggcaaaatggtcattttgccccattgttagtttgtactttagtggattttaaatgtggaaattatgtgtttattaagttatttttggctga

SEQ ID NO: 299097 - DNA, 6904 bp, Cannabis indica
tagataatattcaaaactcgttagttatataagtctcaagcgagataaggataataactattgaactgatattgacgagacatacatctacctcggaatacatggacaaaaaaaaggagattcttctattcaagtagaataaatgtacacatacaacagcctcgggttatacataacgagacaatcacctcgaaatactgaatcaactaaaggaatgcagcgaggtgaacgacttaccaacacttagtattttttccttatgaagatgcacaaggaggataactcatatcaagcgagatacaatctttcaagttaataataaccatctaaaggataaaaacaaggaacggttgagtagttattttgtattatctcacatgtgatttaaataaaacgtggggattgtccacgtttcattaacagttattttgaattgatcctaaaagaataactggcaatctgtactcctataaatagggacaaatttcacagaaaaagggacgaaaaattaagagagaaaatatcataaattctgatattgtattctgtattcaataaatatcctaataagaaggacttgtggagtatgcagattttaactgtacaatcacgtaaaaatatatggagttattgatttttcattattattaatttttgtcaagtatatattactgaaaggctaattatttttggttaacgaaaatctgcgttaacagtgtttatgcagagaagacgatcggtaccacggatcttcatcatcgatggcaaagaaggtcctcctaatcgtggtggcaacttgcacgcgaagaacaatagagaaagagtgagaccgtgataaagaaagagagatagaggacattgttcaccatcttggtcgccatccctaaactcttaggccgttaatggcactttccgctcacaatggatcacaagcgacttttttggaccggtaacactttaggctcacaatagatcacaagtgattctgataccatgttataatttaggataaaatgaatggaattctatctcaaaactaattagcaatgagaggagtatcccaattattttatatataacaatttatttttacacatgaaactaactctaataaaagttataatatttagttattacacactataattatatttaattctcataccgatcgtgcaaattaaataaacaatattattattgaataaatacatcaattttaataattatttttaattatatctgtagatttccaaaaacacatttactaggttttttttttccttattattttcacagttaccatgttccgaaaacaaaagttatactttataaaaaattataacaatttatctacatgtctttaataaaaaaaaacttatcaataattagataataaattttgttccttttcgaaacatatagaatgtttttggatatatattgtaaattttatttcatatatacttcgattaatgtttcatatattataaacttagttcgtttttttttattatttttattttaacaagtaacaatagttagatcaactcaatcattaatacaaaaaccacatgaatacattgtaaaatttgaccccacataattaatatttgtccttaacttatgaaaataagcaagcttccaattatattttatttaattttaatttttaaaaaatattaaattcttatttcaaaaaggaaataatagtggattttttatttattaaaatcattttttttattaatgaatattattaaaatcatctctacatatgaatacattacaaaatttgacccctcataattaatatttgtccttaatttatgaaaataagtaagtttcatataaaaatttccaacaagtccaagcttaactcagcttccaattattttatttaattttaactattaaaaaatataaattcttatttcaaaaaggaaataatagtggtttttttttatttattaaaatcatttttttatgaatattgttaaaattatctatctacacaattttagagtttaatgtgaaaactgcaaagtcaattttatattatttatttttatcagattttacaagtcagagattcctcataccagtttccgttaaattacctaattacccctaactagttaaactaaagagacaaaatacagtctcttgtggacattaaatgaattgtacattttcgtccaaaaataaaaaataaaaaatttcacacacttgagttgagttcatcctcttcctccgttttctctctaaccccttctgtcaaacccattttttctcgagaaagagacagaacccattttctcgagaaaattagaaataatttcaattaattaaattcaaacttgtccgaaaatggagagaaccgcagaggccaagcggtggctaagcacggcggagaaacttttagcggcaagagatcatctcggagccaagagcttcgcgatccgagtccgtgaggtctaccctggtcttgagactgtcgacgacctagttgccgtcgccgatactctccacgctgctgagcagcggatcaacaaccagtatgactggtacgctatccttcagctaccgaggtacactcaaaatatggaactcgttgcgactcagtaccgccgactcgctctgctccttaatcctcatcgaaatcgcttacctcactctgatgaggcttttcagcttgttactgaggcctgggctgtcttatcgaaccagacgaggaggaatttcttccatagcgagttgaatatgtttgctaggtacgatttcggtgccccggctgggcctgggtcaggttcgggtcagttgtttgaaaggcaattctttcagagtcatcaacagccgcaaccaccgccacctccgccacctcagcagcaaccaccgccaccgcaaccaccacagccgttgcagccgaaaccacaacagcattcgcaatcgcaatcgcactcgcttccgcaatggcaatttcatcctcctccacctaaatttcaaactcaagctcagccacaagtacaaactcaatcaagggagcaaacaccgcctcaacctcaatcgagagagcaactgctaccccaaccccaattccaaccccaacagcagcaacatcatcaaatgaaggagcaaccacagccgcagccacaaccacagctacagcaatctcaatcgaaggagcacacacaaccacaatcacaaccactaccacaacaacaaccacaaccagcaagaaaaaaccctggaacaatagatgggagagtcgaggagaacgaggaagaagaggagaggccaaatctcaacaatgtggctgagtcaactcgtgcatctctgccgactgaaacgattgaggaagccgagtatgagggtgagagcttctggactgcatgcccttactgctatgtcctctatgagtatccgaaggggtacgaagagtgtgttctacgttgtcagaactgcaagagggctttccacgcggcggtgataccttccccgccggtgagagggaaagaagatacttacttctgttgttggggttttttccctcttgggttttcagggaacgccaaagatgtgagtggctcttctggttggaccccattttcgcctatgttctcttgccccattcaaaccccgggaaaaagaaatgatgatgggaaaggaaagagaccccgtggtggttcccctaggttcatttatagggatgatgacattttcgtagagctttctgatgacagtgatgaatccgacgatgctgactggcggaatactaggagacttaagaggacaagaacttctactaggagtagaaatactcctaccaaaaatgccaagacaacaacgactgctactaatacaacgagggtaacaagagccagtcagaatgtaggtgctcgggataatggtagtagtgctaatggtgagaatgtaaatggtgcaattgggtcctctaaagggccacaatcaagaggggagttgaggaagaccaaggcggtggctagtggtgggaagaagaagggggcagtggaacggagtaaattggatttgaatgtggagtttagcaatgatgtggaggagtctgctacaactggggtgaagaacaagggtagagaagcaggacatggggaagaggataatattgaagggaatgggttttttgagggtcttgatgagtttcttagtagcttaccaatcttaaatgttgtaggggatgacaaggttaaggctgcttagtaaagtaagacaagactccttttcttttgtcaatgcacctggaggctggagctgttataattgcttgtatgttgttttgctacattccccactccttttagatgcctgaaatgcggaaaggtgtagagcctcttttgtattattttctaatggttctcacttggttaattttcatataaattggcagcattgttgtattttgtagctttttagaggacatcttttgtactaggttggttaagatgttcaagaaggcatctgtctttgattcatggaagtctcaagttaagtagactatattatcatggaagcttgtcttgtgaaatttgacagcatactctttactagtagcttatataatatgtctctcattatcatgctgtcctctgcagggttttcatttgatataagactagactggtaggtctctgaaatgagcatagtaagacagcttagagaaagtataccttaaaggtgacttttggcacatgtattccaactcaagtggtttatgtatgcatattggtggacaaattaggatagattcttatgaggcagcttcaattataggcaaaatatagttctttaatgacaattttgcttgactgatgctgtgtaggctatctaacagtactcagggagctccatcttggtacattatatcttgtttcctttgcctatctctatctgcattttacttttccatattgtaaggtttagatgcttgttgtttttgtttaatttgcatgtgacagggaatatacattcacaaataatagaggagaaaataaagtttgcttgcaaatgggatagaattctgagtatttgagcatggggactaacaaattttcaaatctaggtgactttgactaattctagctgatgatagccgtaattttcagtagtcagaaccacctatttatgctcattcaaggtttagttgatttcccttaataacttaggaaggttatccgaacaatgcttccttttttcaagtaaaacttggctattattgctagagagctcgttttggttattgttattagtctattgaattaagctatgatggaactaacagactttactatggctccagggtttgtcttaagaatatagaaatttgttgcagcacatgctgctcttcaatgtttatgtcccatttctccattgcttgtttatgcttacaagtttattcatcatttaggtgagagctaacagtaaagaagattctttgaaagcttatgcagtgtatactaatcactagaataacttgcatctatttctttttatgtttctggttaatttatttatgcataagcattaacctaaaaaaaaattgggtttattcaatttcaatgcattgggttcgtgtagtttcggttgtctatgtgttgtttatgatatgaactactgaccattttgttctctcaatttgattagtgtggaaattttgccattgtgttgttgaaattgaaacataagtactggaaattcacttgagtttttccatgctattcaattaaatagtggattttatcctaaacatgttttaaatatatgttattccaatctttgtttctcaatttcaggcaaaaacttgaaaagtctgttccttattctgaattagatgtggaatactgagttgattcttgtgtagtagggacagcatcctttcatgtttctcatttacaaatccttttttgaaatgaaacattttaacttgggagttcccatttatgtaatttatgggtagttttttttatttaaacatttatatattataatgttgggacttgaactcacacatacacctagcttcaagtggtgacttatgggtaggtttaatactagaacttaaagaatctctaatggtagcactagaaaagactactttggcattcaagtctaaacatcgataacaaccaatcaaaaaaatatatattttttgtattggcaccaatgctaagttttggtatcaatcctgcaatagagacataatattacctcaagtagcctatgagagggtgtgtggggtttttgggttcgaatcgcaagttatgatagtatatataaacgctctaatagaaaaaaaggcttacttttttccctcattcacctcatcttacttgatccacctaagcatacattagtgatgctcttacaagtagatttacgagccttatgagtagagaattgaatccttttcctttcctattcttctagccaaaaggaaagcttaagagcttcaccatttctaatgccattgagtaatgttgtgcacactttttaaacctaaaacattacacacactacacttctacttatgtagcaagccattttattttaaaaaccaggtaggacccatatataagtgataagtgagcttggaaaaattcatagtacactctttttcagtatactctttctcaattttggtatttatgagagttttttggtttatgtgtattttcatgaaggtatacattatagtgatttaggagtgcttacgaattttcagaaaattaatagtttatcgtattaaaaataaggtttaaatattttgtacgcttgattttttatacgaatggtaagtaattgtttgaattttgaaaaacttattttcggtattataaattattcagaattttttaaaactttacaaattcta

SEQ ID NO: 299098 - DNA, 3130 bp, Cannabis indica
agttttgctgttgctaaatatagcattaacaatagtatttgcgttggagatggtctattaagaagcccaatgttatatacacataaaatgttaacagatgtattgaatagtatcctgaatcctgtctgacagcaagatttcaaggtgttaaccctcattaagttaaaaatctctgtaagctgatttgtgcaagtagtttggtgtcattctatgctgttttgctttgcagctctagccttagtgatgataatcttgtttttgttgcaggcaaacactgtttatggcgcactaaggggtttggaggtacgcagtgatttttattcttcgctttaaaaaacatgaggatgccaataaatggaaatcagatatcttgtataaatctctaggacactttgtggattagtttctcttaaattgaacgatttaaaattttaaattataatgctgctttatgctttgataaaataattatgtagtaaggatggaacaattacatatctgatttgcaacttacacttctgcaagatttgagctgttcgcgtaaatattttatcaggagatgtggaattacatcgtacacatatctgacattgctagctgattaattggtattgagaagtcctttggatgttgcaattccatttagttgtatgaagaattttgtagaaacaatttcatctactgtgttgcatcttttaagttgccttggaatgacaagctgcgctattttaaggtgttgtatatgctactatgttagagaataacacattattgcatatgtcactgcctttaatccattataagttcattcaataatgaagaaatacattattgcatgtcactatcaatagtccattataagtcattcaatggtttttggaagtcttttgcaattgattgtgtatgaagaacttcgtagcaacaatgttagctacagttttgcatttcatttggatgtagttggaatgattagctgctagtccaaaggtgatcctataattataatagtttgcatgtgcaatgtagttgtatgttatttcagatatttggactgttccttttttgactttgctgttcttctgggattttcagacattcagccaactgtgtacatttgactatagtgctaagtctgtgctagtttaccaagcgccctggtatattcaagaaaaaccaagattttcctatcgcgggcttttgcttggtaagatactgtactgtctttctactttatttattttgtccattaattttattctcgtaggattccatcttgaagattgttactcactgtccatgttattaccgtttctgcagatacatcaagacactatttaccagtcgatgtaattaagcagataattgattccatgtcatatgctaaacttgtaagtattgattcttcttttacaagtcccatcttattttattttaggacttctagctctcgtgattggacattcttattagtactcttgtttatatttttcttgtttcatttaagacaaaaatggtttaattgctgattaggataaaattcttgagacttgctcaatattgctttactgctttttccttttttctaataaaatttaatatgatactaatgttgagaatcacatttattagaatgttcttcattggcacgtcatagatgagcagtcatttcccatagaaataccttcatatccaaatttatggagaggttcatatacaaagtgggagcgctatacagtagaggatgcaatagaaatcgtaaagtatgggttctttacttttctaatttctatagcttactaaagtccatgcaaaacttcctcttgttataagcatataaattacatagattttggctggtaataactcatagttttctgtattgccgttttattaattattgtgtgatgtttgatctcttcaaagtttgagatcacctcccttgaaagcaaagataatttaattaattcttttattttaaaggataaaagaacatttgtaatgtggtgctatggctgaagatcacactttaagtgctttaatttttttaagccttactgcttatttgcttctcctcaatgcagttcacaaatttcaatggatatgaactatattatggttttttttttctcaatgtcaatgtgaagctatgccaaactacgaggtgcgtcataactttatatactgcacttcattgttatatttttatgctgtaactttttattgtaagacacttgtgcattttatgaatatggaatctgtcacttgatgacaaaagtaatgcatatgttaccttaatttgcaagattacaaatttaaactctactgaattattacctttgaaatctggggataggcacgtttcttgcacttgatttgaatttattatcattttgggacctgtttcctgattacatctatgcattatgggcaggcattaatattatggccgaagtagatgttcctggccatgcagaatcatggtaaaacctttctttctaaatttcaatttcatccaaagttatattgtgaaatgtgaaaacacttttcttgctgagagatcatagcatgagaataggggtttccattttaattcttgacttgtactacctggccattttgactgagctaaaattttggacatttgcaattacagaatgtagtttctgggcattgcctagtggtcatatactcataaattgagtcattttgtgaaatgtaatactaatccacatatggcaggggcaaaggatatcctgatctttggcctagttcttcctgcagagagccccttgatgtttcaaaaaattatacctttgatgtaattctggcatgctgacaggttaagctccctaataatttttttagatgatataatttaagaatgtttttctttctttttactttgccgtgtgttttgaaacagtgtgagtagttaaattctgctataggtgctataattatttattgaaaataatatattattttcttaaacacattacgttttttccttttttaaaagagacaacctgtattaatgaaataaatcctacaagaatgtggaaaaccacaagtatcaccataacatacaagttatagaaaaaaaacattattacaaaaaaaaaaaaaacca

SEQ ID NO: 299099 - DNA, 8350 bp, Cannabis indica
aaaattaaatattttttatatatacaatttttttcttcctttgaatttgttatttgttattttatttatttaatgtgttgttggagacataaaataactataatttgttttattttgttgctagttatgtggaaaaaaaatattttttttcataaatattaaataatttaatattagaaggtaaccaatccaaagtaagcaatccaatccgcacttttgcgaattggatttgagcttgtgcggattggattggatccaaaaaataaaatccgcacttagtatggattggatattgtttgaccaaaaaagtgtgaattggatcggatgaacaactctaaatttatgggctcaataaaacaagttagtgttaaaaaagttagttaaaaaattatacaataaaatagtaaaaagtccctacaaaataattatattttaatgtaaaataaatataaatatttttataacaattaaatcccataaattaaaaattctaaattcgtcatgactactatgaatgctcactcggctcagctcagctcagctcggctctaccaaagcccaagctgctttttctcctccttttttctgccttgtggtaagacaagacatgctttatcaaatgaacacatttaaaaagacaaaaaaacattgctatcgaaaaagtcctcaaaagttggactgtattatggaatgctcatcctttcattttcttttctttttaaccatttattattctctttcttttcttttcttttcttttcttttctttcaagtatagataattatttttcaaaattatgtatgtatgtatgttgtcacttttagtttgatagtctcattctttattggggttaggagtggagtatatatagtatatcttctttttattattatgagtatatgcaatataataattaaagctacataaagttgatgagatgattaaaaaaaaaagagaggactacaaattaattacctaaaatgtacggaaacattgtgatctgatctagggacaaaataaaacttctatcatcatattgaaccaatatacaaaagaagtctttactttaaaataaataggcttagaataaaaggatcgggtttggagttttcgagttttgagttcgggttataagatgtggttaacgagtattgttattagatattatgtacagtgtccagcactataatgaagtgatgccttatttttttttttaataagtcagtaaaatattttattgcaaatagaataatttacacttgacaacaattcaaagcacaactaataaattgtacctaaattatccaatatgatactagttttttttcctttgaaaatgagaaagccttatacaaatttctttttgaattctttttacaatgaaatgtaccgtataaacttaactattctaaagggcattgttcttagcctccgaaatattgtagaccaaaacattcaaaacggtcgtgtagactccacgtttacatctcgatcttctccaatttttcacccaaatcaagcaaccatctaaatcattttggtggggattaaaaccagcccaatcacaaatcttcacaagaatttgtgtattgtacctacacccaaatagggctgaacatgaaattcagaaaattgaaaaaatcgtttaaactgacttaccgaacactgttggaatcaaaatcgccggaaccgaaaatcgaaaaaatcgctaacggttgaaaccgccattgaatggtcaattttttttgggtaataaaccaaccggaaaatcgaaaccgaccgttatacatatatattaattattaatttttttctttatgtattttagttactcataatatataataataatatattattatttaattaatatttaagttaaaagaataagataattagtttttgaacaattaatttgtatgattatagttgtagaatgttaaataatgtgcttatagaataaattggatcatattttaaagaaaaagaagaagttcagtttgggcggtttaaatcaaccaaatcgagattcaaaacggtcggttttaagataggttctggattggtcggtcggtttcggattgtaccaatccagaccgaaaaccaaattctggatttttatatagaaaaaaaccgatcaaaccaactgatgctcatctctacatccaaagaagagatggtgatgtgtctccaactcctcatcacaaagtaaacaattagcattagtgattaattaagccaaacctgaacaaccgatccctagtttggagttttttccaacaagccaaccaagtaataaatttttattttggagcacttagtctatcccaaatgaagaaaaactatttcttcattgtataatcccttggccaaagcttggagcaaatatttgcgatgctaaaatgtaagctagtgaactccctcaaagccattttgcttcgaattaaattcttagtcatcacaatttttccccaattcgagctagtggtttacagagcttcatagctctaccaatatagtgatgcctaacactacttaaaaatactgacttgttaatagttagtgatatttatagtcattattaaattaaattatatggaacctaatacttaattacactaataatggtatgataattttaagtggatttaaacactaataatgtcttttagtatttttccatttgtaattaaaataggacctaatattaaattatacataatatttaataatacatcgggtactaagtatcatcatttataaaatctaacaacctaaagtactgttttgggagttttgttagttgaaagttattaagttagctatgtacacttatgttagttagttggaatgtcatctaacttctatatatagttggagtcctcattattcaagaggttaagaacttagagagcaaattaagagcaaaattgtgtacgaaagagacctatatatatagagagaaagttttgtaaaccatgttggtgtgttgagagcttgagtgtctttagggtggtttctttcttaattgtcccattggtgtacacaattggattattggtgttggtaatctctttaattatattggagaaactccttatagagaaaactggaccttgaccttgttcttgagattaaataaggagtagcaaaacaagtttccacacggcatatgaacacgaacatgatacgaattttatgatttagagttgaaaaaattaagtgcaggtcgacacgacttaacacaaaataaaaacagatcaaatacaacatgattcgtttaacacgaagttgacatgtttgacacgatttttttaaataaaataaaaaaatatttataataatataactatgtaaatatatagtaattttttttttttgaaagattcaatattaagttaaaaattataatttttattatatatctatagataaatttttaattggaacctccaatttattgtttcctctacaactctagcttctagtaaaagtgggtcaaagtgggtcaatacgaacacgatacaatttttttagaggtcagatcaaagtttaaaaaattagacatatgtccacatgcctatctcgaaatatataagcaagttaataaataaaatatgacacaaacatgagataataacgcatttttccacccatacattcaaccataattaattttcttattcaattgcttttacttctttattttacatccattaatttagagatgaaggtattcaaactcctttaaattaattttcatgataagttgagaaatatatatatatatatttgtatttattaataaaaaatattcttatatgatattttattaaaatatacctacttttttgagtgggttgcctactatactctcacgctctacttaagtttagcatataatttacattaacataatgaatctaatggggatatcatctataaaaattggcatattataaagaatatgaaaataaaggtcaaaattaaaataaatacactaaagtgagtatataatgtaagtttctgttaatttttggcaccaacacccgtttagaggcgaggcacaagaggatgtactgggccaacattgtggctttaaaaactattttcaaaatactatttaataataattttgattttaccaattttaagttctctttttcttttcacataaaatttgaaagggttaactctattttacttttcatttatttttatatgataattatttatggacaaaaaatgtatggaaaactaaagtgaaaaaattcaccattatttcctaccttatccttcacttttatttgtttattaatgcaagttgatcattttattttattttatttttaaaacaagttagtttgtagtcatatcatctcatgttactatactttacataaagtacacattttcatttgataggcatactttccaccacacacatatcaaacttacattatgtttggtaaagtgtaaagaattgacataataaagaatatattacatagtttgtttagtaaaaagaaggcatatttggttaatttattacaaaattacttttgtatacgtgcattatatttaattaagataaataaataaatatagattaataaagctaatgagatcgtggtatgtatgtagagagatcataatttagttttagttcattcctatttataccataccgagcaaaaatgtattcatactcaattatctaccaaatatataaagttagggaaaggttgatatgggaaagaatttgaagagtattttttgttttataccttaacaaaatttacatctaaataaaatttaatttaaatatatttctttttataagtattatactcaaattatcctcgtactcctacataattattaattaagacataattttaaacataataaatttatattttttagaaatgaatgtataggtttgtgaaaaagtttgagcaaatctccatatgaagtatcaaaaagacccatgggcttgtttttagtgcaataagatagtgacatgtcatctagttgttaatgatcctttcactttcattggccaaagtgccaaacttattagttgaagaagatgatgataggaaggtttttttttggttggtcggtgtgtttttaccggtgaggcgcgtctcaattcagaaatgagatttttgattatatccattcggaccttgagttacatccagaacaaaaatcaaaggtggagcaagctacttcttgagtagagttgatgattgggttttcttactcattaagtttatcgtttataaatgatatgattatgttatatgatattctttaattgttggcttgcttttataattattatttggtagtctattgttttttttgttgggtctttgtgacttacagattttttgtggtgcaggtaagagcaagagttattcggttcaaccaggagttaaagagcaggacaactggtgtacatgttctggtctacttagcctatgaggctgagttagttaaggagaacaatttctattactacttttgaaaatcaccaaaatgttttgtactaggctttacatttgtgagtcaaaatgtttagtttttaaagggatccagagattcaaaattttccaattgaagttttattataaaatgtatgatttatgatttaaattattagtttattttaattaaatcacgattttactattctaattgggtttattattgttataccaatatttcaagtagtacataataggtttggttgggtgacacgtgcacaacaaagggaataaattgactcgattaatttaagagatgaagtattaacctcctcgcaatatgaagcccatacatgttcttctcagagtaaactgatttctacatcattaaacgcgagacactcaacgtaatcctattgtctaactgaagatgctaaacttgtcaaggcattaaggaacatttttggtgttgacattgttaacgttgaaaagcttaatttgcttaagcttagtcttgatcatcaccccagaaatataattaatatgtcctctgatgaataggtcctcatgtcttctgtgtgcataagcagtgcacccaaaagccctcaagtgatcaattcctgatgcatgacctttccaaaattcttgttgtcttttgaaattttaagttgtagagggacacctattaatgagataacatgttgtcttcaaggtttctccccaaaactgtttccctaaccctgcaccatttagcatctattagactctttcaatcagggtcatgttcatcatctcaattaaccattttgttgaggagtcttgataacagttttgtgtcttttaatcctaatttcttgacaatacatgttaaactcatcagaacaaaactccaagccattgtcagttctcaacattttaattttcttaccaatttgattttcaattaatgttttccaattaaccaaggtgctaaatcaatcctttttatttctgagtaaaaaaaaacccaatcatcaactatactcaagaagtagcttgctccacctttgatatttgttctggatgtaactcaaggtacttccatgttgttgtgtgccttgcttttgtgaactttatattgcaactttgaccacaattacaattttcacaaaattttagtttatttccaagtttatatttgttgagaatcatggggtttcatctcaaaaccaattggcaatgattggagtagtctatgttctttatatatggctcaatacttttacatttaatccatgtggaataatgttctccaataatattttagaataccttatttctcaagctcatacaatcctatttcactaacatgtccaaacctcatgtgccataattttatttgatccatccttgcacttttggctactttgcagcctttccaaccactgtctgaccagattttaggattatgttacaaatgactttaaggcttgactataaatagcctttaatctagctattaactgttataaatgacagttagttagtatttcatctagataattagttgtcttgtggccaaaaacaacaatggtcagactaaatataagcattaaatatgaatccataacaggtataatgagccatatccaacatggatgaaatgtttaaagagggtaatgtttctccaattaattaataatttcactaaaatatatgaaaatatatatagtcagaacagaaagtatatgtatataaataaacattgctttaaattctactctctacatttattaaacactaagcaatcggccacaactggtttaagtttaagaagcagtaacattcactctttctcatcaatttttattaaatactgtttttttaatcaccattattttatttttttatatctatataagttgtgaataaattaaggattgtttgatttattacttttataaggatacggctgagatgaaagtacataataatataccttgtcaaagagtaaaatatatatttttaaataaaaagttgtattttaacatttaaattttaatcaactaccccatttcaaaaaaaaaaaaaaacaactacaccttctactcatagaaaagtacacaaaaatttcacttctagttctatttatataatggaaaataataattattttttgattgaaaaaaaaattaggtagtgtaaattttatctctaattcttttagcttaatagtaatttcagagattatcgaagagagagctgagagcctaagatttatacatagactctaagatggttgctagttgatggcctataaggcacattggcacctattgctcctaaagaaagaaccacttttaaggcaaagattaaagtgttctaactctaaaacgcaatcaagtgaggaaccttttgcaaagtatctcaaccattataccacacacttagtgaataataacaattaaaataaaagttttggtgtttaatgtaaatatttggtggattggtatcagagccgaccttgagaatatatgagcctaaggtaaattagattttggaccctcagaaatatttatataaaatattgaaaaagagtgttatgggattcgaacccatagcattatataatatgtcatacacatcaactaactaagctatgaatatttgttgtttacaatacacttaattttacttaaataaaagtctaatgaaactttttttattttttattttggacccacaaaaagtgtgggccctaaggacggggcctagcccgcctatgcttaaagtcgttcctaattggtatgggaaacttacaaaaatactggaatttcggttaacttttacaaaaatactgccacacgattttttt

SEQ ID NO: 299100 - DNA, 5662 bp, Cannabis indica
caacttgtcactaccagagcttttgtataaatattctgattcttattgaacctatttctcatttagtattttgcttattagtttgtcaatccaattgtagaatattaaaataacacaaattttatttcatcactaaaattttattgtcccttttgtttgtttcttcacctatgagaggaaacccactctttcacaccaatttgtcacaactagagcttgtagaaaacactctatttgagatcttgaaccagccttgtttttctattctgctttcattcaaatggatccttggtacaagctacaaattatcattttaaaggaattcttaatattttctaggtccgataaagttttgccattaaacaaatttacttttcctgtagaattaaaattgaaaagaaagtactgaactgtgccaatttatttaaatgtttttcagttataagaaaggaaaaaagatataaatataatagtttataggaaagtacaagaagtatcacattaagactaccactccatcatgttttcgctgttgattctgttattcatctttacctaacaacctgccgtaaccttacattttgacaaagaaatagcattttctttatgcaggcaagatactttatttattatattattgttggtataatttcttactaattcagtttttattgtgtcactatttctgtgcagacaacagctttaaagaatggagccttgcgccatgatatacattattggcttggtaaagataccactcaggtaagttattcactcatagattagtttgtccaaaattgaattcccttgtgtgcttcatttgacatggagatttgttagaataggatgaagctggtactgcagccatcaagacagttgaactggatgcagctcttggaggacgtgctgttcaataccgtgaagtacagggtcatgaaactgaaaaattcttgtcatattttaaaccgtgtattataccccaacagggtggaattgcaactgggttcaaacatgctgaggctgaagaacacaatatacggttgtatgtctgcaaaggaaaacacgtagtccatgttaaagaggcaagtccttaaaaatagatgatgaaagacaagtctgattacagctgcattattgatataaatgtgatgcttatttctcatttatgtgtatcattctcttccctttattaagttgtagtgattgtctctcgcaggttccattcgcccgatcttcactcaatcatgatgacatttttattcttgatacgaagtctaaaatttttcaattcaatggttgcaactcatctattcaagagagagcaaaagcattggaagttgttcaatacattaaagatacatatcatgatgggaaatgtgaagtagctgctgttggtgagtggctaattgattaagaaattcaataatgatatattatgtcacttattttcaggatttttatattacttttttgagtgtttttactatctttcatgtagaggatgggaaattaatggctgatcctgaggctggagaattttggggtttctttggtggctttgctccacttccaaagaaagcggccagtgacgaggataagaccattggttctcatactacaaagcttctttggtatagctctctgtatttgctccttgttactttccacattatcgtttcgactttggatcactccagagtgcatctcattgttgctaagtccaatttttttaaatggctggcttgacttaacatgtgtccttgttggcaagttttaaatgttgtcttgctgttcccaaattctataacaaaaatcttgcacgacattgctcacttatgtgtccctcgatccaaatggtagataattgtcgtataaatattgtgtattggcgtgtcttaactagttataatgaagttccttgtattatagaaactatgggatctgattatactctggttgtgacgaaaatatacatgcttttgaagtgttgtgaagggaaaggcagaacctgttgaagctgatttgttgacaagggagttactcgacacgaataaatgctatctattagattgtgggatagaagtgtttgtttggatggggagaagtacatcacttgatgaaagaaaggctgcaagtggagcctcagaggtaataaccggttctctatcgtattcagctactctgctttattattacttaatcacacttattttattcttgattgcatttattaggaattggttagtggtgctaatagaccaaaatcccacataatccgtgtgatcgagggctttgagacagtgatgtttagatctaaatttgattcatggcctcagacagctgaggtaactgtctcagaggatggtagaggcaaggtagcaggtcagcaactattgaaatcattttgtatttgtattccttgcggtacaatttattgttataatcacagtattcatggaaaattcaaatgctttttcattgattttgtagcacttttgaagcgtcaaggtgtcaatgtgaagggcttgttaaaagcagatcctgttaaagaagaaccccaaccatacattgattgcacagggaacttacaggtgcacacaaacctatatctatagtaatatacctaagtgatctgtttctttcaattattgaagccccccttaattggccttttctaaaataaaaatagttttaacatttattttctatggttttggaagtaccttatcttattttttgcttcctatggcagcttggcttttagagagtatataaatgaggttagactcatcgagttgttatgctaattaatggtagttttacaggtctggcgtgttaatggccaggaaaagattcttcttcctactaccaatcagtcaaagctttacagtggagattgttacatctttcagtattcttatcctggggatgacaaggaggaatatcttataggaacatggtttggcaagcaaagtgttgaggtaaaatatatgcaattatgctaatgcttaacaacctctttgaacattctgttgggctacctataatacacgcatattcaaggagaaggagaagaactaatttgggaattaattagtgtgtgttgactttttattaggagtcttttaattcatataagtgagttcgcaaaagttaatgtaatcctacttgttgggagggtcttagacaaaatgtataaataagtcttgagaacttattttagggggtgaataatttgtgactgctttgcatagagataattctcttttggagtctttgaggtacttgaaacctttacaccattttatccctacgaatagagaacacctaatccaatctaacgtttttctcctaattcgatccaattcaattagacctcaaaatccaatttaattattaattagattgggtcggttttttaattggatatccaattacatgcctaatttttaatattaacttaaaaacatgcaaaaaaaatacctaaagactatatataaaccttcatttaagtttaatactacataaatataacatccttacaagtttaatgcaaccaaaagtttgaaatatctaaaacaacaacactaccaactaatacaatagaacaaaaaacatcatgaaaataaatacacaaaacaaccaagtattacaaattcaaaaagaaaaaaaaaatgctagtaaaaatataataataacatttttttattatatataaataatttttttactatgtattaggtgtaattggattagattggtttttaattggattttgagattgacatccgataaccaatctaatccaattaaaatccaactttaaacatccaatcaaatccaattataattggatatccaatttcttgtaattggatggaattggttcggttcaattggattagattggatcctgtccgcccctacctacaaatttaataagagattcttctcttctccatgtcaagtgtctgtcaaattggtaccagagccttcaacaagaccatggttagtgccaagaaaatgatgacacgtgaacaccatggaggaccacgacaagcaggcagcaacaacggaaactatggtacaataaaatctacccctacaatggtgtctcctgaggaaaaatttccctgcacatgtccaagtttgaagaacgcttggatgcttggcttgaagcaaaatttgaaatgttgtctaagaacttgtcttctttttccctgaccttcattaatgatggaatttctctccaaaatccacatttggggttcaagagcccacctcctgccccaacacgatccaagaacttgtcctcttttctaacctccaagaatgatggaattcggcttcgaagtccgcatttagggttcatgaactcacctcttgcccttatactaatgctaccaccttcgtttggcacgtttccaatagaccacttcaaccatttctatgactccagatgtgattggagatgccaagggcaaccccgatggttagagtttgaaagcagaaagatacttttcattgtagctatttaccaatgccaagaaaatagaagtcccggtcatttcctttgaaggtgatgtgattcttggttctaagtggaaagcaaaggaagaccaatgaaccatgaaattgcttttgttgcatcgattttgcagccacaatgatggggttttatttgaccaatttcttgtggttcgccaagaaaccacaatcaaggaatactatggccgctctattgaattgttggcacccttggacaatatttcaaacaaaattgtgctaggtaccttaactaatgccatcaagaaaggtctacgtgatgagctgcgggtgttttgaccacattctttagaaacattcatggaattagctctttccacagagagtaaaaacagaggcagctcaaaatactagttatccaatccttcacagctcacaaaaaattcctagcctcaatactcaatgggctaactctgctacacccatggggacattcaagaaaatgatagaatcggagtatgaaaacaagaaaaggttgtgtgttttaaatgtgatggcaaggggtacaaagatcatgtttgcgaaaaacaaagagctaaatatcttgattcttctcgatgatgatgttttcttaggaggatcagctcctggcccacaagcatgaaacaaatttggattttgtggaagtgaaaacatcagttgaaatttccctcaatttggtggctggtctaacggctccaaagactatgaagatctagagtgtcattcacaaccagccagtggtaactctaattgaacttggtgctactcacaattttattcctacaactttggtccaacagggctgccaatatccaaaattgaggcttatggtgtgacaatgggatcatgggcattcaatgactttctaaattggctatgacacactaactggaacactaaattcatgtaattctagctagttgaccaattcgtcactttacatggagatccttctcttggtagatccctcatttcttcaaaggccatgctcaagacgttgatgcaagaacggacaggtatcatagtggagttaaatgaagtcatggtgtattagtggaggtggtattgataagccacaccagaataacttagactttaggcttagttgttaact

SEQ ID NO: 299101 - DNA, 2303 bp, Cannabis indica
agaaaattcacataccaagatattttaaaggaagaaaactcttgtggcaactgaagatatcaacaattttatccaaaaaaaaaaaacaaaaatagaatccatacctaacctatacactgctgatttatcgagattattttgaaggcctgaagagttagcgaaaagcttgaaacctcttaattaaagagttgccgagatgtaaatctcccttacaaaacaaaaggaggttaaggttcaagcttttacaccttggatgaaatttgaagtctttctttcttgctactttcttcaagtttcttgataaatattccatgtcaataacaaacaaaagaggtgacataaaatcacattgtcttagacccctttgaggttgaagaaaactatgaagtgctcgatttataaagaaggagaagcgagttgttgttaagaagctcataatgagatccacaaatttctttggaaggttaagagcctttagcatttcttccaagaactcccaatctagagtgtcataggttttttttgacgatgtatcttgaataaaaaaagtcgatttcacactctttctatcggattccctacatcttgacaaatcataatgtcatgagctatttgctttcctttaatgaaattattttaatttttcaaaatgattcctagaagaatttctcttgagtaattacatatcattttggtgcaattttatagaccatattgtaataagaaatgggcctataatcattcactgagtcagaacaaattattttagtaatcaaacttaccgcaatagcatttatttcttaaaaaatcttacccgaattcaggaaagatagaatagccccaatcacttcatgaccaattatctcccaagtgtcttttataaaagcactattatatccgtcaaggcctagggctttatcatctggaatggaattcaaggccctttcgaccttatcctttgaataatcttgaattaaccattttgattgatcttgatttactctcgatccatctttaacaattcgagaatgaactctcgatccatctctgatggaatgtattgcattttgttgtctccttttcttcaaactggcatggaacatcttggtattatcatccccaccttcaatctaagaaatcttagttttttgaccaatggaattggttgtagtttctgtggccttcaacatatacaaatatcgtgctttgatttctgagtttattaaatccatattactaggattttgctgaagcttttgctgcacggtgaccatttcaataaaagcttcctgctctgcaattaatattcacatctcctttgtcttgtcgatttaaaactttgagactatttttgagctatttcaagtgagagacaaggcgatacatagagaatcaaccatctccttccaatgattattcacaatattagaaaaaccattcaaatccttccaaaaaaattaaagtacctgaatggtttatttgttttgaatattcagataataggaaaggatcgttggggaatgatcgaaatcccttttttgaagaaagtgacctatgcagtggtatattatttcatccagtcagtaatagccataattttgtctaatttttcatagactcaatgtttccttcttgcttgttattccatgtgaagaaatttccattatatttgatgtcttccaatccacagtcagcaacacgtttaaaaatgcaccatttcatttgcatttccttcataaaaaaatctttagctcctcatcaaagtctccctagctattatccaaggtatttgcatacttttataaattgttctaatgtccttccatagatgatctctacctttcctttcattaaccgcatacacaatagttagtgaaaagcttttatttgattttggcttagtcacacaatgtatcaattggctagttatttatatcaacctccaaattagtaggattccaaacaataataatctacctatttagatgatgagcaagattagtagtgaaacaccactccttaaacatattaaggttagagatgaaaattgggcggttaatgtacggggaatgcaatccctgcccccatccccgctacctatttatacccccatccccgccccatccccgtctaataaccaacggattcggggtaggggaatacccatcgattatggggaacccatcaggtatctattaaagtaaactgttgtataccgaaatggtacgttttacatttatcaactcgcaagcgcacgaatctttattgtagtatggagattgtgaagaacgaggttgaaccca

SEQ ID NO: 299102 - DNA, 826 bp, Cannabis indica
ctctataattttaatactaaactgaatctatatgtccaacttggtctagtcataagacaatgaataaattatctctattctcatttctttgacagagataaaagtaactatagctaatataataccaaaaatgatagatagaagttatacactatatattataattaaaagtgataaccatactcaatagctgataaatgagatttcacaaattctaaattctgctcatccgttctgtaatgcatttatctcattgtagcgcgtgaggatagtcaatcttgaacgataaaataaaaaatagaaaacaataatcttgtattgaatgtatttaaaataacaacttatcaaaagaatcattcatgtttacctgagtctttaagaaacttgcgggatttaacttggtcgtaaaactttaggcatacttcataacgaatatcaacattgtatgccattagattcgacacttgtactcggtgattttagacttgaatgagaactaacatcaagcactgaatactacacataataaaaaaaatatttatcaaattcactaatctatctataggaaagaagagagcgtgtacaagagaaggccacatgaactaaaaatgtatatgcaccggaactctaataaattcttaccaagagagtgtcgaaatttgttgagatgatttattggattgctcgttgtacctaataaaaatgaaaatataattaattgtaaaaaaaccttataaaactatcatttgagaatagtttgatacataaaaatgatattagaattttcatttaatgaaaatttccatttttctttaaaaaaaaaaaa

SEQ ID NO: 299103 - DNA, 1882 bp, Cannabis indica
aattataattctaaaattagattacgtcttatttataaattttcactaagttagggcttaattgtgaagaaaagagattttagggtctatttgtaaattaagagacattattaagtttaattaataaataaattaaatggaaattttatttgataattaattttaattattaaataaatagttttgacatttaaaggattgaaattagaaaatatggcatttgtgaaagaataagataaataagtgagtaaaatggcaaaaattccaatttagtgggacccactaagtggctggccactttaggtgaatttttcccaatttttatcattttttaatgccatataatttaaatctaaccctaagtgaaatagtataaaaagaataagatggtctcattatccaactaacgattcataacctcgtttactatttgttaaacaactagagagttttgagacctccttctttcttcttcttctatttcgaaatctcttgagtgttcttcagaaatttttgagcctcttagtgattgagtatatgtccacacataggaagtaagtactcaatcataatgtgtaagactctgaagaatccaacacctgaaagagaatcgggcttagatcttgataatactctgcgacaaaaaggaacaagggttagagatctgggtggaagaagtcatttaattccgctgcaaccaatgtaaggtttcttaaactttatatgtgtttaaattctattgttttagaaattcatatttaggatgttaaacaacatacatggtagtaaatttagatgctggtaaaataatctccaacactttcaaagcaaggtatttgatgctccggacagcaaagggacgttcaatcagtcacatcgaatcaagggtaaaagtcaaacatgtgtcacccatttgatcagatcatgactgaataagtccacgtgcaaccaagaagctcccgcgcagactggggggctaatgttatccaaatttctatacaaggtcacatcgtatccatttgggtgacacatgggctagattttgtgacttgggcagaagatttttctcacaaggaaccgtgcagagagatctaatgctcatagtgaggagttgaatgtccgaacagcatgcaagaacacccgaccagcttccaccacgtacgtggctcgcatacacccaagtttgagattcggtgtcagggtacgaggtaagtgttggggctaacacccaagtttaggaaatggatttctcaattttttaaaacatttaggtaatatattgttatcggtatctataatcaatgcctattcaaccttcgcagaactgggtggaataggcatcgttggaaaatactcgaatatgtctattcccaacagtttaatatcattggctatagtgagccactcgacgattttaaattgtcacattaaaaaaatatagatctggtcagaacaaaacaactctgaccaaatttaaaataccaaacaatctacaaataataaaaaaaaatatatataatcaaaaacaatctacaaactcaaaatataatattaatttgatattctaaacataaataaacaatcacgataacacaaacacaactagaatttatgaagaaaaaaaatcagatctcaagatcctcgaagcaccgttgtccacctctgctaccaccacctgagaaaaaaagaaaggaggagatgagagagagcttgagaatgagaatagaagaagtgtaccgttgtgtgcaagatctcttgaaaatttgagttcggtgtgggtcttcgacgagagggagaagagacggtggtgacggtagggttcttcaacgagagggaggatgagaggtggcggcgatgtggtcatcgagagagagagagagag

SEQ ID NO: 299104 - DNA, 3361 bp, Cannabis indica
aaaataaataaataaaattaaactacagttggtttcttagacaggatgtcaaggacatgagtttagttgtttgtcttggcattacggggtagtaggtttaccagtcttgtttcataattttgcaacagaagaaaattcattctccttgttttttgaattgacatggtaattatcatttgagacttcaagtcctgaagaaacttgttctttttgctctttaggagacctttctgccatataaagtaataaagcgtagttgagaatgaagtttttaaacctttaaattttacttgtatttattgtcaggttccactacttgcaggagcattgataccaatttgtgaggtttttgggtctagtgttcccaacatctcaaggactcttccgacaggggaagaactttcttgtcatgcagttttctcaaatgcattcacacttctactgagatcatggcgatttgatcatgcacctctagaacatgtgatgggagatgcgaggacgacaatgggatcccaactgagtcctgaatacctcttattgattcgaaatgctcgtttagcatctgttggaacatcagccaaagatcgaattacaagcaggagaatttctaaacttatcaccttttctactgaacctataatattggactcttttccaagattaaaactctggtaccagcagcatcaaaaatgtatttgctctacactctctggacttgtacctgggacccctgttcatcaaattgttgatgcactcctaagtatgatgttcagaaaaataagtagaggcagtcaaccattaacccctacaacttcaggaagcagtacttcatcaatctcggggcctgatgactcctcaattagactcaaagtgcctgcttgggatatcttggaagcaacgccttttgtgcttgatgctgctcttacagcttgtgctcatggacgactctctccccgtgaactagctacaggtctgtcaaaaaaaaaaaaacattgggggtgtgggggtggttgtagtagtctttcaaaattgatttctattagccattttaaagggttgctttgttgaatgtttactgttttttaaatttatgggatgttgatctgtatcctactttctcaggactgaaggatcttgctgattaccttcctgctactttagcaactatcttaagcatttttcagctgaagtaacaagggggatatggaagccagcctacatgaatggaactgattggccaagccctgctgcaaacttgtccgctgtagagcagcagataaaaaaaatgcttgctgccactggtgttgatgtcccaagcctctctgttggtactctcactttcatgtagctgagctctgcaattttaattttgttaaaatgtctgttattaaatagaaaataaaataagtactgatgtgggacagtttccaacattctcgagtgaagttgcagtctgttgaaatcttaatgctgaaaatttgtcagaatcaattagctaacactaaacttctcatgctattacttgcaggaggaagctctccagccacacttcctttacccttagctgccttaataagtcttacaataacttataaacttgataaagcttccgaacgggccctccagttaattgggccagctacgaattccctagctacaggttgcccttggccatgcatgcccatcattgcctcattatggtcccaaaaggtaaagcgttggagtgacttcctgatgttctctgcttcgcaagcagtcttccaccataacagtgatgctgttgttcaacttcttaagagctgcttttcgtctacgctcggtctaagttcctatcatattcacagcaatggtggggtgggttcccttcttggccatggccttggttctttctcaggtggcatatctccagttgccccagggtttctttacttgcgtgtacatcgctcagttagagatgttatgttcttgacagaggagatagtttcacttctcatgttctcagttaaagagattgtaagttgtggactaccaaaagaaaaagtagaaaagttgaagaagaccaaaaatggcttgagatatgggcaggtttctttagccacagctatgtcacgcatcaagctagcagcatctcttggagcttcattggtttggatcactggcgggcccagcttaattcaatgtttgatcaaagaaaccttaccctcatggtttatagcagcacaaggatcatcagagccagaaaaccaagaaacaggatgcacattatctgttctcgggggatatgcacttgcatattttgctgtgctctctggtacatttgcatggggaatcgacccagtatcacccacttcaaaacgtagatcaatgattctcggagcccacttagattttctcgcaagcgcactagctgggaacatctcattgggttgtgattgggctacttggcgagcatatgtgtcagggttgctgagtttaatggtggggtgcacgaagaattggatgatggaaatcgatgtggatatactgaagaggctaagcaagggtttgagacaatggaatgaggaggaattggctttggccgtgttggggctgggcggtgttggagcaatgggggctgcagctgaactggttatcgagagcgacttttgagcttttagatggacggtaggctatatagcatgaaacattgatttattaacacgtacgtaagtgtagtttgttttgttatatcctccttaggatcttttttctcttccgaaatttagctcatgtaaattttaatcaggttcaggttaaacatgtttattggaataattattgaaatattctttaaatcaatcctgcgtgacaattattattcaccttcattgtatgatttttttagaagaaaaatctcaaaactccaacctaaagagcaagggctctaaaaaaaggaggaagaggggatatcattaaaaattcatggctgccaccaaactttactagttgctataggtaaaacaaacttaataagattagatcatctcgaatgggagatgtaaaaattgtactatatttgacacaaaaagtagttttgtcgtgagtttacatcaaattttaactttgtgctcaatgtataattaaaaaattttaatataaaatttaatatctaattaatattttattaaaaaagtaaaaactaataattttattatcaattttattattattttaatatataagtaaaaaagtaatataaatgttttataatttaatattataattaaatatactaataaaataatacaaatgacataaatataaataaaaaagtagtgcatttattgtggtgtaaattttaaatgttgtgtcaaatttggca

SEQ ID NO: 299105 - DNA, 8088 bp, Cannabis indica
ttatggttggagcttattttttttttcaagaattactatctattttagctaaaaagtgtgtttaaataacatggttggagatattctaaatatagagagtaatattatagtattattttataatttatagtatactaataaataaacccctaattgtgattaattacataaagtgaaaataacaataaagacactcattttacactcaatttatgtacaaaatagtatcaatgatatcaatccagtggttccactcgtaataaaatgtgtggtctaaccaattaacattttatgcgtaagaagtgtttatgctcactggctgaatgtagacttctctttttctgcttcaccacaatgatagttttggtagctgccccactaaaatcaaggcaatgtcttcaatgtacaaacaatttaaaaatagccaaataaagatcataatctgaagaagataaaaagaacaggaaaagagaataaatagtgaaatgtaatcttcattctaaactaattcttaatttctgacaaagtaagttctttataaacatcaagcataggaaagatcttattcaaacgtttaaaggaatgttctgatattgcttctagcttgagaagggagttggcgagccccatggcttcaactcgccaccctgcgaatccgattccttcaactaagagaatcaaagttgtttcatttggctggcaccctttcccaaccattgttgtgaaaaactcgatggcatcatcaatcctacgtgctttgcacaatccaagaagaacaatattataactgataacagatggccggaaaccaccactgtccatgtctaataacagtccaattgcctcatttaccaacccatctctgcacaagcaagatatgagtgagttataagtgatttcatcaggatcaatccctttgctaaccatctctgatatcatctccaaagccttaattctttccccacagttccacaaagcactgaacattgtgttgtatgagctgacatttggaggacaccccacttccccaagcttgtgaaagatttctaaagcctgctcagggttcccatttttacagaatgcggacaagattgtgttgtagtttacgatatccggcaagctaccatcagagatcatgtagtccatgaattctattgccaaatctaaccttccatctttgcagaaagcagatatcaatggatcataactataagcatctggggttatccccttttccttcatagccttgagtacattcacggcatcttcaaccttcccatctttacaaagtgtgctaatcaaaatgctgtaagtcaccacatttggctcgcatcctcttgaaaccatatcactcaataacttctctccatcattccatttcccatgattcaagagtgcccttaacaagatgttataagatattacatctggactacaacccttggcttctaagctcctaacaaactcaaaagctctatccaccattccttctctgcacattcccctgattatagcattaaaagtacacatatcaggaagaagccctcttgacaacatctcatccaaaagctccatagctttgtcaataccaccttcactaatggttgcctcaattaaaatggtgtaagtgatcacagaaggggcacatttatctttcaacaactcatccaaaacattaaaagccaattcaagcctccccctactacatagactcccaatcattatattgtaagtaatagtatcaggagaaaagccttgagcccgcattctgtcaagcactctattggctaattcaatcctattcgccttacaaaacccgctgatcatggcattataagaaaacaaatcaggctccccatgtttttccaaaatctccataacccggacagcattctgaacatccctagaactgaagaaccctctcatcacttttgtacaaaggataacatcaggcttaaaacccttagtaaccattaattggagaaagtaaagggcctccttgtacttccctgctctgcaagctctattaagaactttcaaaagatgaatttctttatatccataacggtgcaaaaggggtcctcctcctcttgttgtttcaatagaacccttaggagatctaaatggttttctgctgaagtctctacttgagctgaagcaatttatgtaaactgcacattctttaatactagagctgcggccagtgccacaacacagaccatcttgtttggaaaatctatgaagactatgaccaccaatcataaaactatgttgggtaattgtataccccatttctccacctacttttaagtaaataaacaccgaaaagaactacaaaagagcggtagagcatacactaatagaagggaaatggcatggcctcaaagctgaaccattgattaacaactcgcttcagcttcctctaactccagcctaagaatgattttcacaatctgcacagagtcaacagaaactacaaaaggtgacaatctttcagagttcaaacataaacatcacacagagaagacctttagcatcaccaaaacacatcaacaaaactagaaagaattatgaccaccaccaacctcatccttgaagttgagagagagttgagaagtaaatgaatgagacattctgagaagagaaacagatcagagcaagaaggtcaggaataaagtattaaacaaatggaattagaattcaagacaccattttaaccagagaaaaagttgaaaaataataccttggaccgacccaagttaacacaatgcattgaaggaggagaagagaaggtcttcgtcccgtggaatgaattgaagtagatccgacggcagtgctccaccggagaaggagctgcagagttcacaactttaagttttcacccaaaaattgaacatttgaatgaggcacggcagtgacagagtctcctctcagtctcagtcagtctcagataaggatatgatattggatggatatctagtagtaaaggataggataataattctaacacaaaaacattttatattctttaaattaaaacttatttataacaaaatttgatttttcaattataaatattaaattatatcttttcttaataaaataacattaaaaaaaatcatatgctaaaaaaatattagacataaatatataaaattataacatgtataattttttatatctatcaagatgatatgtacatcaaaataaataaataagggagacgatttaattttaaattcaatatgatttttttttaaaagaaaatgacaactttattaacacgaagcatcaaccattacaatagataagaattcaaccggaatattacttttggtgaaaatacgatctagataaaaataagagctacgagcaagacaatgagcaattttatttacagaacgtttgataaaataaatctcaacagattttaaagaggttaagtagatcttgcattcacgaactaataagccaaagggagaaggcatatgaattgtgctttgcaaagctttgacagcaactaaacaatgggtttcaagttgcacatcaactcaaccttttcttttaattcagcttagagcctctttgatgccataaatcttagtcatagtcgcatccacttgtctaggtttactttgagaaatggattcgatcacatgaccattatggtcacgggcaacactcccaaaaccaaaccacccttccgaggcaaaaatagcgccttctacattcaccttaacattgttaaaagctggtttagaccaatgctcgcttcccacattcattcccactggaataaacaaaggaccatgttttttagactgagcaattctccattgattaagagtgattctgactgacaacaccacctcagcagtagacccatgtttaccttgccaatccatatcatatatggcattccagatcgcccatcccaccatagtggcttcctcacgaactggagcaaaagactactgaagaagcagtccaaaccaagtgcgaaagtcagcccccgtgaagtgaaaaaagctgaccgatgaacgattccagcaagagtgagcaaaaggacaggagactaagagatggaaaattgtttcttccgcattatggcatgatggacaaagtagatcaactggaacatgcttggatgccaactgtgatttggttggcaagacgtttgagagagcgggccaaagaaattgaagcacttttgggggacagcaagcttccaaacaatcttccacatatctaaatcagaaggcaataccagcaagtgatcgtttttatgcaaaaatttataggcgtccttcacttggtatagccccgagatattaagggcccaaaaccagtaatcacaagcagcattgagactaactgggaccgaaaaaatcaattttcaatccctttcattgaatagatcattaataatttctatgtcccaattcctactaccgacaaccatcaagttattaactttacaatcagccaagccatcaaaatgagaggtaatatagggattatccccatttggaagccataggtccctagtaaaaaaaatagaagtgtcggtccaacattgcatctagctccaactttaattaatcctagagtttcaaagatactcttccaaatgaagcttggattgtcaccaagggaagctgaaagaaaattacctctaggataaaagcgagcctagtaaacacgactcactagagaagtatcatttgtaaccaagcgccaagcttgttttcccaatattaataggttgaaatcacgaaaatgacgaaagtcaaggcccccatgatgtttttgttgacaaagcctttgccaactcatccagcttacaccatgtgtctttgacaaatcgaagttccattaaaatttactcatcattccttcaagcttgttgcacatctcaacaggaaaaaggaaaaccgacatggcataagtagggagagcttgaaccacagtcttctgcaacacttccttgcctgcctttgaaagaagatgccccttccaactttgaatgcatttttgcatcttatctttgagaaatcccgaaatggcatttttattacgactcatagtacaagggagccttaaatataagctatcagctggagcgtccatcatacctaacaaagtgcacattctatccttggtggcagccgtagtattcatactaaagaaaatagtaaacctagtaaagttgacacgctgcccagaagcttcctcaaacacctgaagtaaacggatgacgttagaggcttctgtatcattagccttacaatagagatagcaatcatccgcaaaaagtatatgagatatagtcggggcaccattacaaacatgacaaccatgtaaatctccacaggcttcgaatcgcttgataagagatgagaaaccttcagcgcagatcaagaaaagatagggtgacaatggatcaccctgatggatacctctaccaggcaaaattggccccacctcacgacctccatgagtaataatgtagctaaccgaataaatacattgaagaataaggtccactatttgttcatgaaaacccattttacgcatcatgttactcaaaaaataccactcaacacagtcataggccttactcatgtctaatttcaaagccatataaccctccttcccaacccccttccactttagatagtgcataacctcaaatgagatcataatgttgtctgtaatcagtcttcctagaatgaaagcactttggttttcagagataacaagaggaggaatagtctttaaccggttcgccaagaccttgaaacaaactttgtaaagcagattacataaggcgttgggcctcaaatcccctatggaaacaagattctttttcttcgggataagaacagtattcgtatgattcaaaccagtaggaagagaaccaaacacgagcccattattttcagaaatgacatcactatcttcaatatcttcttccatatcatgtaaaccatcaccaaagccttcacaagtattgggcttgcgcctctttgtatcaaccccacgacccaatagaaaattggcagcatgctccattctaatgccatgactaggagcattatttaaattcaaagatgagttacccaaaacagatccctcaataatagggagttgattaacaccctggatattattataccctttgactgaatattgattacaacataatctaaactaggaaacttatcttttccatgattcatgggatttccaccatccatgacaccaccaccacgatccccagatcgtccaactagaacaccgccataagtttccagtcgaccttcatcaaattgggcatccgcaaccgtgcctattctcaaattttgagaactcacaatatacttcttcttctgaggatgaacacgcatccattccccatacggattgatgatctcttatttaggagtgtcaaaaagtctaggacaaaactttttcgagtgaccaatgatactgcaaatgtaacaaaaatttaggacaaactcatacctgaaattggcccagaaccaatctcctctagtcttcttcatcttcattcttcttttcaacggtgcatcgatattaccagtgacctaaacacgtaagtagtcatgccataaaccattgtagtcttttggattcgtctccacaaatgcaccaatcgttttagccgcttccaacgctacacgctttgtcataaactccgatgagaggccatgaacttacacccataaatccagtctatttaaaggtaccgccttaggatcccctcctcttagcactcttccaaacagaagcggcatccggttaaacgtccacggactcccattgatgacccgctttatatcgatctcatggtagaattaaaatggatataaattaggtcccaactctttcacaaataaccccttcctaggcttccacaaaccaaccatagtgtgtcccatggcatcaaaatccaaaacacgagcatttaaaaattgtcccactaaataccaccgatcatcaaccataacctcctccgcctcaatattattaaattccactccatcgtcctcatcttccaaaacaatatttgcgtaatgtttctccatctcatcaaccacctttgtaacaccctaagaattttgcacactatgacaattgattatgaaaccctaatcccctaactacagaattactagaaaggtaagcgcgggaaaatttaaactttatttacaacaggatgaaaagtaaatttgtaataatattaactttacaaacaaccaaaaatacatgttttgggattccgtaaaaattttcataaaatattacaagtctatttaacgtgccgacctaagcggtaaaaacatgattacaaaatacttcagtggtagaccccaacctgcttggtctagtgtggtccgaacatgtacaagcatcgccaaaccctcacactcatggctggtcaatgatagatttaccctttcctgcacaatagagcacctgtgagctaagcccatcaagacagtataaatatcaataaacacaattatacatttcacatacattataatcatgccattatacttattgtctatttagcatagacctgcgtgttacgctcacacacctatatatgtctatgtagcatagacctacgtgttacgctcacacgtctaattacagtaaagccttagaacggttcatctcgaatctaattaccgagtccaaccaaattatgccttgaacgcataattcttaatttcaatatatatagcatggcatagcatttaaaccttaataattactagggtaataaccctagaccataaaatcgctcactttagggtaataaccctaatcccggttcttaatgaatcacaaatataatattcaacataagcgccaccgctcataactctatgtgctaactattgtcttacctgatgtcccataaattttgaaattccaaatctccgggtgttcgtgaacaagcgtcggtagtcctagacacacattcccaagatttcacaaatagggttaatcccaaaattcactttcaataatcacataattagcattacattt

SEQ ID NO: 299106 - DNA, 1706 bp, Cannabis indica
aagcacttttgttggagagataatctttgcagtttgcatatctatctttggattgattttattcgcattacttattggcaatatgcaggtaaccaaaagttcaatgagattgattggtgaaaaaaacacatacatggctagctttgatttgatttgctcttgtttttttttatagaaatttttgcagtcaacaactgtgagaattgaagaaatgagagttaaaaggcaagacgcggagcaatggatgtcccaccggatgctccccgagcctttgagggaacggattagaagatatgaacagtataaatggcaagaaacaaggggtgttgaagaagagactctggtcagaactcttcctaaagaccttaggagagacataaaaaaccacctttgcttggatcttcttaaaaaagtgagtcctttccttaaaaaagaaaccagcattttccatgtcctttgtttttagctactcttctcactaaacttggttttgaactttgtaaaggtgccactgtttgagaaaatggatgagcagcttctggacgcgctatgtgatcgtttaaagccagttctgtacacagataagagttcaattgttcgggagggtgatccggttgatgaaatgctcttcatcatgagaggaaaccttgcaaccatgaccactaatggtggaaagacgggatttttcaacactgctgatctcaaggctggtgatttctgtggagaagaacttctcacatgggctttggatcccacctctgcctccaatctccccacatcaaccaggacagtggaagccaaaacggaggtagaggcatttgctctcatggctgatgatttgaagtttgtcgcttctcagtttcgccgcctccacagcaaacaactccagcacactttcaggcaaggcatttaaacaatgaatcttctattaagtgtccttagaccaggccaccaatattttttcttttctttttattattatggtgaaatcaagatactaatgtggtggtttttttgtctactattcagataccattcgttacaatggaaaacatggggggcttgttttatacaagccgcttggcgaaggcattgcaagagaaagcttgagaagtctttaagggaggcagaggataggctgcaagatgccctggtgaatgagattggaagcacaccaagccttggcgccaccatttatgcctccaggtttgctgcaaatttgatcagaggcttaagacgaagccgtgtacgcaactctagacccacacagagattgctgccattgctacctcagaaaccggctgagcctgatttcacttctgagcatcactagctacttagcaaatactactactggtgtctgtctctcattgtcttaaatgtgaaatttagctacttcggtattgtaaaatttctctctgtgcataatatgtataataggcctagatttctaatgtaagtagaaatgttactttgagaattttatatataccgggtaatttatttgtacaagtgtgcccctttgattctgatctttgagaataatgtctgctaccaaattcaagttttctagaaaattctgcctttgatgataggaaaaataagaataagaaacatttcagtaactattcaacaaatcaaaaagtaattatatcacatttaagttatgaatatttaaaagagaaatatattgtcaatcaaatata

SEQ ID NO: 299107 - DNA, 4269 bp, Cannabis indica
taaataaataaataaagtagataaaaaaatatatgatgaaggacttaagtttccacctcaaaggattattatatagaaaatgctagatttattgtacgaattaagaaagtattttatcctaaatcatgtgtttgtgttgggatgtatttggttcaagatgagcagtttaaggctcacggcccattagatgccgaaggcctgaggcccataaaggtgacgattaaccaacagagatgatggcccataaaggtttccatgggcttagcctggggtttctggctcataaaagtattatcaattatgacaattttacatgaagtttgttatttattcatttctactattacgaccaattgtttgttgaagaaattccactcatatgatattttaaaattttgttacaaaaatatggtactttaggttacgtcacatcttatgctatattttagtttttaaattatttaatgctattgcctatgctatacatgtataaacttaattttcaaagtttatatttgatgtttagatagattatttcaaaaagataaaaaatctcaaagctatattttctcctccatttaagtagcctacttatctcacctctcaacagttcacctatgtatcgacctccgtttaccagcgactcatttggtgaccggaaacccacacatccgacgattgacagctcaaacggactctaaatatgagttctccaccacgaaaaacccagaagactgaacgcgttttgctacagttggggatctagaaaccaatttcttaaactaaagaactgatttcatacgaaacaaatcttatatgagttttggtagtcgtaattggtttctttattaagatactagttttaattacgtggaagtaggtagttttttaattcattgtcttagcaaaactatttttaactattttcttcaataaaaaattggttttttcattttattatcaagaaactagttttgattaaatagaagtacaatttatatataagttaatcttatattttaagttcttcattaaaaaataaataaataaaatatagtcaggtattttcttaattactttgagaattacgtcatgattttctgtaaatttaaatagaagttaatatcgaagataatttattgttttcttttcattgtcgtttaatgggatatatagtcgggtctttaaaaatactgtattggctttgaaagttgaaaacgattgtcgttataggaccaaattgacttgctcagcgcgaaaacatccaaaaatctggagagctatcgctttttcaaatcccaattggtcacctctctcttctttctctctccacccaagaaagaaaacctgttgtgttggaatggaagacgagagagatggaggaggaagagaagggaaggtcagggccctcattcaaagggcgatcaactcaaccgaaccagaaatcgacccacgcctcctcaaggccatcaaatttgtggtccgctactctgattctgaactccgactcgccgcccataccctattggacctcatgaaacgcgaccatgcacaggttctctctcgtcttcgattttcgtttcattatccaattttattaaatccgttccttttagtatttgagtagttgagggattccaatattttattgaaacataataattgttaggattgtgtcttcgtattttgtttttgattgctatgaaaattgaggggaaatgacagatatttgactttttgattaaattggtgagaattagatgagggggattaatttaatttataatgaaaatttatatggtatttggttcgtctttttttggtttagatgggtgagaatcaactttatatggtatttgcaggttcggtaccttagccttctcataattgaccaacttttcatgcggtccaagctcttccgggggctccttgttgagcgtatggacgttctgttaactctgagcatcggatttcgggggaatcagcctcttcctgatccaccagctgttgcaagccttctgcgttccaaggcgattgagtttttggagaaatggaatgactcgttcgggattcattacagacagattagattggggtttgattacctgaagaatactctcaggtttcagttccctaatctgcaagcaaatgcagctcggtttcagcgggagagaagagagagggagcgaaggtcgaaagagatcgttcttaacaagtatgaggctttgaaagggaatttctcatccatggaggatgaaatacaaactacaattaatgagattggagagtgtttggacattgttcgtagtggggagaaaccccctgtggcgttggagtctattgatgaggatgatttcgtagagatccattcggttgaattgaggcagttacgtatcaccacattggaagaaggagaaaaggttcatgagagcatagataataaagtggtttttgatgcattgagggagctatacaggcttgttgtgacaaagcatttggtttcagttcgagaagggatctctgtacttatacgggttgaattgacagataacaaattaagagattccattttgaaggagctcattaatatccaaaatcgtcttctatcagtgaagaagaagtgtgaagaagcaggttgttctcttttaaatactgaaagtaataatgaagaagaagatttttgggaggaggggaaaactggatgtaccgagagtgaaagctctattgcacaccaaaatggaaataacagtgttaccgttgcatcagtatccactaaggtggaaaatactggtccttcatgcagtgctaaagaccgaggtaagaaaaaaatgcttcgtgaaagtcgtagaaataaatcaaaccctttgaagagtaagctattggctgatgctccagttgttcaatggggctctcagttggacaattggagttcacaaaaggatgttttagccaaccagcggggactggagcttgaaagccactggggtagagtggactatgatgcagtcattcctgcagagaaaattgcagaattaaatattcaggcaacagtatatagtgaagatcaagctgaaattcaaccatgtcgtgcccctttgaaaaaaggtggactttgtcagagaagagatttgaaagtatgcccatttcatggacctatcgttcctcgagataatgaaggaaaaccacttgatcaggattccttgaaaaatgatgaggcaacttctgattcaggtactgacttagtagaacgcatagcaaaacaagctgttaagaatgtacgtgagagagataaagaggtagcaattatgagagcagctgataaacaatccttgaagcgtgctaaacttgcaaaagtaagggagcacaatgaggcttgtttaaaggatgctgcaatggcttcaacttcatattctgcatctattgtagaagacatggaggcaactacacagaatcagctctctaaaaagaagcagacacttgcttcgatgttgaagaagaaagttactccaaaagatagattagctcaaaggctattgaacgcacggacaaggagtgcaacagtatcacagcttacgtcggctgaggatgcaaagtacagagaagctttcccaaatcagtggtaaatgaagtcatcatatacatttatttgattatttagaaaataatccctagatacagagtaggtggagattgcaaaacaatttttttttagctttttaataagagagattgtaaacattggcattctggtttcacagctatactaaacagatgaaacagaagagcactgatgctttctttctttgttttattgtatttgttttataggttggtttgatcagtcttgtaatatatgtttattattttttcttgaaataaatgagaaaaatttgtatatgaagagatgaataagaagatgggatccatgtgtgaagccacaggttttggaagctttgtatcccatcatttttgtgggggttcttgtacaacctagtcagtagaatttcgttgtcttccataactgtttaagcacaactaatgataacataattgaattatatttaaatgaattaattaaggatatcttaaggcttagccatggctcactggtttgtcagctaagaaatgatgcaacattaatatgataggcagagagagagagaggctgaactttcgcttcaactacttaatggatggctacttcaaagaactacgatatctctctttcccaagtaactcttttttaaggcattggcattgttgtgagat

SEQ ID NO: 299108 - DNA, 1946 bp, Cannabis indica
gtttcatactcatttttggtacccttgttatttaggtttagggcttacataaccaatttggaaagtggagcgattcaagaaatttctgccgctaaaagagccagtgggtaagcacagtcctatctatagttaacttgtgttgtgatggatttattgatgactatagtcgatatttcctgaagaaaatgttgtaatctgaacttgatgttgtaatttatagcaatggtgaaactagagccagagcagtacatcgaaaagccttactcgagactttagcaggtgaattgccaactaactcgatccgtttctcttcaaagctcactaaaattgaaacagaatcacatttgagttcatcaattgctgtgattcatttggaagacgaaaatgtcattaaagcaaaggtattatttgcgtaatgtgccatagtaaattttgcaatggactgatagttaattctcaatttgattgctctttggggttgcacagattctgattggttgtgatggggtacactcgatggtggcgagatcgttgggaatcatagcagctatcgattcaggtcgttcatcagtccgtggattggctgtgttccctcaaggtcattgccttaaagatgaaatgcaccagttcgtaggtacaagaagaagggctggtctggttcctgtcaatgacaaagagatttattggtactttacttgttcttctccttctaaaggtaaatctttttaattatcataaatatccaatgaaccataagaaaaaagccccacttatatttgtatttgacattttccattgcaggcacaggtctcttatcaggagacccaaaagtcatacaaagagaagtaattgagaagtatgccaaggattttcctgagatatatctagatgccgttaagcacacagacctgtcgacattgacatgggctccattgatgttcagatatccatggaacgtggcatttgggaagttaagcaagcaaaacatcacagtggctggcgatgcaatgcatcccatgacgcctgacttaggacaaggaggttgtgcagcacttgaagatgctgttgtcttgggaaggcacattgggacatcaatacaacagaatggacgacttgtccaaccacaaatgggtaaagcattagcggattacgtcgaagaaagaaggtggcgagcaacttggttgattatagggtcgtatttaacagggtgggtacaagaaggagggtctctttgggggttgaagttcttaagggatatcatattttatggattgctttttcgaaagattggtactcttatgcagtatgattgtgggaatctgcctatttttcccatctcaacagaatcagataagatgaagtaggcaatgttaagagtgattcagtctccctccaaatccatcttcactctgagcactttaaatatctttgtaaaatgatgcttttataaataattgaacgaagggggcaattgatacatgaataattatgtggcattttgcacttcttttataatttaggtcatctctatatattttaggggtttttttattattacattttaaagagttttttttttacaaaaatccacatacaaattaacggagtaacttaaatagtaactcaaatctatataacaaccaaatagcaaccactaataaaaaaaaaatagtatataaagtgattttcttatattttagttcacattccaataactattcttaagaatctccaattctattaagaaagatttatttgtactctacaaaattataaattttaaatgatgctaatattaagaaaaaaaacttagattaattgtaatactctactagtttaagcgtgttaacgtgatttttaatttaaatgtgtagctcgttgttaatccatgagtttattgaaaatcgtgaataattaaaactttatttaactatttataaatatca

SEQ ID NO: 299109 - DNA, 4817 bp, Cannabis indica
tgatatccaaacactttgaaaaatatttttcattaaaatttttatataataattatccctacaataaaaataaatcaaagtttgtacttatcctatacttttaactataattaaaagtaaaagtttaaccagaggagcttaaagaaaaatatctccaaaactatgcataatcaccatacatatacatatatattattgaatatttccatagataataattaaatttatatttaaactatttagccagctagtgagtaatttatgattatcaactaaaaataagttatgaatgtccttataaataaagccagcttccaagtgaaaaatttctaaggtgtgatgagtgtcattataaatgaaaaaggtatattaattaaaggcagaataaatggaaaagtaatggatactggatattgtatactaattattacagatcctacattctatataatccactcttatattatacaaaattacattgtaatgaggatcctgttaaggtatgagtggttggatacagatttactgaccacaaattatgatacatcaatagttgtcaaagagaatgaaaagagaaaggaaagtgctgactgtattaataaaacagttaccatttacatttatatatatttttttactttatatatagtttttttactttttgaggaatatattactcaatttcaagaatgggtacaaacatgcaatatatgtgtattttgtagtttgtatgtacctatataaattcaaccatttttcatcacttctttatatcattttctttcttcccaaacacctttttttctctgtgtagtgatgaaggctttcattgatacttgtggcttattacttttgttcttatgggtcttctcaggtcacttattttctcttaactatcttattgtatttgcaatatatgtaaaaagctttctttttatacactatatatatacatataaatgagtataaataatggtaattctgtgaaaggtttatttatattatatttttttcttgcagggcatggcctttatgcttcaccatacaattactatgcaaccacaacggtaagtaattcaatcgatttttaatgattaaaagataaagggatacggttgacatcttattttaatttatttttcaacttccttcccctaaagtatatagagaattgctaaaaaccactattagtatctatacatttttcagtatcatattgttattagtgtaattaagtatcgggtttcatataacttaaaaaaataatttttaagatatattactaagaaggtacttaataccaccatatgctcaaaatatatatggagtaactatgtcatgtgtgtttacaaaaattcaaacttatttttgtcaatgtaaacctttaggctatgtttgaaagttaattttgataacaaaaaaatgtaaggaaaaaaaaattaaatttcattgaattaaatattttttttatacaatttttctttccatacaatgtacaatgctgttaaaaaaaaagttagaaatagaaggttagtattaatctaataaaagatattatattaattagtaagaaattgataattgataaaaatgcagtccttgaaagagccccaaaaagctctgtatggaggtggtgtaatagttaatccagagtttaaccataataacagtcaagggtgggtgatgtttgggaaaggaaaaatagagcaacgattatcaaaggaaggaaataagttcattgtggcacataacccaacacacccattacatagtttctctcaccaagttcaagttgagaatggaaaaatctattctttctcaggtaaatatattaaattgttcttattttaatgatcatatatcaatcacacccaaattgaaaacaatcatctttttagaatcaaagttttattataactgtctatgaatttgattgagtaacttgttgtatgtttgcattatcagcttggattcaagtcagtgaaggaagtgaggatgtaacagttgtctttaaatccaataagggatatcttatacatggtggcacaaccacagctaatagtggatgttggactctgctaaaaggtggtatggtggcaaatttctctggccctcttgatatttcttttgaggtaattagttgaggtcattatcaagtcaaacttattaaaagttcaaaagaaaattgactttatttttctttgaattaacttggattttcccatgtagaccaagaatacatcagtagaaatttgggttgacagtgtttcacttcaaccattcacccagaagcaatggagatcccaacaagaaaaaagcattaacaaggtaaatattgaaatcccaataacataatctcaataaaaaagaccaatatgaacaccaatctatgattgaaaaaattggcaggttagaagaagtaaggtaaggattcaagtaagtgatgagaatagaactctattgcaaggtgctgtagtgtctattaagcagaaaaaaccaggatttttatttggatgttgtatgaaccacaatatactaacaagtactcagtaccaaaattggttctcatcaagatttcatgctaccactttcacaaatgagatgaaatggtatagtactgagaatgtacaaggccaagaaaactactccactgcagatgccatggtggaatttgcccaaaagcatggcatttctattagaggtcacaacatattttgggatgatcctatctaccagccttattgggttcgttctctttctccagacgagttgcgaaagtcggctgctaaaagaatcaattctgtagtttctaagtacagaggaaaggtaattgggtgggatgttatgaatgagaatatgcatttcaatttctttgaggataaacttggtaaaactgcttctgctgattactacaaaatagctcagcaacttgatccacaaacaaccatgttccttaatgagtataatacaattgagtattctggtgacactgctgttaccccagctaaataccttaacaaaattagggagattttgtcttatcctggaaatgctcatttgaaattgggaataggattagaaggtcatttcactgctgatcaaccaaaccttgcatatatgagatctgctttggacattttaggtgcaacaaagtttcccatttggcttacagaaatatcagtggctaacagccccaatgaagtaagaatcaatcaattctctatctgggatttgcattagagatttaatcaattgaattaattgagttgagacttaattaaactttgtttctttcttttattacaggctaaatacttggaagaggtactaagagagggctatgctcatcctgctgtacaaggcataatcatgtttacaggtccagtctctgctggttttaacaccccaattcttgctgatcaaaatttcaagaacactccatctggtgatgtggttgataagttgcttaaagagtggaactctggggctgatcaagacaccataacagatagtcaaggattcatagatgttacactctctcatggggactatgatctaactataaagcacccttttacaaactcttcatctactctcagtttaagggttgaaaaagataaaccattaggaatcatacatgtaaatattgatacctgaaataccattgtactgtattgcatataaaaacttaataagaggtgttttttttcttcttcagtgctactagttttggttgatgatattatcactcaaattatcattttatatatttatttttaaagctaaagttgaataatattatttatgttacttgtaatttatttatttccctagttgtatcggtgaatcgaaaataaatcaaaagttttcggattaatatccaaaattatttataaatactactgttttttatcaataatttctagttttacaaataaaaattaaactacttacgaaattgtgagattgaagctatgaaaaaaaaaatccataaatttataactaaaaaaaattataatatattgtgttatgttgttgtggtagtagccaagaagcaagaaactgaagccactacaatggtaatggccattgaaacgacgtcgtccaaaatggcggcaaatcgcatttcttgcagctcccatagcgttgaaacaaacaccttcactccctccaaaaccacttcaaaaatggccatttcttttatcaaacaattaattttccaaaacttattataactaataataatgcacactacacacacattcatatcatatcaatttatttacacatacatattaacacaaaaactacaccattaattaaaatgagatgaacccccacgacccagtactccaaagaacaaaaaaacagaagtgaaaatgtaaaatggtgggtataaattgggtaaatggaattccagagttatatatatataacagctttagtggtattttttacttataaaaattgataagtgtgatgcttcgaggaagcttcctatctctgaattaattttcagtggcttgaagtttacgtttggggtcatataggtcagatttgtacggcatttcctgccatgacagaccagtgtcaactgctgctgtattagtagtattgtatagcagtaataccatatatgtgactatataacaggaaagagcaaaatgcaatttaattttgatttctaatcaaattaaaaatatgtatatagaatggttttgactctttgaatcttgatcttgagtcaagtgtttcattctaaacatgctgtgataaatatgtaagataggtatgtatgtgggaaaattataactaaa

SEQ ID NO: 299110 - DNA, 1373 bp, Cannabis indica
ggtgaagattggtatgatttgaggtggtttaataaggcttctatcttacacaacaaggtgttccctagatggtaaacttatggaccttaaaggttgatttgcctatcttttacttcgtttttttctttgttgttttgaagagtgctttgaaatttggttatgaaaaatataagctttgtttcaatctttatatagtggagaaaagaagaagaagtaattaatgatcaatatggtaatatgacaaagtatagtggcatgtgattcaacctcttccaatgccttatgtatccattttggccaacaaactaccacctttgttatttatttaatattttttattaatagtttcatatttgaaaaaaattaaacaaagagtacagtccattactcatttatgcctccttgcccccttaaaaatcaaacctttaatactaatactaagggcattactcattcatggtcttttattctttttctttttcttaaaggtctaacaacaattcatggggtctcactctctgtactcaccactaattaaggccattttttgaggttataattcactacatagaccatgaatctagggtttacaaaaaagcaagtttaatggggtcacatgaataatgtttttgttctaaatttgaattaatttaatctcaagtggcattgaattatgcaaaccctataaatgttatcctagtaagagtcctataggagacaaggggacataattaagtagatattcttgcatttttatatatacattggaagttgattttaaccctttttttctttcaaaaatatcattaagaaagtggctagcatttgggagaagaaactcacccaatatggccatttcttcaatgttcaatgtatattatctgtgacccacatatatgattcttcttgtcccctattggtttttacataaatgtactttttaagattaagaattaatgtgtttggtttaacaagagtgaatcaagtaagttaattagttgaaaaactaattgacaaagtcctagtaagaacaaattaaggcacattgttgaatagagaagaagcattatacattatgtttattaaattaatatataaggcaaatctataacatgtgattgcattgaatgatgatgaaattgaaccatgtatttgtgtcaccataaccacaccaaggccactcaccccccattcttctcatctatgccaccatgtgatataatgggaccaaaaaaatcatcaattatgaaaaaaaaaatatatatttaattttttgactattttttttaagttattttggataatgacattaaaagaattacaaatttatggatttttatattttttttgtttaaaaatataatttttttttt

SEQ ID NO: 299111 - DNA, 3371 bp, Cannabis indica
tttttcacatgtttaggaaattctattctacaattatctagaacgttttagattaagtatttttacaaatgtagaattatttaaactaaattgagtattgtagaaatgtgtatcaatttctaatatcaatgttatgtgaatagcactaatagatcattattagagtaatatatgtttcatgtgatagagctatttaattggtttaaattagtataaagacacaggctcgaaactttgtgttattttttaccaaggatagctcaaacggtcagtcacgtaaagtgtgtttgctcctacattaattgctactattttctggtccttaattggtgaacacttgaagatagcttgaggaattggcaaggtattagtgtccaagaatttgaaatgttaccagccttaactattagaagttacccatcagtgtgtcatagaataggcctattttgagctctattcatttacttgttaagcaatatccttgagtttgctatcgtggatttctattgaatttttacgtacatactcttgtataggttgaggcatgtattactccaagttttttctgctggtctattatttctctttgttcattattattttagtcttaatctccttttggtttatttgggtgaacttgtaacttatctattggagacggtttaaatcttctgtctagggggaaatgccagttgtttagttctaattcttattgtcatgtccttgttcttgttgttagcataattcttgacatcatcatgttaatatttagagaaaatcttatctcgttatgttatctgtcttttcgaatgcatagtgatatgaatcttactttcgatttgtttgtatttctgcccacagattaccgggaaactgtttccaagaaatagccaaatcacaacattagtcaatcaagtggatcttcttcgtaggaagtttacctattgtgttccatccctcctcacaaccccaaacagcattaagtttgcttataaatctgctcgagatgctgttgttgctcagattgcctggacagaagaaacttgcaatggcaagactaaaagagaaacatgcccaatttgtatggaagataaagatgttgctgagatgttttcggttgatggttgtctgcacaggtactgttttacttgtatgaaacaacatgtggaagcaaagttgcatgatggaagggtagccaagtgcccacatgctgaatgcaactctgtggtagctattgatagttgtgagaaatttttgccacctgagttagtgaaggttatggatcaacgaatgaaagaatctgctattcccactacacagaaagtttattgcccagatcccaaatgctctgccttaatgtcaaagaatgaggttttggaatataccaagacttcatttgttggtgctgaacgctctggtgcgaggaaatgcatgaaatgtcaaaagttcttctgtatcgattgcagagtcccctggcactacaatatgtcttgcaatgactacagagagacgagttcgtatccccgtggagatgaacaactactgaagtctcttgcatcaaaaaggttgtggcgtcagtgcgctaagtgtaaccatatggttgaactgttagagggctgctaccacatcacttgcaggtatgttctcattctttgagtttggttccttcaatcttgcttctgttttgtctttaaatgtttaattagcatttactttgagctgctataatctaatgctgagttctattatcaattgtttaactgttagtaaaatacccaagagctgtttcaactgcttgatcatgctccttattatatcaaagaagcagatcattatcttttatgaatttaattatggtaagatgaaaatagctaaaagacactagtaacaccactatgaggtattttacgagtaatgatatgtgaacacacaagattggcaagccactttcaataagttggacctatcttaaataaaatcacataaatgtttgtcaaattttatatcattactcataattggtgtaatataaaatcggatccctcttacattttattttatgggaaggatgtcacatactttagtttagtatttattatgaaaaattattaaccaatggtataatgctacattgtggtggcgttaaatagtaaaagtgttttataactaagctcatgttttatattgttactttagaatgatgagagaaataatatataaagttctatgtacacacaaagatacacaattttgtattatcttaattcgtaaatcaatgaattatttcacaaattatgtgtggtattttaaaatataatttagttgaatcatatttacatgtccaagagagtgaaaaaaaattgcatcagaatatttccttggtaattatagtctcacacttggattttttgggcagatgtggatacgaattttgctatacctgtggagctgaatggaagaacaagaaaccaacttgtagatgtccaatttggaatgagcgcaacatcattcgacaaccgcaacgacaacgacaaagacaaagacggtgactagagcgatcccaactatgaatgggagaacatgcaggtctgtgatggatgatgtctctcattcatttgtgattttaagtgatgaagtaattaggcttctatgctcatcgactctactttagcttttcgatctatagactgctttgttattaagtagcttttcatacaaatttggctatttaaacgtgggaatggatgaacatgtgttctagctttgcagaaagtggttcttctagattttatgatattgtcttcttttgtgttatatccattcctgtcgttttctaattttatttaggaattttctttaggaaaagtatggtgagatggtattggagttttatatttaaatgaattagtgatgaattgagtagtttatatattattattaatttattaggatggtcactatttggaatttaccaattcacaaggagtatagagaaatgttaaaatgtattattggtgtctagtattttttgatattgctattaatgctagtcttatataattagtctataaattattgttaagatggtgaccattttggtttaccatttcacaaggagtataattagtctatatattattgttaagatggtcaccatctcattactattggtgcaagttttctataatttgatttaatttttagagtcattaactaattatagggcaacatttctagatggtactaaatatcattaatatctaataacaatgcttagaaatatactatggagtgtttggtatggagttttttttttgaaagaaatgaccaaatttatttttttttgaaaaatgatgaattttattaaatca

SEQ ID NO: 299112 - DNA, 4752 bp, Cannabis indica
atactaattagttttaattcatcaaatagactggtttgaatcttctcacaacaaacacgagtagtgaacaatcaatggtagatgatggtgtatcaaacgacgcagctgcagaggacaaaaagcccacaactgaggtatgtatatataaatataacatggattaagatttgatgtttaatatatgaataaagtattaattttgtatcatcaattcaataatttcagctggtggttcttcatactgagtttcaacgagtgaaatctgagaaccagcgattgaaaatcgcgcttgaccaagtgaccaacagctacaacgctctacagatgcagctatacataacgcaaactggaaataagtccgatgaaaaagtattagaagatggtaataataataataatgatcatgatgatgatcaaaatattaatcttacaaatggtactaatattaatgaaggaaaagtacagccagtgttgccgaggcgatttatggatcttgggcttgccaataatggagaggcagacgagacctcactgtcttcatcggaagaaagaagatcggaattggtgaaaaatggacacggcggagatgatcagatggaaaagaaggaagtcaaccgagcattaattgggagagaagatagtgatccagatcaatcgtctcaagctggttgggttccaaacaagttgcccagaacgacgtcgtctggctctgtcaaagattctgatcaaactgaagctactatgcgaaaggctcgagtttcagttcgagctcgatccgaggctccaatggtatatacacacgtcttatgtattatatctaaattaaattggaaattatattttctaattatatatttttttatgtgaatattttctaatttattatttattgaaattttagattgctgatggttgtcaatggcgtaaatacggccaaaaaatggcaaaggggaacccatgtcctcgagcttattatcgatgcaccatggctgctggctgcccagttcgaaagcaagtaagttaatttactttcgtttaggtaattttgactactgaccttattattatttactatatttagtaataaagtatatgatgatattttaaaattaagtcacttttgctttgtatagtaattaaagtgtacacacagaaaaaaaaaaaaaaaactttagtgacgctttttgtgctcttttaaaagaaataaattgaattactatttacaaattacaactttcattattaatttcattacgtggggaatcctaagctaagtattttgctaaaaaatagtgataaatttaaaaatgaaaaataaatagtctgcaaatcgcttttcttttcttcttttaacgttcagatttattattaatttgttcacacatcaaagtctccaaactgaaacattaattgactaaaacttaaatacaagttgttacaattataaatatattcattgactaaactacactacaattataaatgtgaaggtacaaagatgtgcagaagatcgaacgatcctggtgacaacatacgaaggcaatcacaaccatccattgccacctccggcgatggcgatggcgtcgacaacatcgtcagccgcaagaatgttgttatctggctccatgtctagctcagatggcataatgaactcaaactttctagcaagagccatgcttccttgctcctcaagcatggccactatatcagcctcagcaccatttcccactgttacattggacctcactcaatcccccaacccattacacctccaaaagccacctcaaccgccgcaattccacttagctttgcagcaaaacgcaagctcggccaccacagctgcagccgcagcattactgcctcaaatcttaggaggtcaggctatttacaacaaccaatccaaattctctggccttcaaatgtcctcacttggacaagaaaatagtttggctccaacaacggtggcagctcgtttattaggccaccactccttttcctcttcttccccgccacaaaactctttgagtgaaagtgtcaatgcagccaccgctgccattgccgccgatcccaattttacagctgctttagccgccgctatcacctccatcattagtgggactcattcgaataacgtgagtaacaacaataataacaataccaataataacggaaataatgtcaatgttaccaatagcaacagcagctagcttgtttgagcttagctagtatctatagtattatatatataccttaacgggagcttgccgatttttatttattttttcttctttattttgcttcattattttttgagagagaatttttcttttcttttctataaagaacaacaaaaaatatgtgaaaatatatagttttttttttcagttatttctccacatttgtggcaggacacagttggattaaacacaactgttttttttgttttcattctttcttgataataatgtaaccaagtgttgcagaagaagaaataggaaaaaatgaagaaagggaagtttatttaatatttatctagattattcaatgtgtattattaatgtttatcctacgagaaaaacgaatatatttatttatatggttttaattttttttaaaaatgcttaacctgctgtcatatctattataaatataacgaatggacaagtaattaattaattaattaaataatcataaacataccaaaattatatatatgaaagttgttttgtttggtttacatattatatatcaagttttgtttttttgtcaatgttttatacaatgttaaagactttaaatttcaaacatacatacatataagccggagaagaacagaacaaaaaaaaagagataaagttggagaaaaaacaaaaacgagtaatttagagaagaagaagtggattttattctatagttatagttacgtgcactgagtggtatagtcaaggctaaagaaaaggagtcaacaaaaccgtctgtgagagaagagtgatgagagggagaaagagaaagagttgttaaaagggtttggatttgtttgacacgtaaagaaagagatgtagtaattaataataagagatagaaagtgacttttcgcttgtcacatttgattgttcttaatactattttcttcttttttttttttttcttttctctcatgccaaagtttattagaccacctatatattatccaccgtccaagagtgggtaccttgatgcattatttactcgtgactacgtccattttttcatgccgtctacataattaatattccatatataattatactttctttgagtaaaagtcatatacttattattttattatataagataaatattattttggattttgtattttgtaaaagttattaattaaatttttattttgttaaatgataaaatagattttatattttctaaaatagtacaaatagattttatattttctaaaatagtacaaataaaatcatgaactgattttttgtcaaaataaaacttaataataatctgatctaaaaatgttatgacaaaattagttatatcttctatatatgttcgtattagaatttatcttaaagttaattatattagaaaataaaattgttgaaaattgagtcttacttttaccattttagaaaatataggatccattttattatttaaaaaataacatggtctaattagtaacctttgtaaaactctaaaatagtatttcccgtattgcatataagtagtgtctagtactattggttagcgatattttagcgatatttttaaaaattattttttaaattatataaaactatatacttaattacactaataccagtacattaaaaaaaatattaaacactaacctatggtactttttagcaattttctatacttgtagttcatcattaatttgaaataacaacatgactaataaattgcttaattaattatacatatatatagttctgatatagtatatacatgggtgcctctaagttctatctatctactgctactctttaattatctgtacatttttaattatatgtaatattgtatgtgtataatgtagtactggttataatttgacgacctttggagtagtcacgcgcgtaaatatacaagggtcattttgttatacaacatagaattttttttcttttttttttcttaattaaaatgcatatatagaaaacatatatttaaattccgtgtagcttactcaatagagacgagaattattaatatcatgatcatttctctgttatctacatgacgtgctcgaggtttttgagtctttaattttctttatatattcaacagagatgcaaggataactttatttatttcgttgtcctgtatagaaataacaagtataggtagatatttatggggttaataaataatagttaactgatatcaccaccttctatactcgaagatagagtaaccttgtatagaggaaacacaatgcctaattagctagctccattaattcgaatttatagttggcttagaataacctgtactttgtaaatgtatttctctggtttatcggctactgtagttgttgtaagcaggatgttaattaaagttgttagttaagtttataactatttcggttgtaacagtttgagctaagtttgtattgcctatttcttatttaagagacattcttctcctttgtaattaaatactattgatggtgagaactcgtcaactaatttgttggctggaaaactaaactatacttca

SEQ ID NO: 299113 - DNA, 1051 bp, Cannabis indica
gtgttaggaattatattcagaaaattaagacaattaaaataaatgaaataattgaaattcaacttaaaccatttgtcttttgataatcttttttatttgtgtcatgagtgttttaataaattgctatgcttaactaaccatagtcatatatatatattgaataatctataaatatataacatcaatcaacatatattttagtcttaaaaaaatgtgggttctctagtcccattactcctctagtataatttacaagattttggtgatctttacaaggtggccttaccttagcaagaaattaagtcatttggcattttggtatggtttttgttgggaaaaaaaaaactcagcaccaaaattcacacatggagcaaaattctgatgaaaaaaatattcaagaactaacataacacgagtggtaaatcaaagaataaaatgatcaaatgaaaatgctttaacaataaaataaaaagtgacacagatcattatatattgatttggcaccaataccatattagtcttctaggtcaaattatacatcttcatacaatttgattcaaatagagaaatttttgagttgagtataagttgatcaagaatctaccatatcgattgaaacttaaaacctagtaccaaacactcaaaatcaaaaaacttgaaatctaattttggtagcacttgaacttaatttttttaataatttttttgcaaccgagtttaccaagtttcagctaggcaagtgcactaagtgagtcgggttttcgagcctgaatgttcagtcatgatctctgtaattttggcaaatatataagacttgtttgggaaagttgatcttgacaagcttgcatagatgttacttcccagacaagcttttaatgggttacttaaataacatgacaagtttgaagaattaactgcacaatttttgtgtagcgtccccgcttcaatttgtcctcactcgcatgcttcctgggaaaacttcccaagaggttacccatcctgaaattatcccaggtcaagcacgattaactgtggagttctttcgtgatgg

SEQ ID NO: 299114 - DNA, 851 bp, Cannabis indica
aaaattttgtattcctatccccactttttagccagatttctctaaatttttgtttccaaatactctctctcctcttccaccattcctcgagttgtaattgtaatttagattcaagggattttaactcatcagagatctgttgattctgaatccaacaaatctttttctcaatctccttaatctacatctcacagtccccaaaattttttttcctccaaatttacagacttcttctagtagcattaaggttcttgaggataacactacctggattctcttccctgtctaaccacgattttagaatcacctctttataagaatcatcccttgtccaagcttcgaaaaacctgaaagggtaggcccccttgctcttgggttaaacggtagccccgtgatcagaaactgtgatgggaaaattaaacacacccgccccaagatagtcaattaccaattcgtgggaccataacaccttgtcgagtctttcacaaattaaagtaccaaagaatcttttattttgccaagtgaatcttcgtcccgaaaaacccagattgatgcttcccatgttgaacatgaaatcctcaagacttctggtatccttgctaccgatagagcctccccctctcttctcttcagggcacacaattgtatttaaatctccaataaagatccaagggagatcacaagcattaactctccgggttaatgactcccaaaaaaccttccttatcaccagcataacgggggccataagttgcaaaaatcacccaagacttactagtctccacatcccaaacaagaacttcaaaaaccttattcttgttgggttttgtgccctaataaaactcatttca

SEQ ID NO: 299115 - DNA, 1801 bp, Cannabis indica
ttttaccggcgcaataatgcgccggcaaaagtaaagcctaaatggaagtgagatttcagattttgttttatctcgacaacctttaccggcgcatttgacgaattgcgccggtaaaaatgccttttcttgtagtgttttcgtgtctccaactctacccttccaactcttagaaataaatttggccttttggaaaatagcgcactctcctacctgtgattggtgtggaacccatgttgagtctgtttctcatgctctattcttctgcaagagtgttcgaagagtctggaaaggtacgatattttatgattatattttttctgctcctcccactattacttttcatgatattgctcataccatatatgttaatttgacaaaggaggatgtagaatcctttctatgtgttgtttggctcatttggaataacaggaacagggctctcagaagacaacctcagaaccagactcatgctatagtgaatcttgcgaattattttttggcggaatacaaatcagcagcttcaactcaaaaccctcagacttatgcgagcagaaccccctcggccacttcttggacacctccagatcccaatcgcttaaaattgaatgtggacgctgcagttccaaaggattcatcaaaggttggctttggaggagtcattcaaaacagtgatggtttggtggtagcagcagtggcgtcatcttatgcagggggaggggacgtttctactctagaagctaaatctcttctcctctctctgcgtcggtgcatcgaagagagctttcccattcaatgtgtggaaacggattgtaaagctatctcggatgctctttcgcaccctagagaagatctttcgtcctttggcgacctaattaatcaaattagggcaactttgtctctcatccctgaggcctatgtctcacatgtaaaccggacagcaaatactttcgcacacaaactagcaacctgggctaaagggttagatgaagtagcaatttagattggtgataacccttgtaatcttaaggatttcctctttgtttaacgagctccatccctctcaaaaaaaaaaaaaaggaatgaaaattgataaattatttatgatgaaaaagtttaaagtatttttatactgtcgtataaaatattaattaagtactttaaatattggaatattaagtcaaatctctgcaggtagcttcaaataggatgaatttaaaagtaattatataattatcaattaggtactataattatatttataaagcatattaattacatgatattttaaagtataatgtatttggatatatgtggtaattacttataaatttttaactttttttaataaaataattaataattacacataaaattaataatttttagtacaaaaatatttttttttaatattaatattcaatagaagaatgtaattgagtctctttattatctttaattatactataattagatgattaaaaaaacacgtaaaactgtataattatctttaattatattataattcaattttaattctatcttaactttcccacacactctaaaaaaaaaattgaatttgtaattgattggaaatattttagaacgaattcgtctaacatacaatatataaactaaaatatggtgatgatgcaataaacgtgctaacaaggataacaggaacgagtacgttattgatgttattacgtgtaggggtgttcacaaagtatccgatccaatccaatccgcacgatccaatccaatccaatccgcaaaatgcggatatccgcacttgtgcggattg

SEQ ID NO: 299116 - DNA, 2040 bp, Cannabis indica
acataattattaatatttataacatattcatatttgtagggtttgattgaggctgtggcagccataccagaaggaacacaccgatattgttgttttcatatcgaaaataacatgataaaaaaatttggctcttcacaactaagaggcctattttgggcagcagctgagacaagaaattttgacaatttcaagcatataatggagaagataaaagaattcaacacagaagcacatgaatggctatcaaatattgactttgggcattggacaataagcaagtttgatactgaggtgaaggtagaacatattacaaataattttgttgaaagtttcaatgattggattgatgatcaccgatacaaacctcccattgaattgctagaaggcattagaatgcaacatacatctatgatgtatgcaaggaaagttactgctgaacgatgggatttcaagcttactccaaaggtccatcataagatacaagaactcctcaaaagagctcgacatgcacgtgttacaagagttgggaatgatgaatttcaagtggaatatgacacaaaaagttgcacagttcgcttgagtgaaggctactgtatatgtggccaatggcaagcgagaggaataccttgtttgcacgcagctgcttgcataaacaccacaagggctgatatatatctgattattgctcaccatactttacaactgaaatgtggaaaaaaagttttgagggtattatgcatcccatacctgatgaatctatctggcctgagtttaatgatgagaaattattaccacctcttgtaagaagaccaccagggcgacctaagaaacatcgcagaagacgagtagcaggagaagaaagaccattgccacatttactagaaaaacaaaaatgtaggaagggagtttctagtactaagaagtgcaagaactgtaaataatttggtcataacagcagaacatgcaataatccacaatctaaagatcctcaacaacaagttgctccaacaacacgcaaagccaaaggaaaaccaatttgtggagaaaaacaagttgcaccacaacaacaagaatttcaaggtcaatctaaaccacaagaaacaccaacaacaagcaacagtggaggtcgaggcacatgaatcggccaaggtagaggtagagcagaagcaatatcctttgaggaaaataattttagctttcaatgcttgattccaatttggttgtaatcctctactatggttatgcttataaacaaactgttatatttcaagtttcatctatagaggaaatgatatcacatgaagcatcatttaacagatatacaaccagcaacatcttttgaagcattgatgtttattaagttttatatcatcttttatagcaaaaaacttggaatgatatctcttaatattgatgtcatgctgttggttttattttgcaagtcaaagataatgctagtcctttttattaggtactaaggtcaaagacaatgttagttctatttttaaggtgccaaaagtacaaagaaaaattggaatctagcttagtgatatattttgattaaaacaaaacttttgatttagttacttattctgtcaatgatagatgaatgtcttttcttttcttttttgtcatttttctattggttttaattttgtaatgcaattgcaatccaagctaagacaagacaaagacttgtgttttatccagtcaattttataccattaagaaaaatctacattttataacccaaattttaaatgaatattctgcttatggcaatattagtgatgcaaagtacatagtttaaaattgcactatatttttctgcaaaactgaattacatcttgaatattaagaaagaaccaacatcactaaaagaacacttgtgcataaattctctaatagctagtttttggtatttttgccattaatctttggaggagctcgatcatctaaaaattctatagacttgaagttttttctgttagacatttatatgtataatataaaatatatgtatgtgtatataaaatgcgg

SEQ ID NO: 299117 - DNA, 2839 bp, Cannabis indica
taggataattttttagtgacttgtcattgccacatgggtaaaattaagatttaacgaggctggacagacgacaccttaaaaatgtaaacggaacagtactttggaaggttttctcaccaaaatatgaagttggatggttttttgcaagtaaattgatagttgaggggttttgccgcaaattactctttttattataatactaaaagaagttaaacgcggttatgttaactcgattaatatagaatagatgttacatattatttatttattatgcttatttaatttatatattatattattcattaataatatgcataattgcatcatattttgaaaaacatttacttacgtatttagtgtaagcgagagataaatttgaatgtaccagaaaaatagtggatcctttatttatttattacattatctcttattattcgcatatgactgttccaaaataaacatcaatatgatatctaaaagcagtgtagatggtcacttttagaaaaattgtagaataaaatggacgatcattctgggaaaagaaaaagattgcatattatatatgataatagtataatcgaggagaatcttctcttctttcctttcttggcttagcaaataagaatatatatacatatatatatgtaagtaaactgaagttttaaaatgaatttaaacaccacttatttagtaaactacgtacacacgtggttattcatgaaccatatttgtatacaataagctgcactggatttaatatataatgtacttatgcatgtatagaatcagaatttgaagaattaatttataattttgtgatgattcatcaattctccagttttgcattgtctagatgcacagcagcagtactcactcttatcaacattgtcagatttcttagtctaaatttcccaactctcttttggaactctcatttgtttgtgcttgagaactatattaatttctgggaacaataattaagacaaacgtatcagtttgtcatggttaacacccagaattaatcaatggtgggttggtgaaaattatatttatataattgttttaaagttaataaagcaatatttgattaaatgaataaaatagtgatcattactagcgatttatgtgttattgggggcctaccacaactagtaagtagttaaagatataaataatatatatatatatatgtttttagagatgaagagggtattcttttctggtcaactccatgacaaaatttcattattttatgttaattttgtcatttaactattatgtggtctctatctaatcccactttggctccacttctacaccgcacaagaaaagcaatccataacttttgcggcacaaacacataaatatatatatatatacataattattatatccacacgctttactgtatgatcatgttttggtacttacctttccagctttctatccataattcgaattggaatctaaacttacagccagagcaatttgttttgcttaaaataatttcattccgatgaaattaaagatgtggatgagtattgattccaatacatatatgcatataataagaccacaacaaatgaacacatttcattattattttattttatctttaaatatatattatatattcaaccttgattaattagttatatttatatcagtgtagcttttgattattttagtctttggtaagttttatcaatagcgggagtaaaaagaggccaacttaatttattattttatccactacgtacacatgattaatgttaataccttgctaagataacatttttatctttattttgaaagtgaaaagactagtggtttgtgacgtgaattaaaaagctctctagttaactttacttaatttaaaattaatcaatcaattatttatagagtataaaaagttgatattaagcaatattatcattaactatgcgtctacttattaactgcttccgttatataaagagcaaatagtcaaatactagctatacatacataaataaatcgagatataggttgtatatataagtgatatttggcattaataaagttacactaggtaggtttctgaggtagaaattaatattattataatttgcaggggtcattccttaattatttgttatatgttcatcgttataataaaaatcagctatatatctttgctgcttcccttttggtctgtgtacgtagtctccttatcagttgatgtatcgcatggactaaggaacggttgagagaaagaatcctatccaattatttttcgtggtcgggataatattaattaattatttatgttaacaaataataattgaagttaccatttcaaaatttaaagaagtgatattcatgttgtttgtttcgatagtgtttttgtagctaaatgtttaagtatttataaccttataagaggatgaagggtcaaagaatcatttagccgcggggataacgtataagctggtgttgaatgatttgttttatagtccaaggagaaaatgacccacaatattatatcatactcggttgtaacaattttcattttggcacgtgcgctgcactgtcagaaaaacaagacaaaagctaagatgtatttattgaaaatattacataatattccaatgtttctttaacaaattacattccaatatctttctctttttgtttttcaattgaaaaatataacatttcaatgctgccattattatcttttccaatgcaccactaaaaattgtgaccaaattttactggtgacgcatttccaaaaatctagctcttttgtagataaattgttatattattttataatataataaagtatagattaaaa

SEQ ID NO: 299118 - DNA, 5127 bp, Cannabis indica
taaacttccatgttccttcctagcatgtttttaaacacccagttggctaaccgttggtaggttgctctcacatttttaagcttgaagggcatgacaaggtaatagtgtactcttttgtcagtatagaaactagtgcattcctaattagccacatgcattttgatttgctagcaactcatagctagatgtagcatctaccatgtgatcaattcttgggagtgagaagtaatctttggggcaagctttgttcagatccatgaaacatatgcacattctccatgtcccatttggcttaggtatcagcaccagattagccaaccactttaggttatagacatctcgaataaagatgttggacaacattatatccaccttttacttcaatgcttcagatttgatagggttgaggggacgatttttctgctacactgctggcatgtctttgttgaaattcaaaacatgggtaattacgtgtggacctatgttggtcatgtctccgtgagtccaagaaaagatatctgcagactctttaatggtttccacaattttatttctttcttcaggattgaggcccttcccaactcgaattactttggttggatcttgaccgcagatttgaatcttttctacctcttccatgggctaaaggatggcctcagctcccacctgggggtctaattcatcctaaacctttggtggattccctccttttacgggttggacgataaggacagctaatttgcaagccacattgtatcaaattcttgcttccccttggttccctcgaacagttcctactctggtagagtgggtagggaatttaagacaataatgcctagttgaggttatggctccaaaatccaccagtgccggacgtcccattattgtgttgtaagttttttggatagtctaccacaacaaaggtgcagtacttgaacctacttggaggagaatccatgcacatggtcattaagagcctaatttttcccatggggatgagggaatttccattgaatctggtaattgatgaaccaataggtgacaagtcttggtccatgaggccaatggcaaggaaggcctctctgaacagtatgtttactgaactcccattatccaccaaaatttatgctactatcttgttggcgatgggagtttcaattaccaccaggtcgtggtatgggaaactcaccatcttggcatcttcctcggtaaatattatgggttaatccatgagatgaggtctctgagctagcatttggtatacttcccatacttctttgtcatggtccagggcattagcataccttttaagctcattactagatgaacccctgatatgagggcctccagaaatcatagccattctctcgttcgatctataggctgtcctggcaaagcctcttagttttgaggaagagctccctgaggggcttgcacttcaggagcttatgccacgcctccgagcggtagctgaatcctgacctatccttcccttatacgaggtaaccagtttttcacccactcatacaagtggcctagccgtatcaggctttcaatctcctcttttaggtttttgcacttgttagtagtgttcccaatgtcattgtggtactcacatactttatttgggtcctttcgggagttgtctcgatataaaggaggcggtctccgatagtgaacattttgctttgtggccaaatacacacgctcttgtgtattcaccagatcagtatattgagtgtactaggaattgtacctggtcctttttggttttttactatcattttgggtgctcctttcggatgaccgcttactcctcgaggcttctagagctgcaactgcacttgccaccaatggcgcagactgagcaagatattgcatgcacaatctgagagtgaaagcccttgttggcggcccataatcgaagtgggttggtgccacgacaaaatttggagagtatcttagtgtttcctggatatgcacgcttggcatgctactcatttgaggagtggcagcaggtgtgatccctaggaattgtactctggatgcgtacctagggccttcgattgatagtatcctccaaaagtgattatttgggcctcttccaaattaatatacttctgagctctcttttggaaatcctgcaggctggttgtaccttcctattgtaacttattccagaaaggggttcccatccgaattccagcttgcaataaagctaactgttgtctgtcatctaccttcttagttttagaagcctcctctttgaacctcttgatgaagttcttcaaggttttcattagtaattatttcatgttggttagggcactaacttcaaggtttatctttctggccacaataaacaggcttctaaagatgatcagtaacttattccaacaatccacgaattcgggttctaacttcctgaaccattcttccacagatcttgccaacatcaatgggaaacacaaacatttagcatcattgctaatcctgattaccatcatatttctgttaaatctggataaatgatcacttgggttagagtcgcccgtatatagagtcatttcaagcattttaaagttctttgggagctcagtttctagtatatttctcgtgcaaggctcccgatcttcacaatctgactctgagtcatttcccttctgcctttgagagaccctcgctatgtctttcctgagaattgaaagttcagccagaattccttcatttaaggtgctctcagaagctggtgcaattttcttcctttgatcaaggcgtgttctcaaatctctgtgtttggcattgagcttgtgtcttagattgactcggggatcccttctggcagagccctttggttttcctggctcttgatgcacaaacacgctcctccgatctcctcgatcctagaggctagtatttcccttaggaaatctaccccctacgaacctttccctttcgagagatcaaaacaaactgcctgtggatccttagccttttaatttcttttggggatagccgtagggttctccttcgtggtaggttttcctggaggatatctgatgggactaggttccctatgcttttatatttgaccctcattgggctaagatggttccgtctcagtcccttttcgtacagacgcatttgcagctaagtccacttggatgcctgcattttccattgcccttttcataacaatcaatatctcttgcatcctcttattttgctccttttgttctgccaactcaacctcgttgtcgacaaccttttatcttagtgcaactaactctgtatagttttcttcgttgtagtcttcatattcttcttagtcagaatattatggatcattagtgtctccttcttcagcattcaccctagatgccacattttcctcctctggatcctttaggtaatctaggtgttgtgggcgtgaagtgtttctagtttttactattatgttaccatgctacttatgacttcctattgctcttaataaaagtaccaaaatattggccgaagtttttggcaactagtaattagaccagtatgaagtaattaatgaatgttataaaagatgatttttacatggttggtacattaatgagtcttagtccacgagtcattatattaatgagagtgtttattacagagaattttctgatcgatccccatttctatttatcattgaggtattttataggctcatgatggtggtaaaaggccactattatcgtgtttatttacaccatacttgacacaatttcaaactcttatttagggtataattgcctattttatgatgggttttaggctatctgtaagtgtttggtgtatgacttgatgactcatttatgtagccgtcgattgatgaatgggggctcgttaaatcagggaataattggcttaaaccattaaacacgcttgtcagagtaaaacgtctgatgttcttttccatgccgcattaaatgcatatttagtgtcttgatccttgagtgacatgtcatcttttattagtcctcccgtaccatcctccggatatacttcatttgcagagaggagcgaacgagagattctcgcgatccagctagatcctcccggagatgactaacctgttattactcatttgaaatgatggactttgggagtaattaaagcaacatgtcctgtaacgtgagtcccattgccacttggctttctcccaaactgctacgtattttcgaagaaatcccaaacaacagtaactttaatagagaatggaacaagttaaaaaaaaaagaggtgataaactaaccacattattcaatacacttttgtattatatatattatttcaaaaaaaatcagcaaaaaaaaaaagtagtaaatttaattttagatgaaataacatagcataaaaataatgtaaaataacaataaggaataatgttataagaataggtgaacgaattcttactttttgttgattattctgtttttgagtggatgatatgggtgtttttagtagatttgtattgtaattactaaccacaaacttaaaagataaaaaataaaaaataaataaaaaaataggagagaggctaaaagagaaaaaatgagatcagtaaaaacatagttttaggctatttatagttgtgtttagtatatttgttttcaatatttagtaaaaactagtagagaaaacacttgctgcacgtgcgttatataattaaaacagaatatattatttaaagttaattaatttgattataatatattttaaaatagataatttatagaatatgattcatcttatataaaaaaatctttcattattctaaaatgagaaaagaagacttaaatttttgtaaaaataatattaaactaattttatttaaacatctaaatgatttttaataaattaaatgattaacgaagcagtttttataaatcttatatataaatttgtaaaaacttaatattttttttagtattattaaaaaaaatgtatagaattaaaatttaaacatgtacattttagtaaaaaaaaggtaatttgtaattcccccccccccccgaactatgacacttgttatatcgtcgaccctccgaaacttatttttgacgttaaaaattcccctcaaactattga

SEQ ID NO: 299119 - DNA, 1039 bp, Cannabis indica
cttaatgggcttccatggatgcccactatgtagattgggtttggaatgatttttttgtttctacaaaactaagtgttaaatcatatttttttttttaaaaaaaaaaaagaaagaaaaatctattaaaaaattggcaacctaacaagtttgggtgaagttttctcaaaataatgttcttatctttgtttttattcaaatttacaattttaattcatatatcattatcttaataaaagtattaaaaaagtttcacataggatttgaacactaaacatattagaacactattaattctatttaaatagtgagttttaaataaaattaattttgatagtttgcaaaacaaaaaaaattcatttgaatattaaacatgaacctaaaattgcatttagctaaaattcaaaaactaaaataaaaattcagaatttggtaacaaagtgaggatagaaaaaaattatgtccaagtcaatatataacactatgtgtggtgtaaaatggtagagagtggtagcacacaagtggagtaattgagtaattggagtgtgatagggcctcaaacacaacaatatttttaaccaatcatatttggttaaaaggagacccacaatttaaaaaagtaataatgtcacccttgtaatattttgtatgtgcaaaaaaaaaaaaagatgtggtgtgaaatggtagagtagtagtagtactaactaattgtatgctaaaagaacaaagtcttgtataactaagttcaattcattcataaaacttaagctagatacatgaagcatgcatgagacactactctcactcataaatatagccaagttcattttatcagacaaaaaatttgcctctttgtttttattatggattttgggaaacaccaaatattcttgggtcctctttactattctttttggccattgggctcacattagggcccaattaatttaggggatattggttgggcctttttcatcaaagtttagttctttaataagttactaaaatagcaaacacctatttcatcaaaaaaaaaaaaaga

SEQ ID NO: 299120 - DNA, 8130 bp, Cannabis indica
tattaatgcattatattatattatatttattttatttttttttttttgcataaaattgtattatataatttgtttggattattttaaatttgtttagaaacgagaacatgaatattgtatctacaatatttgagaaatcagatcgatctacacatttaattttacatgaaataagaaaaacaaaattgaatcaatttaacaactgagacagtttacactacttccactagtactataaatactatctatctatctctctctctacattattttttttcattttcttccaagtataattctgatcaaatatggacacgacacccacaaacagattaattgtgcatcaagatctgggcaaagcttttttctaattgcaatagctcatcggttttcttcaaaagacagtagtttataatattactagctaatgataagctttctatatatttttatatataaaattatggaagaaaaattacaaaacttagctgttgttgagcccagcattttttattggtttcatatacctcactgtcgtacctttttaatccctaaagctatatagctaactaaactgacacattaaaaatatattcttctttcgtggtttcgaaatttaataaataaagaaaaaagtaaaacccaactttttccttcatctcaatcatcactctcctcaacatcaatttttctgtttgttttttataacattttacttgtagggatttgagagagagggagagatcgatcccataagaagcccagattttgtatatgtcaaaaaagaaaattatctctctcagttgttgttctgtcgtagccaattggagaagttttgtagtgtctttacgtcagctctgtaatgcttctgagtgaactcaagaaacataggccaagtgaaatccgggtaaacacgagggtttgaatggtccactaactcacctggtggacttaccactttatcattccctggacataaaaagaatgccagagattttcttgactcttcgctattaaccactgctcggtgcaaacaacttttgtatcttccattcgaaagagccttcataaagttttaacaacaaaaaattaattaataacttgacaaaaagtgaatatatttctaaagcaataacaataaaaatacattactacatgtttaaaaagaagtaagttagatatttagttaccgtgaaggtgtcaccgatgttaacaacaaaggcgttgaaatttggagcaatgatatgccattcgtcgtccacgaatacttggagtcctcccacttggtcttggtggagaatggttagagatgttggatcacaatgaggtccggttcctaatgtaagatcgggttttcggcatggagggtagtaattgagtctcattatagaatcgttatcttcgaaaaattccttgaaatgagctttgcctacaccaaggcttattcccagaagttccatgattccaagagaaagcttactcatggcatcgcagtaatcctggtacaccttcctgattaaaacaaagtaaacataacagatgagtttctaaacataacaaataaatatgaaaaacagagtagcagtgtttgttttgtgtttttcctagtcgtaccccaattgttcgaactcttctcccattttgtttcggagatagtcttggacgatgttgttggagtttttgttagcggagtagtgaaaagaaagcgtttctttccatgggagtttcgaagagaaacgaccggtgaaactgctggagtagccacagtgttcccctagtttcctctgtgctctctgctttttctggagtggcaattggaagaattcattcatgtagcggtgagcatcagaaacgagcttggaatcgacgccatgattgacaaccaggaagaatccatgcttttcacaagcctcgccaacaaggcgcgaggcctccattgctgctgccgggtccccagacaaaaagctccccaagtttatgagcggtacatggagctctggagcattggcacagggcttctcctcgtctggccatatgaattgggtgggtatgctcgactggtttcgaagtaccgaagcatcaaaaactagctgcttcgtatgatcgtcgtgttgctcatctattttcgaaacatgacgaggcatggatgatttgcttgtggtagtcatggtacttatacaatcaatagccattattgcatttaatggcaatactcttatgtatttttttttcctcctacttttgtttttagtcttgtttttcttttttctggtgctacaattttctttaaaaaaatagataaaagaagctatgaggtcgtgagggggaaaaaagaaatatttaacgggggtgaaagagaaggagagagattttgagtgagctatatttttagtagagagaaaagggaagaaggagggagtagcataagtttgagaggtatgatgaaagaaaagccaaggccgttcattgggaggatgagtgaacaaaaattggaatcttataactctctctctctctcttaaattaaaaattgttttgcaaataagggctacaaataatgagtatatacacaacgaggggctttggaaatagagaaattaaaatttggaaccatcttaaggagtatttgtcttttctattgttgacaggaaagcgttcccaatgttatttgtcatctcatgggaagagggaatgatatcgtcacgcactacagattcaatatatttcattatactaattggacaaacaaatttcagtgtctaaatataggccacctggaatcacctccgagtgaaatttttttcattttaaagatattttgctctataatttttaatgctatatggaaagttttgtgaaaagctagcctaataaaataatatgattccccacatccttgttttatatcaatgttaaggctcaacataccagtactctcaaaattggaaaagcagtacaaaggattctctacaagagagatagagaaatgcaaaatgttatgtttgagcaagggttttgctatcaagggtcttgtatttggctctgttttagtggacaaaagtactagtactgagtaggtttttctctagtagaaatgtatgattgtgagtcctactcatggatgcaaaaaaagagacaaagtgacatacgtatatgcatctgtttggattaatatataagatattatatcctgaaggatctaaatgtgacagaaactgaaagagcttgcgctttttatgtcgagtaattatatgattttcatgaccaaaataagaaaagctgcctaaacgctaatgactagctgctgggttctgttacgtctattttcattatatcaccactactattgtttatggctttgcagatatagcatttgttggttcttttactttttatttagtacataaaaaagctaagagaattttgtcaagttaagtgtggggagtaataaaaattagaaatcaattcagagaatgaacctttaattagatcacgatttataatcatctatataattgtttttggtcctcttaagaatcagctaggaaaatgaataaacaaacaatagatacatatatacatatatttatatatatgaattaactaatacatgcgttattagcatgtgctctcgaaatagatatgttgtgattgtatctaccttttttatttagatctgacgcaaatataaccggagtatgcattaactagaagaatatatttctctatctcggaagccaatcgtatttggtcaagtaaacttgctatgttagaagaaattaatgaagccaattatgtactaattgacagtatattaggccttaaataaacagtgtaaatgggtaatcgtagggggagtaggctgcaattgagcattatatataggagaggggtatagaaattgtatgagattcagcattgcctctcgggagagttgaggtctctcgagcacctcgtgtttcattgttttctttgcatttttattcagctattatacaatatcaaatgtaccaattactgtttatctactttttcctttctgtttggtgccctattttctagaagcattctgttttgacttggctgggtagcattgtggtattagggtacccggtcttggggactctacaatggcgtatcattgaggatcactatggttggattgttaacattgaggaatatttctacgatcatatcatcgaaccaaagaaggcgaaagtagcagttgttgaagaaagtttggagggtgcttctctacgattgttttagtcggtagacgaaaaagatccaatcaaaaactggatggaattccacatcacactgtttagttggtgtgttagacccttgatgcgtttcacctatgctaggagaagtaaattgtttcaatagaattaattggctgggttgtcaatttttttagtctaattattgtgtgtttattgttttggctttttttgaatggaaatttttgcattaaaattaactatcaaacaagataacaagtgagttggaacatcttctaaacatgatataatataaaagctctaacaaagttatgagccaccatattaactgatcatttaacaaaaacaatagaaatatttcacaaaagggaaagtaaacttttacaatcattaatcacttgtccaaacaccaaaaaatcatattagcggaactccgcaaagcctgcacaatggtcaaacaatctgtttctataatcactcgttgccattgacgctttttgatccagcttagagcgtcgcgaaatcccaacttcagcaagttctggggtggccgccaaattatgaagggttgtggaaccttcaagaagtaagcctctagaaacacgagccacaaagctaaggccgaacttgcaaccttcataaaaaaaagagacatcaatattgaccttatactattcaacgatggtgacgtccattgttccactccatctcccaactgaaacttagaccaagatgactcaatctctgagttttgaaaatttcttcattgatgaacgtacctttctgctaatgatagtattctatcagtccttgtcgccttcttttgtccgacccaatcattcctcgcatttcaaagggcccaacagatggccacaattaagcatttcttatccaaattaatccacaagctgaaagcaagaaatacaccagtcaagaaatgtaaagtctagttgtaaatcagtaccaattctttctctttcccaacaggaagcggcacaagtacaagaaattaaagcatgcaaaatagtctcttcctccacattacaaacatggcacagagaactgacgtctactctcttggtttgaagctgaaccattattggaagacattccctgccagcctggcacaataaatttttcatctttggtggaattttaaagcccaaagcttcttccaatttttttttactattgtatcctctgaatcccaagttcctttcaatgcttgaagcagcttgtatgcactcttaacattgtaattgccaaaattttttttactccaccaagatggtaagatctttaagcgatctgaagaggtatctttctatttaactctttatctctttagtcaaacaagtcttcaagaatgtcattgtcccaataaatcccctcacaacaagcgaatttacacaccttggcattagttaaactcagacgtgaagagagaatagaaggattattgaagttaggcagccagtgttccccaaccaccgagataattaagagaacaatccccaacaaaccactgagcccccttagccccctcttctttttttctccataaaaaagccaacccacctgattgcccacaagagtcaaccgcaaaaacaccatcaaagcccaacaaatgggctatacccatccaccttctttttattatgctttatttcacacaaaaaatagaattgagtctctcttcagaaaaaatctcacataagaattgaatagcccgttggttcccaagcccctacaattccaacttaaaacatttataatgattggcgggcttggacaccaatacccgccccacaaaagtttttaaaccttcaataaaactatctttttctaatgccccgttattgttaacaatttttgtaagatcatgtatgccatttcaacttaggcccatttgcattttagcatcagctccaggcccaatggacttattactatcaagtcttttccttttattttctataaagaaaatccatcgctcgaaactttttcatttgcccccaaaaagaataattcttctccaactgtatccactctttgcatcaatcttgagttagaattcagtctacgtcctcccaaattaatttccttaaattgtgcaacatgatttattccttccatggacatggatgttgagctatcacctggaaatgtctgagcacctcctttaattgtgactcccaaacgtagctatttttctcccattgaataatttcttctttgtggtaccgctttcaactctatattgtattgttaaactatttgttcccatggggtatcaaataatcttttgcaaaaccactctatatggtcaagaatccgacaaataaaatagattgtggtaaggtcctcgtacttaaaactcaaatacacatcaggcctcctttcatctctaatttcattttgcgttttaatggggcatccacacaaatcttcagaaaaatgcctaaataatcacgccaaaaccctaaaaagctatttgtatctgatttgacaaaagttccaacacagtttcaaattcccttgaccatatgtgaggacatgaatcttactgtcaaatcgttgagttgaattcacatctcaaaacgattaagaggaacaagtaggggatttttccttgtttgagtctttcaaatatcaaaggcaccctatcaaacgtccatgggctacctttaatgaccctctttatatcaacttcattataaaactacaatgtatagttatgtagatctaattccttcatgtaaactcctctacctggttgccgaagcaatgccattttgtgttgcattgcttgaaagtcgatacatcgattcgtgaaaaacatcccacaaaacaccacctatcatcaatctcagaatcctcaaccagtgcatcaaacaattgatacatgttatcttcaccgtcaatcgtaacagtggcatactatgcctccatattcgctactagtacttgatgcgaagccatcaaaacaagtcataaaacaaacaagacaaacacaaaaacactcagagaaaacaattaaacgatgtcaaaagacaagacactatgttagatttttttacttttggtttgacatgtaagtgttatatatttttcttgagtggtttactatgtttatggttagtctgcttattgatttaaacatcaaatggtgagaccccaagctctcaaaacctgtcagaattatggtagcttgtttgtttaatatcaatatcaaatttcccttcaaggtcagatcaatttattctaatacttacaataacactactataactgtggcttttagtgacattatttagtgactcactcttttgtgcgcgtcacgaaagtgttaggattgatttttagtgacctgcataattagactctatatttttgatgttagtctcttgtaatgtaggtcactaaaaatatgaaaggtcaccaaataggagtacctataattttctattttttttttcatttaaaaaatgccaacctatagagtcaaccaggactgactaggaaagcgtgtcccaaccttcctagcacctcactataggtgtttttaaagaggatatagtgacgcgatatgcatattgggatacatatactcagtcatagttaacacgtcactgtaggttaataaaaaaacaatatatatatgttgggttttatgccctaaataaaactcatttcaatataatcagatttacttattaatatagatcagaagtaacatttaatgttgcatggttcacatgatttatttcatgattatatgcacataatgtatgaattcatttgaaacccttttcacatacttgatcctgtttattgtgctgttaacacattggaaagtaaacatgactatgtgaataaatttttc

SEQ ID NO: 299121 - DNA, 1587 bp, Cannabis indica
aaaaaaatgtgtaatttcaaaagaaaaatatttattttgggctcctgggctaggtgagccctaagcacaggcctagctcgcctatgcccagggcctggcctggttctatctcaaaactaatcggtattgagagtggagtagctcctatttttatatatgactccatacttttacatgtaatttatgtgagataatattttcatcacgaaattaaattgtactaacaataatataatatgatagttaaaaaggagaaaaacaaaaatttataatatttgcttctgattcatgattaggggaagctggaggtgtaaaatcttaccagcttctcaagtcaaaagcttttcatcagagttaaaaacagttacttgtatatgacacacgtgtgatattataacacgtggcggcacaagttttctcacacagcagagacagagagaaagagaagtgaaaattgtttgtattaagtcaaatgtgtagagagatcaaaagaaaagataaacaactttaacaaaaacaaaagcatattaaaagatattgagcatcatcagtacagattttatgtgatgatgctaactctcttctacttaaaacacaaaccattttattattattacattcacaaaacaaaaaactaactaaaacttataaaacaacaaaaaaaaaaaaacacataacaaaagaacagacaaacaaacaaaaaaaggtaatgattaaagaaatatagccgtgaaaagactcataatgaatgagtccattgccgttttgtgacttgccggtttggtaaagctttaaaagccatagaaaccttttgctttgaaaattgaaagtgagttcttcttcttctttgataccctgcaaaagctaaattggcctcaaaactcagacaaactgttgaaatctcgataggaaagtgaggcttgagctgagtcttctcctctttccatcttcaagtgctgtactgaaaaccccattagtggatttatttttttcatcctgaaaactgattccattcccatacctatcagattcaagaatcaaagatctgattcttgaatctgataggttggtttttggtatatacaaacacaccaatgggctattgatacagctagtggagatattactctttggctcttgccctttatatagagagagttgatgatttttatcaataaagttttgtaatagagaattttcttttcttttgataagtcatcagttcattatctaatatgtatgactcatgaccctttatttgctttaaattttcaccaccaaaagttgtaagcaataaggcaaagagcaatagctccaaaaagatttgaacttggttatttactatcatacccttcacctaattttcaaagattttaaatttaagctattcaaatataatcatgaacaagaacaaattttgttttgttaatttgaatcataattcaattaaactagttctattggcttaagggtcttatgttagagtatacgaagtacatgatttttatttggaaaacttacaaaatattagaatttgagttaacttttacaaaaatactatcatacaaaaatcttttcaaaaatatt

SEQ ID NO: 299122 - DNA, 2512 bp, Cannabis indica
tggattctctgctaagcttactccagaccaggtcgcccagatttcaagtaagtcacttttcccatttgtagacactattttttccttgatcaattgatagaaagaaaagaaaaaccaaattgagtttatgtgtgcacctcctttaccttatttcaatattttggtatactttgtaataggtgatcttatgcttaattttctatgtatttttatcatctacctaatcatttatgatcttggatagtgtggaaacttttgacctttaagggtaatttaacttgttgacctggaaattccattcaaagacagggtttctgtcttgtttccagttttagtgaagaagaggaaggtgatttcattgtgttcctggggcgtttcagtatgcactgagtctgtctcaatatttctacacatgaatgaaaggattttgatttagtgtggattggttataatttgaattcgacagctcattttcaataaaaaaagaccagatttatgcatctgttttagtattgttattatctggattctggagtggttttacgacggagttttattaggaaaaattagcattaataataaaatttaacaatttagacaaatgtgaaaatagaaaacgggagaaaaggagagaaaggctagagttatggtgggtaaatagagaatttaacagtggaatgataagtaaatttgtttatcatacctaataaatttacgagtaggtcggtcatgaacatatcgcatttgtctctttttgaaaaagtcaatttgattataatcaattttcttcttcatcccactgtaaaatttgtaaagtgctttttctgagaaaatattcagtacagaatactggtattattaaacttttgccactcgtaactattgataaagtagacctgagtgtagatattatagacaactgaatagttttccttataagattatggggacagagtgaagctttccttcaactctcacacagggcggatttgatgaaatgaatgaattactattaacgaattactatttgctagtcttctagacttctcttctttcctcaccagtctctatgtattttccctcatttgaactgttctttctagcacacaatttggtagaagaagttcctgtagggtttattttggtgaggcggtccctttaggttgcgtctagttgggcttttttgtatttggttaccgctttatctctttagaagtacatgtgaggggctgtgttctattcattgtgcagtatcaataattttttaagttggttttgtggttggatagaaacagtaggaaattcagttgataatttattaagatgatttagtctttttcttttttctttttgataaatttaattatgttcatattaaaaatagcaggagaagcattttatttatgagtaataataatgaagatagtgaagattggttggtagttataatttagttatattttctttttggcagagcaaccaggtgtccttcaagttgtcccaaacaggaaaatggaactgcattcaggtaaagggatgttgcactgaaaaaagaacttccatggtgtaagaaagcaagttatatatatgaggctcctagtataatgagtttaatcttcacttttaatgggggctgtaatttaaatatattactatatgtgtatgtgtatgtgtggattcgattaattatggcatttaatcttacatcttgaataataattaaatgagttgtttagccaaggttcttttggttacttgagcagtctcaactggtattgtacatttgggttgtgcctttcggcacagcacgaaaccggtattagttcaagagttgtgagtatgacacacgacataaaaaaatatatacaaagaaatattttggttacgacacgagaaatatgagtttaactattatacgagacggtaattgtgaatgtactacacaaaatcataaatatgtatacacaaaattattaacataaaattatcacatacgaatttaatttataaatatatattttaaaatttatatagttaaaagtattgacctcgcttttagccaacaacaatgaatctatttataagcgataagtgatttatagtaacaaatatatgataaaacaatataaagacacatgaattttatagaggttcagttcggtaatagcctaatcctcgcttaagatcatgaaagtaaatcattactatgactctgagaccagttgttggaaatattttactaggatctagatttgctaacaagtatgtttaattaagatcctaatatgaatttctaaaacaatgaaataaacacgtataaagtttaagaaaccttacattgggtgtagtggaatataatgactccttccgttcagatctgaagcccttgattcctttctgtagtagagcattaccaagatctgaacctgaatctctttctctcattccatgagcccgattctctttcttgttgattggattcttcacagtcttccacactatgattgagata

SEQ ID NO: 299123 - DNA, 6441 bp, Cannabis indica
tatatatatatattatattacacttaacatcataacctaattattgtctatcaacatttaatctaatacatctcatcttgcaaattaaattagattgaattaagtgaaacttttctccaatttttttgtttggttagattttttccatatattatttcggttgatttttattcttctttggtttgataattagcttggttaagacttgagaggacaatggcgaaaggtttgatatgggcgacggcggaggatttggcccggaacaagggacgtgttctgtctctgtatcgtcaaatattgcgaagcctcaactcgccggagctgccacttacttgggccgcacggttgtcgaagaaggcggaggctcgatccatattcttagtggcttcggaagagcgatcactccacaatattgccgatcttattgatgtacctgagcacactctttctctcctaagaaaaggccaaattcctaaactccccttaatatgagcgccttctttatacttacttgtaagtcttattttcttctgactataattttgttgggttttcattgattttggtgcgtaaggactgtttaggaatcaattacacagacgggttgtacttgaagtttgtaaagtgtaaattttagggagaaaatgtggtaatggaaggcaattctttattaaacaatgtgcagagattgaagtttcgttcttgacatcaaactttatttgggtatatttgttgtgttaatttagcataatcatcgaaagatatgtttggaaaactttcatgggagagtcatatactcttattattattattttgttatggatggtgtgtttgctcataataaattgaattaaatttaggcttatgcaccatattatgttgtgtgttaactatgaatcaaatcaatgataatgttacttgatttgctttattaggagaggtttctaaataatattttactgtacatgagctatatgttctctataacctattctgccttacgttcaatgtggttgtaatttacttaagcttgaaacactaatatattgtcaaattattctgtcttaatttcttgccaagatagaaacatggattggctcctctgaattttatttattcatttttgctggataggtatctctttgtctttcctccttgtcgggggagctactttcagtgcattgagtttaggagcttgcttttttttggggtgtaaaatgagacaataaggaaggtatttgtgtattttgattgtaagccgagtaaaatgtaatgaaaaactgctttataaaatgtattaacagtggatacttccatttttgtagattttacagagatttacttttttttttttgaaaaaaaaaacaatacatatattttcttacaaagcacttgagtgcaagatccatattgtatttgttgattttatccgtactggactttcttatttttcacttcataccttaagtggaagatcacttgagctttgatagtatgtatggttttcagaactttgacaaacatatgaatcacatcacatcactttactgacattgtaagttactaacataatcgcattcattttaattcttgaaatcatgttctccaagccacacacactatcaagccctcttatgtttactgtcatagtactgtattatatagagcagccaacctgcaacatgagagaaatcaagagacttccacaataaggcccatttcgtgccccctcaactgcttcaatcgaagaagtggctttcagacatctgcattgcctaagtgatcaccaaagcaacagtaacaaatttatcatccaaaccaggtggcttgcatggtttccgaagaaggaataaactgtctgaaggaacaatatagaattgctgaatgataagctgcagaatttgtcatagtatctgtcatcaatgttttatatatccaaccaaagttcttggacacagagacaaccggttgatcttcttatgcagattttttttttacaggacacctcaacaaacaacaatctgaactgcagcataggtggtgttggattttagtcaaagtcatgagctgcatgaagtaccaattggagtcttcaacagcaagaggcaataagttagagtttttaacatcatgaaagcagttgtcatgtgatttgtgcttttcgggcattagcagcctccatgtaatgtgttcctttactgctccttttagcactatgagtctatgatgattcactaaggaaatttctagtacacgttgaggcatttcacattcctaaaccattgctacattgctgttcttgttgattttccatgaaatcacccaagatcacaaagaaataattttattcttcatattctggactgcttgataagtagatgaagcgacatatttcatatatgctcaagaaaaggagggtgtgtaaagggtacgtggttaatgggctaaaatcgcaagcatcacaaatttgatactttacactaatgtggttgcattttatcattctttaacttaattataaaactgatatccccttgtaatagaaggcattcttgagtgttgtatttaacaagagatgccattgaaaataacggtttcaatatttcccacaagtagtcttttgtagttgttgagacgggtgaacactaagatgaactagaccagccaatatgcccaaggttaccattaccatttaccaatacatcacaatgagaagcaatttctcctagaacaaaatgatcaaaaccttttcatgtagtaaggtgtcatggaaattttgttcatgcatgcatcctttgttcataaaagaaaagaaaagaaagatatagattgagcttcaagtctaggccagctctctttggaagccttagcatagagatgaaaattattctcatagaaaataagccaaacttcaagtgttcctcaagtgttagtagcattaagagatcacaacacaagtatactaataaccataacctctacttataatatgtatgttcccccaattgtcagaatgaggtctaaaaccatcattcctacaaccaaaggtttattatatctattaataagtctctcagtctaccaacttcatattaaactgtaacatatatattataaagtgataacatcttagattgtcaaatagctaatagctatttgtaggtggaagtggaagaatgactccaaattgcctatccagaacatccatgagtttgttggcaatggcacttgcatacaaagaagagccttcatatatctgcaacacacaccaagatcatcatcatcaccaaccaaccaactctagaagacaaagtcaaattgtaaagatagataataagaaaaataggtcagtagagtagaaccaactaaccttggtgttgaacaagaagctgtaagtgtctcccacatgtccaccagcgacatggcgaagatcaagctgaagctcatcaagaactcttgaggcagtgagcaagaggttgatcttcttcctctggacgagtttgatggttacctcatcgtcgattatgcgaacatcaacttcagtgtccttagatttcctctgcagccaagagctccttatgtaggagtgatcaggttcaggcttgatgttgcaattctctacctctccagcagtatcttcctctgatttacgcctcttgttagcctctatgcctctcctcttcttctccaccagtatctttagctcattcactgtcctcctcagctctctgatgtactcaatcgcatctcccactactgatgctctatcattcttttaaccactaccacacacacacacacacacacagatacagttaaatctctaacaaattaaatgtatgtatgtagaggttaaacagttgaatacatcagagaaagaaaggttataatttttatacaaattaccttagttgggttaggaactaagctcttcaacacgtggtacttgtcactcatctgcactctcctatggcgctctgaagcaaagtgtttggttcctctgccatctcttcctctgtcaatataagatctgtcccttgcaaactccaacacaccactctcaaactgcattccttcaagtccatcctgataaaccccaccactcccctctccatccatatccattacaccattactgaacaaggatccatttcttgaggatgaggagggaaaggcatagccatttgggagaggctgaaacaagtccttaaacagaggaggctgcggaggtaagttcagatgaagcagcgggtcgtacagaatagacgaggaaggagggctgtcagttcccattggaacatctcccagaaaggccagggaagtgtttgggaagttggctgttttcggtggggtcgggttggtgaaggtgatggatgaggaggaggtggccgagcatctgggcaagtggaagaggctgaggagatcagcaggctcctgatgatgttgattatggcgatgattattgttgttgtaagacatgtcttcattatcccattgaggctgctgctgatgatgatgatgattgtgatgctgaagatgatcaaatgacaccaactgagcagtggtgttgatatcagtgttgtaagagttgtccatgttgaatgcgagttgttgctgaagctccatattaatggctgcttcttcttgagaattaggaagaagatgatggtgctggtgctggtgctggtgttgatgttggtggtaagcaaactcttctacagctgaggcaagctctctgcagctgaagtaatctcatcagcagctgaaaagcccgtcatggatggtagtggtggcggtggaggaggcagctgggagttgaaggcatcttcaggaccaacggcagtggcttctgctgtgtcaatgggatcaaagctgcagcttccattatccatatacatgtttgtttgtattttctggtaagactttcaatgactcacaaaaccccacctttctcttgtagtgttgtatagtctagtctagtctgctaagatgatcacacatatcaaaaataaaacaaagttagacaaaaacgaacgactgaatgagcacttatgtagatgtatatttgactcaacaatgatcatttttattcattcataacctttttaacagacaaaggaaatctttacttgacatctgttttcaaataaaactcagaaaaacaggaaattcatggaagaaatgaacagaaacctacatcaaacttctccatctgattacataatttggccaagtttacttaatttattgtaatgttttaatgaaaaaaataaagaaaaatatataggcaaactagtccaacctcaagtaaaaggtttctactttctgttgtagaggaaataaaagagtatactgctaaagcagggattggatggatggccttactgggggaggcaggaggtgattaggtaggtttgtacatataaaaatgagttatatactttacaatttggtaaaaaaagatgaaaaacaaaaaagtacacccaaactgaagttagttagaaagtcacaaaagaatgagttatatacttttctaatgtatttccttctttaatttatttattaatcaagaatattaaaaataatataaagagagttttgctatataaccaaacatgattgtctgtaatggacggttaggatctctttgtgtctaaccatagtatttttcaaatgaaaatcggttgagatttggttggatagcatttacagaatgaaaatctcattcctttatgaaactctcttgattgatttttgctttgtttcctaatatagtttctttgagtgaccaatctttgcttctgccacttttactggtgttttaatttgtttccctcataaaaaggcttctttttatcagtctctctttgtctttacccttctttttggttagcaaggcttttttggatcatttacactcgaacaaattcataattctttcttatctataaaacttgctcactaaagaaaaaaaaaagctaactacttggccaggccaatattatcatgtcaaaaccctctttagtactatatttttggataagaaccaaaaggaatcctctaatttcaaagtactgacaaaaatcacactttttttttataattattattattttttgaaacttttcatttatgtttaatgtttatttgaaatttattaaaataacattcacgactcatgggaatatgcttcatccaaatttcatgtagaagtataaatcacactaaagagtgagttatttatattatatctatataataagttacatgtacatttacaaaatttataaatctatattcatttatataaatataatgtagggtaatttacacccaagtacgtaaattataatttatttctaaaaatatggtgggtctcatataaatcaaaattatgccgttttatcatacccttttaaaaataattagttttccttttga

SEQ ID NO: 299124 - DNA, 1096 bp, Cannabis indica
attaggcttttatttaagtaacatttaagtgtattataagcaataaatatttatagcttagttggttgaggtggatggcataaagtctaaggtcatgggttcaaatcccataaaactcaatatataaaacatagttaaataccctctttggaggaactacttatttttatgtatatataatggtatatgaaatttgactatctattatctatattatataataagtgatgaagagtgggatatatatagaatatgtttggctgggaaataggggggtttgggtccctcccaaggctgaaaatacggtgcaaaaacagaccgataatattgtttaatatgtaaagaagtagaagtacatacagaaagaacgtgcccacacatgacacacataatttattatatatataagcttagattttgtgtggtccaaaaccacacttggccttattattattgtttgctggatatcactcatcattccccatgttaatttctgatcacatttacataattaaaacagtttttacaactaaagtttcatctaacaaagcaaaaatatatacacacaaataataaatctatatatgttatttatggatacatatactgatgatgatatcatggcttggagccaagccctgcactctcaccaagttgtacacttgcactgctactactaagatattttcttcacaagtaataaattaattgactgctactgtatctgtatttattaattaatgttgtcactatatttaatgtacttatcactaatatatgcgatgcatcagtttttgtgaattataaataatgatgagtaattttcacaacttctccttagactaactccatccacaaacatcaaattgtgttgaaagtgaaactatactaaagttgtgtaattttaccatttaaaataaaataaatactatttttgaaaatcatgttttgtaaaagttaccaattaaactttttattttgttaaatgataaaatagactctgtattttttaaaattgtacaaataggaccctaaactcaattttcaacaattttattttttgggtgattctacaatgcacccccttaaaatggat

SEQ ID NO: 299125 - DNA, 2370 bp, Cannabis indica
caatccgcacaagtgcggatatccgcattttgcagattggattggattggatcgtgcggattggattggatcggatactttgtgaacacccctagtgtgtatacaatttacacaaaataaataaatcaagtatatttatttctcctaatagtaccactagaatatgaatttattagtggtgcttaatatttttcttagtattatattgttattggtacaattaaacattaaattttatacaatttagtataataactttgaaaaatattgctaactaatagtgagtccaaaatttaaagtaaggagacgttattttttttcaataatgcaggagtaaaagtaaacttaaaaagaaaaaaaaatactagcttaaccattatactataaaactattaatatgtctataaatatcatctttttattacaaatatatactgtaattgagtaaaatacatatatatttttttcaattttttttttcagaagcaactgtcctgcctagcttctatttggatttgcccctaggcaccacttctttaagtgttagacagtgctcaatagcaattaatgctctaaaatatattatatcgttattactaatcaaatactaaattttacataatttaataactgttataaaatatcaccgtttataaaatactatataattgagtcaaatttatatataatatatgtaaacaatgttcacacgatattccatacaaattattataataaattatattaaatctaaatattaattatacggtttataccaatagcaatattacatgtatatgcatgttacagtgtattgtgtatatgtgtatattatacctctagaattgtttagtgcttcaaatattggtggaatatttgatcaccctcattattataacgtgtttcgactcacttttactttaaaattacgtacattgaaaatgtatcatatatatagtgagttgttattagattggagatttatgtattgggaattttaaaaattaaaaccaagcaaatgtagaagtttagaagagtataaaagatgaaatagatgatgaattatgacacaaatataatccaatatacaagaaaaaggagaatcctccaaaataaattgaagaaagaaaactaaaataattacaataaatttaattataattgattttctcatatgattctcgtggtaatttatcaaaaaatatatatttatatatataaaagttaatttttgtgatatccggtattattacaattttttaataaacgttttcttaatttagctccataattccaaatttcttttgctttgccccacatgtcttagtttatatgaaaaaaaaaaaattgcttgttataaaattgcttataataatgagtatcatagggtttctttcaaaaaagagagcacttttataggcattaatttattttattttagacttaaaagcaaattaatgaatttgtggctcaaattcatatggtggtaggttcttattagtagtacttgatggaccatccactaataataagactctaagaccaagtgggtagctgaaatttttagcaaaaaataataataataaaataaataaaggagggtagttgaaatattattataatcccttttccaccaactttttaatttttgtaggagttaatactaattctattattgtttaacttaccatgaagtttcaccttactttaattagtcaataaactatcaaattttgctttatgaagtctatttttttcggttaaattctctcaattattattttattttacttaatccataaattatggtagcaaaatcctttaaactacacattcattaataaatttaaggtgtaatctattttttatagttaattactaacttaaatgacttatgtgtacactcatatttattttatattaatacacctaatattaatatttaaaaattataatttttttattttttaaatattatattttttatttttataattttatttaattttaaaataaatttcgaaataattttaaataataatattatgtataccaatataaacgtgtcacatgtacaaaagtgtacacataagcaggtcatattgatagtaaactggatcacacctgaattttactaatttagtagtttagaagatttaattctcaaaatttaagcttagatcaattaagtgcaacttaacaaaaagcaaaaaaactcttattttatattccttgtgggtgaatctaaatatctttaaaaggagagaattggattaatttcgagggtaataggtgtacatatattatattatatatagattttatttatatatatctttatatattaaaagtgcctatctaacggcattt

SEQ ID NO: 299126 - DNA, 1302 bp, Cannabis indica
ccacttctaagatagatcaactcgtggatgcaacggccgaccacgagatattaagcttgctggatgcctattcggggtataatcaaaatgcacgacaaattacatgaggactgattccaatcatatcagatgactccaagctaatacatcactgttcttcttgactgtggagaaaatcatttcttttacaactagaggtagattctttcccaccttgatgactttagtaggatcttcatcgttgatgcatacttcctctacctcttctataggtttaattattcattccacacctacccgtggatctagctcatcttcttctcagaccacccccagtgctgactatgaagatgttccagattctgctatgtttccttgctggaccatgaggacagtttaagttgaaacattgtagcagcttcttgaactatttttagttgcctacgattgttctaacacttacagtattgcttgggaatttcaaacatagatggcggatggatgttagttccctaaagttggctagaaaaggtcgttctggaatgacattataagttattgggcaatcaaccactacaaaggtgcaatacttgaaggaggacattgcgttgtttcaaaacgcacctctgcttattgtcactgtaagttggatcattcctattggtatcagggtgtctccattaaagccttatagttgaattggagaagatgatagattcatttccactagaccgatatctttaaaagcgtctttagaaatgatgttgatagagcttctattatccataagaacttaggaaactcttttgttttcaatttgtgcttctatcagcaaagggtaattatgaggaaaatgtacatgcttcacatcatcttccgtaaaggttatcagaagattcatcatctgagggcattgagcaggtgattgtaccaagttacaagtttcatcttgatccaattcatccagttatcttttttgtggattttgggtgcttttggcaatgtgtgggcctccaaaaatggttgtcgccctgccatctaacattggtgaagtagctccaggagggtatggatttctaggactgggagcaataacaggtcttgcagctagagcattctatacccttgagggagttgtgtgtttagagcttgaattctaagaacttgtggatggtatgttccttgaggagggttaatagctccatattgctcacgattgaaaagttggccatgtgctaccccttgtctagaatagatgacttgtatatttacccaattggatatatgtgttgggttttatgc

SEQ ID NO: 299127 - DNA, 3538 bp, Cannabis indica
tatttttttaaaattaatattaagtggaccaataaaaatttgtcatgtgtacactgtgatttttagatagagaggtgcagaataaaacagaatggaaatttaggtaattttaccttcaaaaaatcaaattttatgattaagtgttaacaaatttaaagttcaaataatttaactgccaatatcccataaaatatgtatatttagcctccaagatgaataggtccttggcctaagatcggctcaatcagtaattgaatcacaatccttcaagagaagatttgactcgcataaacatgatccaaaatagttatctttttcttttccttctttttaaacgtaaaaaatataggggtaataaaagtttgggctattagccaagtgtagagttatagacaaccaggaaaatataataataaaattaacgttttcccccactcttctatttgatttactttttatcatgagtaaaacatttacacgctattcaaataaaagaaaatttcatttaacctacaaaaaaaaaaggagaaattaaaagatctttcatcttattgttgttgtgatgaggctgtagagtgtcgaacttcttgtggctcaattatcatacatcttgaaggtggaccacatatgcttagaattacctgtataaacacacataaatataagataattagttctatagaaaaacggattttggtaattagataaatgctatgattaataataactccctttttatgagcttaccggtagaaatacaaggccatgtaagaagccaagaagaaccaaagcaagatacatttgaaagtaatatacctgcaatttatacatacataaaatatattcatagacagacatggtcaattaatccttgtgaagtgtaatgtggataaataagagcaagagagatttaagtaccacaaaaacttcggtccttgaaaagcaaagaacaatgaccccaacaagctttgttaatgttattccactgtatcacatatcaaaacacaaaaaatactctcattatataccgtcaactgaagtcctctcaggagacattaacgttcattttgtctttagaccatttcgagttacacagagagagcaagacagtgcgaattgtgcgcattacatagctactgtacttgtgagagaacttgttttttatattgctgagagtacaagtgtggtgtgaggttctttgtttctaatattgaaattctgacttcttcatagtggattgagttcgttgatgagtacaaactattataaataattgtgtttactttgattggttggagttttgggttgtaaaggatttacacatatatctttagcatgatggtattggtgtaaacctagagtgtaaagtattcaagtgcagttttaggcttaggttgaaaatgtacctgagaacagaggctcccattgtaccaagagcctccttaatacgttgattattatctccattgcttacctgttatatatattatgatattataaagaattaccgaccgaaacgatggacaaattaatcaaatccttctttatctttataaaagtggcgttagtaaatatgaatgatactgaccgagaatgcatgggtcatgtgaacacaaaactcaaccgcaatcccaactgacattacaagattcacaacagagattgcatttaattggatcccaagaatcgccattacaccctgcagatcattgcatcgtcaggagatataaaaagctgatttcaggctacttaaaaagaaaaaatgatttgggagagaattaatataccatgagatccacaacaatcattactaacaccaataagatgattgctgaactccagaaactattaaccaaatggaaccagaaatccagtcaggaaaataaatttattaattaaaagggaaacagggttaccgtacgtactaaaaagctaaagtaataaacatactgacctgcatgtaattactaagcaaacgataaataccgcacctgttgaatcatgggtataaaaacaaaaaattaattaacaattaataaaatgtaaacatgcattcttgttatgcctatccacctacataacaatagtagcaattacagaaataaatcaattaacaattatcttttatataatctgccatatgtctccaaaaagcagcagaagtgaatcaatccctggaaactaatctaaaaataacaagctaaagctaaacagtggcctatacatgacactatgctaattgagtttcttaaagtactaaccaatagctattgaaaggttgattaatgcggttttccaaatatcaaggtattgctcgaaaaacatataaaacaccgaatatggaaatatctctatctgcacaaattaagaaacaatcagtttcacaatataaattacaagaacgataatcgtcacttgtgggaaggggtggtggtaacactcttgtactggaaaagaaaaaaaaaaactttttcagtcaaattatgtatattagagccagcaaggccaagaagattgtcagaatacctttagagaatcggaaactcttgagctgaagtctcgtgcagccctcaatgaatttacgtagtcactcttcaaataaaatcattgtatacaatcagtcttcctttgatatcgtgacagaaaggaacagtatataaaatcctaattaagagcacacctgcttgttcaaaggtgtatgatatgtacggaatgatgatgcttgaattataccagtatcataatctgattgaccagaaggaataattcaattataaatattctgaatttgaattaaataattcaataatattttgctgcgtccaaaaataatgaagtacccaataatcctactaacctttcagttccacactggtagtgtaagccccatggccacctttagcacaggcagcagatggtagagcatctaggaaccatggaagtttctccttgaattgtgtggtagatggacgatcgttctgcagatccgaatggcggaagcactggattggcaaaaatcagttgtgagaagaaacacatgtatctaaaagtgattggcaggattaaatataaatcttaccgttgtacaatctttgcatacccctcccaggctacaaagtcctccattggaagaacagcaaggaggctgaatcaaataatttgaatcagtatgaaagggattaacataaaatgaaaggaagatcgcgagactagaaaaaaggtaaagctttgttaatgacctgatcatcggggggacagtaagtactgttggtaaacttccgacagcatccaaatgcttctggggatatccacacaagaaaatcatcaagccatgaagcagctggcttagcaatgtaacttgcttctggagttgatgatgcttttgcaatctacacaagcaaaacaaaaatcatttacctgacataatatcaactaagaagaaaagataaagaatgcttaaccaaattaaagtcatttgtcatttttggaaagcatttcgcataaattttaatgagttttgaatctttaacatcagcca

SEQ ID NO: 299128 - DNA, 2787 bp, Cannabis indica
agagagagagagaggaattgatgagggaggcaagtgatgagttgtgtgacaaacagatgcaaattaacattggttacaaacagatgcaaattaacattggctacaaacagatgcaaaattttaaaagtgacaaattgcatcagttttcaaggttgaccgacgtattttaaatgtttaattttttccttttttttttctttttatttgattctcataaaaatgaggaataggtgtttgtgacagataggcaccttaggaagaattttggacctgatatcccatccaagtttggtgtaggggtgtgtgtgatcttgggttgtttggcactctcccccaagtttgattttgggtgtcatccggtacccccctcccctcaaggttgatttaatccccccaaggtcggtctaagctccccaatcgagcatagggggttttggcctctctcacgcgcttcccgatcgagtactcccggtccacatgtctgcaccccgatggggtcacattgccccccccccctccgccgaggctacaccatatgatcctgaacccctcgagggtacaccatagggaccctattgggtcctccacttgaccaagagtcaaaccttttttttttgttcgagtcgagtatagctggagaaatttttaactaaatgtcttctgctccagggtaactcgggatagctttatgtatacctttattataaatacaccctctctatttgttgtgttccctatatcacactatgtactcttagtaaataatttaagtaacactaataaaatagtcaccatagaatttaccgtatgaggttgtctttatttttcattccaatttagatatgcaaattggtgtcgtctcgacactagtctcgacacttcttttatgttgaatgtactatgtatgccatatatgtgtgcctcatcttctcttttttaattattttttgtactattgggtgtgtctgtcatagatagcctactagcattatttggtgtattcacctcctttgtttttttttttttttttgtaagatgtaccatggcgactactgagggtgatcaccggatagacgaagatcttcttcaacttttatttgaagatcgtcctaagtcacctttgacccccaagttctagcttgcaattttgtacgttgggacttgttattatctatattttcagctctctcctgaaggggttatgccatgacgtcacaagtatataaagcatgcatgttcacgcgggtacaccacatatttcttgataagtagttcattggcatgtatgattttccctcctcgggcctggcgatgttgattcgttctctggaacaaaatcctgagacgtacaataagtgtagagcaacaattggatactcgagtactccaaatatcctctcatacatatattttttcacgtcgtcaaaactaaaataaaataaaagatataaagaaaaaaattgctaggagttctccctcccacctatctcaaaagaaaaataaaataaaataaatatgttgtaattgacctgcacagttaactgtaattaaggacggacttacttattggcgaagggggtgcaattgcccaccctcaaaaataataacccctcattttttattgaaaaattgtcaagtatactacatttttattttttttatttttacattttttagattttttttatttttataaaatttattttcattttgagattatgttgcttctgtttcgaagttatgttgtttttattttataaaatttgttttcattttgagtttatattatttccatttttataaataaataaaaaatcaattataaaagtataaataaaaaagccttttttttattttataagtttctaaaaaaaaaaaaactattttatacttaaattctctttatgattatatatattttttatatatgctcctctttatgattatattctaggcccgtccctaactgtaattattaaatttagtaacaagcagtggcagaactacatatacttatggagtggccatggcccccttaactttttagaaaaaaaaaatatatacataatatataaattaaattagtataattagattttacttattagaaaatgtgataattctcttattactaagcctaataataaattgtgaagttgaaatttaaaaagaagcccaaattcaatagccaaattaaattagaggaaattacattatatacacactttattttatttgttttagtttttattcttcattttttatattttgtaagatatacccacttttatagatgatgttctaattgtagcccttaggttgatttaaattttatgctaaacttaagtagagagtgagggtatattaggaaatccactcacaaaagagtactttttaataaaatataatatgagggtatttttgattaatgaatacaaaaatgaagtatttttcaacttattagttatctattttatggtaaaaagtgacaaaaaaatgattaatataattcattttcgaagagtacttttgtatgatatatatttatatgtgtctttatatatgtatttttatggtatccaatatcatattaatatgtcactttacaagtggttagcggtttcttatattatttattaaattaaaatatttaggactcgatattattttacaccaataacgatatgtcattttttatagtacttggcactataagatgccttttattatttctcattattttatatacgttgtataaaattaattaacttcttatattgatttata

SEQ ID NO: 299129 - DNA, 3882 bp, Cannabis indica
atgcgagccccttatgcaccatgggctcgcacacgagccctcacacacacacacacacaccacacatgtacgtctcgcaccatgcacacacaccacggctcgcatgcgagcccctcgcatgtctcacatgcaagcccctcacactgcaccctgctcatggccttcttccatgtcttttatctattcacgagttgtcacgagaccgatccttgtggtgtttcagattaagtcaaaaattataagtgcacgattttcggggttagcacttgcccctagtctacaagaattcttttcaatataatctaacttcctatcaatagaagattagaagttatttaagtttatatgttattttcatgtttatggtttaatatacagtttttattaaatccagaacatatagtcattcacaattacagtgatgtcttcacagtggaaagtaattgtgattatatgcttcaaaaattttagtcttatgatttatcactacgcttgatttacaccgacgtgataatcagtgataaattttacttacactttggataagtgttatgtcctttcagggcattggtaaaatatactagtatcagatgtatggagtatacatcgaactagactaatattaaacttggacaagatatcataatctcattgttgtatctttctaagtcaatatcacttagttgatcttagatcaatagatcttaatcatgagatgattaggttctagcttaagtgtgttatttgagttgttcgttaaagctgaccaattgcattggcccaatacttacatcttgggaacatgatagtaaaatttagtgggaatgctaatcatagatatggaatctatagcttctatcttgacatagaagtgaaataataaatttcttcaatcttggcttgatagagataaattgaagagctcttatttaagttattatattagtttactgaaatatcatttataggaagttaagtattttaagaataaaatatattgaggggtagaacggtaaatttgtccctactcgatgtagatcatccatagaggatctttgactatttggattgaattaatggatatttaatagtgtatctatatttagaacatatagagcattctatgtaatcaagagtgcaattctaaatctatatagtggagtaagtaagaattagtgagatagtaaatttacttggtgaattctagaactacttattgggagcttaattatataagcccatggtccccacgctagttgagataatattggcttatagactcaattaattggttttaattaatcaattagaattttaaattagactatgtcttatttatgaattttcactaagcaagggcttaattgagaagaaagagagggtttagggtttatttgttaattaagagactttgtaaggtctacttgataaataagttaaatgacaattttatttgataattaattataattattgaattgacagatttggcattcataggattagaattaagattagaattaaaatatggcatttgtgaaagaaaagataatttcttaaataaatcaaaattgaaacctgtagggcccacatgtagggccgaccacttaagggtttaatttattctattatttcattttttttaattctatataatttaaatcttaaccctagatgaaatcctatataagaaagagatggctcttattttcataacttacatcagactactttgttagacaactaaaaaaatagagaccctctcgagaattttaaaatcctctcctttcttcttcttagaattttccaaccctatagccagagagtacttgcccacacaattcaagtcaatactcaattatagtgtggaagattatgaagaattccatcatctacgaagatccaggtttagatcttggcaatactttgcgatagaaaggaacaagggtttgagatctgacggaaggagccattatattccgctgccaccaatgtaaggttttcttcatatgtgtttatttcattgttttataaaatttatatttaggatgttagattatagaattataatcaagttagtaaatctagatcctagtaaaataagttccaacactcagtaccttgattttacctcttaggtgagggtgtcaagacgtcgcatttctttgaaccttttcatcatgggcctcattcggaggcgatctctagaatgagatctcttttgcagctgatgttatttacatatcgtcttctgactcgaagggtactcaagagaacacatacaatagatatgctagattaatgttcgagtgaagagatcatatagaacacatcattaactatagggagcgtgttaagagggttcgagccaaaatttgtttagttttgagcggagatcaagatgattttattgctgattccggtgtgtacctttctagacttatggtgtcacttgccaaagtttagagttacctaagattccttgagaatagcttcccacctgaacctattgccccatcttctaaacctgttgccatgtctcctgtcgaggttatcgaatttaacttagatgaggagtgtgggactacgctcgaaggtatctagggttaaggctcgagctcgtaagaattctgagagaaatagaaaatatgaggctcacagttaccatcattttttttttgtatctacaggcatgactccacccaagcaattagctcaacctactacatcccatgggcgttcctcttctcatgtgcctaggtggcacattccttatttgcttagtgatgtgtctttcgtctacgtaggcgctaggagcactatatccacgaacaatatttgcaaggcgatggataccttcaaagtgcgtgccacgagtgacttagtgttacgcaagccttgacaagatgagttcgctatcatgccttaccaagggggagtggcctttagcgcccatattatggtggttggcgctgtcttaccccttcatccattcttcatcgacatacttgattattttgacatcgtccctcttcaactcccctcgatggcatatgttatgctgaaatgcttcaccatcgccttcaagggggtgagtggtcgtttccctttggctgtggctttccacttagtctgcaacatccactataccaccaaatctcctgggatatatttttttttttgaagatcccttctcctaaggcccaaggcattgctaggatgccttctaagtaccacttcaggcctttcaaattcttcattgttgataagatgcctacccgcatctcgtctgcttttaagattcctagtatgtgcaacactttattttaatattacaccatgacttattttgatctggtgttactattatcactcacttttttttactgacatggccttttgccttactttcttagagaccaaggaagatcttgtgctcatcacagagtctttaagcactttgcaaatgtattttaatctctctaagaatgcgagggctgctaagaatcttcttacgttgaaatgctagaaagagtctagcctggtagattttctgcttttagagggtgcccttacttcgatcacaaagcctcactcccatgggaaccctgcttacattcccagtgtgcccaatgagccttctcacaatcctcatcatggtgaagatgaggttgaaaaagttatgtgtaataccctaggattaagagaatggattagcaaaatcctaactagttaattatgtattatagtggaattatattattatataatttaatatgtgagaatttatatgatttatgacatgttaagatcccgttggtgagataggggtattttagtaattttgacccgagaagggtatttacatgcttatgggactat

SEQ ID NO: 299130 - DNA, 1711 bp, Cannabis indica
ctatatattttttaaaatttaatatcaacattgacccagacaaatattagcgtacgtacgtacaagtacatttatatttggaataatctctacttgacttaattaagtaatgtacacatgatacacatatattttatttatttatattattattattttcttaataagtaaaagatataaaatattggaaaaatttatgcttgatatataaataagtcttcaacattgaaaattgactgtaattgttcttaggtctcgtttgtcatttcttaagtctgttagtttatttttctaactgatccgtttaatacgaataatatgccaagtgtaaatttttttattaatccagatcataattataataaaaaaaaattaaaaataataaaaaaaactaaaaaaaaaattaatttaaaaatcaagtttttttaattaaaattataatttagactaataaaaaattaacacgtaatatgctatatatattagtatataataggatctgttagaaaaaaaagagactaatggatttacgagaaatgggaccttcacaattattaccgccaataattttttgagattgaagacttaattatttacatcaaacataaatttttgggggacttttatcgcaatttttcttaaaatatataataaggaaatttgatgcaacttggttatcatttagttgatttaattacatattgttacaatatcttctctatattactaattaattaacttgattgctatacttacctaacgcagtatagtactaccatgctcatcataatataattaattgttctctttcactatttgtgtgcctatatatataagaaccttaattagtttcctcgaacaagcctctatttatatatatagcaatactaatattatatataactttctttcagttgtaacatatcttcaatttaatggccttaaataatattcagctacttttctttgcatttcttcttcttattacagtttatactcctgcacaagcaagaatcttcttattaccaggtaattaatttttaagtacatctatattatatataataatgaaatatatatacatatatatatatattcatttttcaaacactgtaataataatgtgtattcattttgctgatatattatgtatattatatatattaaaaatataatatttaataatatatatttatatatgtaatatcatgtttttttggtaaataagaataagttgattattactaccagctcacaaataacaatcaactaaaagaaactcttataataaacatgagtaatttccatgagtacttataacattcatagctctattatatacatctcctttaatttagttctattatattcatagttcttgtgtttataatgtaataacataaaaagtcaagtataatgaaaaaacaaggtgttttggtaagatacatagatgagagagatttctactattatgcatgttacatacactataattttttttacttttagtcacaataaaatttgtggttaaaagtgaaaaaattataattaattataaatcataattcttaagttgtgagtaaaaatttcgtgagtaaaattattaatcacaaatattacaatttattgtgattaaatatatttttagtcacaacaagaattgtgactaaaattagatgagtcacaacttgtatctaaatattatattcta

SEQ ID NO: 299131 - DNA, 3255 bp, Cannabis indica
ctctctctctctctctgcgttttatgtaattgtgtacatataagtattttgagagtgaatatataagtatttgcgtttatggtttttgcgtcggttacaccaactgacgcaaattgtttatatgtcacttaaaaattgaagcaaaatgctatttttgtagtagtgattaaatgtgacttttagttacaacagaaaattacttgtgactgaaacataatatttagatacaagttgtcatttatttagtttagtcacaataagtattgtgactgaaaacacatgtaatcgcaacaaattgtgatttttatgactaatatatttagccacagaccttttagtgataatagaaatgatgatttataataagtcacactttttttatttttacggaataaattttttttgtagtaattgagaagaaaaaataatttctttttcttttattcttaaaatttaaacgacaacaatgctaaatagagtaactaagaaaaattgtatgactatattgttaatcaaaatatttttagtgcataatgcatacaagtatactaagtaagtaattatattatcaatttaattgtgcaattatagaagacatgatatttgataatataactaataatgttatttgagctttttgatagtgtgaaataacttttcaatttttagtttgataactactaattttaatctatgttaataattggtaattaaaaaaaaaatcaattcattatatagagtgctaaccttatacttctagcattgttattaaatattaaggatgtccaatatcatcatgaggtgacattaggatattgcataatgtatagttattaaattaaaatatgtgacacttaatttaatacatttttttaaagcaatccttaattatactaataatagtataaatattgtaatggtgttggacattgctaatatattttaccgtttttctacctttctaatttctaccatctatcatttttggccccacttatcataaaatccttgcttcgtccttgtatattgaagagattatggttccaaccccaactaaaacacttttgataatatttttttgcaaacaatgttatttaaaaagaaccataattacgtcccctcaaattaatttattcatgattccgtcacactgattgcaaaatcaaatatttgaaaaggaaaatttgattttttatgcatatattaccctaaaattaatccccttaacctatatgtattaatattggccatatatgtcaacattctcattttttccataatacccctccttatactctcctctctatctctcttcactcttttcattctcttcatcctcttcccgattctctcttttttatttatcaaagtcacactaaaatgacccattttacttacattttgccttttcaaggtttgaaactccattcaaccaacacttaagcaaaatattgttgagccaccgaagaaatttgggaacaatcatgggtaagtattttttttttgttaatatttcttatatttaggttagaacattattttcatgattgatctatgggttgttgctgttattttactgttttatgtgttgaaatagttgttgcgtgtggatactgtatttttttctagtttctggattttatcatatagtccgatagggcccgatatgggccagatgctagttcgattgggttgtttgatctaaggacaaggatgaaggcccaatgggcccgatatatagtccgatggtttttttggatttgggacattgatgatggatcgatgggtagcccgatacagtctgatatttttatggggttgtgtgctggtccgatattatgtatgatatcgtccgatgtgatgtccgataggatgtgattttgtggcttttaaggatatttttaacacttttctcttacaattttatttattttctgtggacaggttcaactgttttagcatttgttatgtataatgctagaagaactagtgatggtagaggtccaaaattggaataataaggcatggtggtcttgtaatctgaaaaaaaaaaaatacaagaaacttgaagttagatattctacaaagcatcgagctgactatcgtcccccatcagcctccaaggaaaaaaaacataattaagaaactaaatattatcggacctaccattatcccccatcaacctcgatgaaaaaaaaaatcataattaagagcctaaacattatcatcggacctatcatcgtcccccatcggcctcaaagaaaaaaaatcataattaagaacgtaaatattatcatcaaaccaaccatcgtctcccatcgtcccctatcgtccacaacaaaaacataccaatcgtgccatatcggacatacatatcgaacatacctatcgtctcgtatcagacatgtattgttccataataaaaaaaagaaagggctaccatcctccttatattgggccattatcatcaacctcaaacttcatatatcacagttgaactatcgggcctatatcgtcgtatgatcgtatcccatcggacctaacccaaaacccaaaaaaaaaataatccaattttcacccagaaaccccactctttaacaaattcaacaaaaacataaaacaaattaaaagctacactctgttttacaaaacaataatttcatataacacttatatcaaaaatggttaatttgcgatggtcgtggcgaaaggaatctttagtattcagttacggtggttgtcactcgcagttgtcatggagaagagtggtgtttggatcatgggtcgtggtggtggttaggtcgagtgaatcttcggatggaaaattagtggggggggtttaagttttcgtttatagaagatgaagaggcaaagagagggaaaaaaaaggtagagagatagtaactatatgaaaatggggagggtatttggggaaaaagggaactattaacctatttgaccaatattaatacatataaatttaagagattaattctagaataatatatgcatgaaaaatcaaatttctctttgaaaaactaagtaaatggtgaagatttcccaactaacaactatacaatgtgatggacaatatttactattataagaaaaatattaaaaatttcattaaaaaagaattcctatataagtatcgtctttatgtagtaacccaatacttaatacttctattaatatatatataatatggaaaaggtttcaatggttacattttttttaagccattagattactatt

SEQ ID NO: 299132 - DNA, 1781 bp, Cannabis indica
cgctaatacactaagtgtcagctggtacattgattcctcgcctaagaccttacagtcagcgggttacaaatatactctgctacttacgtaattaatgagttattccataaaagatattgcatcaattctcattcccttaagcttgacacgtgtcctccagccgaatttcgagtatagcagtgagattatacatgaagaatagtttctcttaatctataatggataaaataagaaactatattaattctgtaattacaatgcaaggaatagaaaactaaggtgtattgcctttattctctgacttaatcccatgaatatagggattatcttcatgtcttggaagcgacgagacttatctctaaaattgccaactcacatatcctgctcagtgcatatgagtttgtactttggtcgaatatctcttgattaccctgttcggacatcctgttgtaacagacatttagatcaaccaattgtgggctactagaaatactcctgtctgcccaggtaggaaaatgtaggacatgtgtcactcagctcattgccacgtcacggtgcaaaaaataggataacagtaataattgaaaatgttaaaggagtttggtcataaatatcccatataaatatcgaataaactttatatcgattacttctcttttctatagaaatataatcagctgtatgcttaacctatgtatgcaaaacctctaaaatttctttttgctacataagcttacaaattaatttagtcaaaggagatgctcattaagtgaaattgtcttgtttgataattttaatttaatttatttttctcttaaaaattcgaagttgtaaaccaaactcttaaggatatgcttaaaaaatatgtggaacctcccacatcctttttagttaccgcgcttacttaatacatcacatttatgaatctttgcaaaaaaaaattcgaggatgctctcttcccatctattctatttggtacaaatcctttctctccttgcttttagcatttcctctgtactatgctaataaagaaaaccaaaatttaaagagatttggctccaagtggtggtaataacatactccccttgtattttattgatcagagttgcaaagtcaagaacatgctcttgaatgtaagaagtaaaaatggcagagtttttgctctttgagtgatgatttttagatccccttcccaggtcatgaatgaccccttacataggaaaaggttcagtgcatctcgctttaggagacaggaccttggtgctaaaatatctcaattgatcccttaaactttggggttggttgaggttcaattcttacagtaatatcctgctattttagtgggtttgtaactacctttgggcttcatgcacaattggatgatgttgggagagtgttggatgtgtcggtctatgtggggtactccctagggtgcggcctgaccgttcgaccttataagggttgtactcacctcggggtggtatccccgagacatgtccccttgctcctcatgttgtgtttagtgcttagtatgtagtcttgatacttggagtaaatattatattgtccatgtccatatatagatagggtgtgataccaggatcataagagtgttgaggatgaagagtataccctcaagactaatttacaaccattgagtggatgatctactctcgggggtggtgactgtttgactcatcatgggggcagtaacctatctcacctcttgggggtgtatacattacgaaaaatcttacttttagtcacaacaaaacttgtga

SEQ ID NO: 299133 - DNA, 2610 bp, Cannabis indica
aaaaagcaacagtgactggaggtaaaaaacaaggtctcgctaaaggaataatagatgaattttgggattcaggccaagctgcttctcacagaaaatggcatttaccctctattatttcttgcaaaaatttcttatatcaacctgaaatctcatcctgattagttttaataagatgatccctaattttttcattgtttatctcaagaatagtttaaggattgtttgttatgggtttgaatggggtggctaaattttgaggacaatttatttctaagaactccgggatcgtagttttaagaataaactgggtcatgcttgtgaataagtgttatctcaatttctggaaaaaccaaacacgatttaacctagaagtctataaattgaataacctagaattttccttagccctagaactatccaaacaacccaaacaatactacccgaaccaaaaaatacagataaagagatatcaatgaagaagacaagactcgaatacagaaaagaaaagcattaaaaagaagggagtgaatcatttagtgtcttgttgaatttctaagctatagagaactttacaagtgtaaatttgaagattgagaagttgggtccttgcaatttctataaatggaagatcggtcagatgtgatacgcaagtaaagtgtaagggacaaaaagggcatgcaaggttgaaaaataacaatcggagaaattttctgcagaaaggtttgaaggtttgaaatacaaaaaatggtgaaatgaactttcacttccaattttatacccaaatactaattactgttcgatcaaaaggaatcttatctaacaaatgggaacattgcaaatgagaatggccagagcattaaatgctaatgatgtgccttgaagttatgaattgccaaaaatccaaagcatgccatttttcaaaatcaggttaatacgattatacccctgtaatcatttaaaaagtactttttagggagcaattgtaatacctgaaattgggctatgcaccagaagctgacatgtgtcctatagaaaaaatatgaatcaactctgatgatataataatgttatatcattaaatgcaaagtaaataactcgttacaattagataaaagttttatagataatattcaaactcgttgattgtgtagtcttaagcgagacaaggataataactattaaactgatattgacgagacatatgtctgcctcgggatatccacaagtaaatagaccagaagaggatattcatccactcgagcagaataaatgtaacaatacaaaacaacctagcgctacacatagcaagaagatcacctcgcattactgattccaatgaaggaatgcaacgaggtgaactattttccaacacttggtgatttttcctaataagatggacaagaaagagaactcacatctaatgagatacaacattccaaattaataataaccgtcaagaggataagaatgaaaagtagtttggtagttttaaaatataatcccacgtgtgattaaatgaaacgtggggattttccatgttttatgaacaattatatttgaactaatcctaaaaagaatagctgcctacctatattccgataaataagatcaaaatctgtactcaaaaatatccctaataatagggactcatagagtatgtagattttaactacaaaatcacgtaaaatatctggtgtttattaattacatattaacttttgtactatatttatttcaaaaaagctatttaatttggttagcgaaaatttgcattaacagatgcattgatcaaaaaatacaatcatagtaaaattaacaattgttgtattttattctttttaaaaaaactggactccttaccaagcctacaacaattaaggaacaataatgatagcaattaatatgcaagtattaaaaaggaacttgaattaaattaaatttttacactcataataattactgactttgtatactcatacaaatacgttgtaaataaaaataaacatactacaatttagttaagctttttgccaattattgttgaaggaattttacaacaccaaaacaaataataacaataataatgataataacaaaatgatgaataagtgcgagtattcaacctagaacagcgagtacttgaattgggaacacaaatacttaacaaaaactggaaatacaaagaacacgagggaatatagtggttcagtcagatcacggtctgcttagtccactgttgtaaggattctgaatgagtgtcatttcacggtggatcactcctttatatacaaagtaagtgtccgatcatttacacaaggattgcattcattggcaatccgtttgtacattgatttacaataattatgctagaaaacgtaaacattaatcaatgaagaatagtttctattcactaaatacaacaacgtatgcgacttctaatttgcgagttggttgttcatattcttgcgtaagctcgtggacttagaatacacctaacacttagttcagtctaagatgtctgcgttcttgtaacctcgcatttacggacatcgtataacgagctgatagaaccaagatatgcgagtccatatcagtttatcgaggctgttg

SEQ ID NO: 299134 - DNA, 5585 bp, Cannabis indica
acaaaattaattacggaatttaaatgtaagaaaagaaaaaaacatgagaacttttataacatgcatttgtttcatggtagaggcactcaaagaatcccatcaagagaaaaaaaaaaaataagaaagaaagaaaagagagagcaagttggatttggataaggtgtgaaagaactattttgtaagaaacccagataaacaatatccaagattgtcatgttagttatcccaattgtaagaagatgaaattgttcagatctagaggcaacatttaaactcccataaaagtaggctttagatgcagcaagccataaaatatgtggattcatcattcattgcccatatgtttttacatcaaagtgatagatagcaaagccccccattgagagaacctatgtctcgcagaaaatgattaataccaaaagcacagaataagtacattgcagttgatgaagcataatctatgaacaaagttccacaacgcaaaagggtgtcagctgaattttcataaacctacaaaagtcaattgaaaacttggaaccagcgggatcatatcatcctcctcgcaagtgagcacccaattcgccaaattgatcatcagcctctactgtatcatctgagaggcgtactgcgtcaagcttttgtttcaggatttcaatggcatgaatcacaagctgagaagctttaactgcaccggttgtctcgacagtgaaaatgaagctatcttctttggccgtgatatcaacaagcccaggtttccccatagcttcagcttttttgatcacttcatcgtcgtaagtgtatgcctcagcatcgtacaaacacacctaaaaggataattcaacaaccaatttaattgctttactaataaataatgaaaaagttatatggctatgcagaataattcctaagtgaaaaacaactacaacaagcgacaacaatatgcaaacaaaccgatgcctcctagttggcctgatctaaactagagggaaatataattcaaccattttaccaatccattctcacaagtccacaatatttaatatttgtcgctcctgattatattagagatagactggaaactactgtgagcatgctagaacatcagaattggtttcccctataatttcctaggacaacaattttccaaattaagtgatcaaaatactgcaaaaatctggaaagatgacaggtgttgctcaagtatgactcatttctcaaatagttgtgtgtttaagaaaacatcatcagcagagtcccaatagcaattttaccttagaaagaatagctaaaaatgagggcagaagtagaaccaatttttaaggaagtgcatttaaattgaaaataaataactatcaattactcttctcaataagtcacgcaagtaagaaaacatcattgagtcccaataacaattttgtccagaatgaatacaccaaatgagggaagaagcagccaatttaaagtttaaaatgaatacttctcatcttgaaaatatgtaatctttaagcccacacgatatgtaatgttctgtacaagctcctacttttgacatgtatctaaaccaaaattttgatagaacgctaaaggtagtatttcctgccagctaatacttttagtatgaatgtaaaataaaataagaacactacatgtggaaatttatgtcagctcctgcgtttggtataagtgttaaagcaaatttgaaagaggattgactaaactcagacaagttccataagattctcttatggcaatcaaaacccagagggtaattcattatgaaatcatggggaaaagaattattctaatcggcacatttcatcaagaagacatcttcacaactaaagttaaatgcacacattgcacagtggaaggcctctaaaactaaatacgcgagactaccacatagaaatacgattctccacttcttctatcacctgattccactaaactaaacaatgaaacttatgatcatgcaacgcaagtaaaacccggtactttcatacaactaattaagtatagcagtaggcatatggttacaaaaaccaaaagacaattaatatttcacacaaaagcctctctaacagaacttctacaagggaaccacttcattagaaaaacagtaatgaattttgacattgccacaacaaaacattttaaaatccaattactacagtatacagataactataaaaatagagaacaatgacaaaagatacaagcagggaacctgatgggtttcgggatcaagctcaaacactctggtggggctactttcaacccaacttcttttctcctccagcgttaaagtttccatcagctcctcattgattctaatgtctggttcatacataaaactaacagttgccgcaggcgaccactttgcatgatctttgccgatcccttttctggctatggctcttagcctcagttcttgtccacgacgtaactttacaatgataaccccccttcaaccacaaaatatccaattgaaaatataagaatagttacatcgtaacaaatgtaaatcgaaatgttttccagaaaatacatttgaaaatgaagtcacccatcttcacattttctgtatttagtttttatagacaataataatattgaaatgcacagaattttaatcacacaaaatttgaaatggaagaaaaaaggaagagcattcaaactgtaaagtccaaatatttagggcaactattaatagaatatacatctatgtacactcaaacatattggaaaaaagagagaaagcagaagaatacctattctcgttggattcgttaccagctgagtcagagaagtcaactgggacaacggtgtggtcaggggtgacgaggtccttactggtaacatctagggttcgatcttcaatgcacctgcagcgaagagtaaactcgacagagcaaaactcacactggccatcaccatcacaggcgtcgcaatcacgtgagaagcgcatggacatggcgcggtcactggtgagtgggatgaggccaagacggtgggcaatgaactcgtcgttgagaacggaagagttgacctcaatctctacgaggtcaatagcaatggtgggcacctcggcgatcattatgcgacggagtgcgttggccatgctggcgtcggtgtctcggagctcgaacttgaggtaatcgtccttcatttctcggatcttgaccttgggaaacctctggtacgattttccttccataattttagtaatggtggaaccctaaggggttcgaattagatttccgagctctgaaattgggaattttgtggtgtgtgtcgtactgaaaagggttcttaaaacccaaacaaagggttttggcctttcaatcgattaccacgacgtggcacttaaacttaaagctgtcgttttggccttcaacaaatgtttgatttttacctctttcaaaaaaatatttaatactgaataatattatgcactttttgagttagttcgttacgcgaagtcgtattgtattaaataataaataatattatatttagataaagtaatgtattgtattagttattacgaccaaaatttttaatactgaatgttgtaatatttaatacataacaaatggttcgtattaacttatattataatatttacaaagaattcaagtcaacaccaatctctgacatagacccaacttgggacccaaacttgaacccaaattcgggacccggtacccaaactcgggacccggatccagacccggacttgaacttgagacccgaacccaaaccaggagccaaaccccagacttggacccctgacccagacccgaatctgaacccagaacctgggacctgaacccgaacctaaattgcgggacccgaacctggacataggcccagacccgagacctgaacacgagacccgagatctagacccaaacccgaacgcgagacccaaacccaactcggactcgggacccagaccaaaacccaaatctgaacccggacttggaccctagacccgagacctgcgacccgtgcccaagaccccgacccgaacttgggacccagaacccgaacccgaacttggatccaaacccgtagttggtgttggggtcgagtgtattgaaaatatattataacgtctttacacaatctattaatacaagtcaataccaaacatagtattgtattaaataatactaatacaatataatataatacaatccaacacaatgcaatacaatacgacataccaaacgagccctttaaagatgtaccgatacattgctatctgtttttaaatttaagaggattttcaaactaattttttattgacatcttacacaattttaagaaattaaaaaaaaaaaattaatgcgccgaaaataagttcaaattgtctattgtatttgtacgtgtgactctttcattttatatatgtgtaaaattagattgtttgaatattattttttacattgtaaattattctaaatttttcaaaattttacaatatatcttaaataattgtaacatacataaaaaaaaaatagactatatttatcttagatgctgaaacaaataagtacaattcttttagagggatgcagaatcatcatataatataaataataaacaaatacttatttggttaaatagcagaagtaccaaagttttgagtttgtaaacgacataaacctaataatttttttagcggcataagtacccaatgtttgtaaaactataatttttctctagtttcgtaatctattttgattttattaaaagaagattttgaagtaactgtacatgttttcatctacactcaatgatttagaatttatatgtcttgtttgtgacaagggtaaatatcattttagaccctgtgttttgcaaaaattaccattggaccatctgttttgtttaatgaaaaaattgaccctacattttctaaaattgtaaaaataggaccattagctcaatttttaacaattttattttttaatataatcaactttaagataatttctaacatgaaccgatatagaaaatgtaactagttttgtcacaacatctctagatcagattattattaagttttattttgacaaaaaatcagttcagggtcctctttgtataattttggaaaatacaaggtccattttgttatttaacaaaacggatggtccaaaatggtatttacccatgtgacaataacatagaaaattgaaggaaaattattatagtttacaaacattaagtacttataccgttaaaaaaataattgagtctatgacacttataaattcaaaactttaatttcttatgctgctatttatccaatttatttttttctaaactttgttataaataatattctgcagccaaattattagcgacttaaatattttcctcaaatttaaatattaataatttatgggactttaattagattttattagatttttattaaataattggcaattttatttcttaccactattatattttataccccaaaattttactactgccacattgtgctcctagaattttttgttaaatagaagaggcacgagttgttaaataaaaaagggtaaataccattt

SEQ ID NO: 299135 - DNA, 2876 bp, Cannabis indica
ttaagtgttttggaataattatatttatgatgatttcaaaaaaaaaaattgtgataattcaaaccgcataaaccgcaaaaaccgcaccgcaccgcatcattttttgcagtgcggttttttagtatcgcagtgcgggtgcggtttggaaaattggaaaaactgcatgtgcgggttggtttgaaaaaatggttaaaaaccgcaccacccgcaccgcgaacacccctagttttaatattcggtacttgtaaaaaaaaataaaaaaaatatttcaatatgtgaatgttgactaagaaattgtaatagaaatttgtaatcaccttctaaaaaaaatatatatatacataaaaaatctaccaaaacaccaaacggtagatttacccggaaatttatatgtcagtaattattattgaagaaaatcattttctacaatcgcccatgtgagtgttcttcttctatgaatttaagaaacagaaaaatttattgaaaaccgacttagattaatgtctcttatcaaagaatacaaaaccaaccctcaagtctttcactcaattacaattataataaatagacaaaaacaaaaatttgaatataccctttatcaaaaaaaaaaaatctgacaaagggtaatacataaccaaaaagcaagaaaaaatagaaaaaattaacaaatgtgcatgaaattgaaaaatgaccatttttcatagtgacacttgcctctgcattttcatctcttcataaaacctttcaataaacttctcagctcttaaatcaatcgaaccatcatcttcttcttcttcttcttcttcttcttcttcttcatcatgatcatcccaatccaacgctccacaattgactttgatttcttcatcaacggctggaaagttattacaaagaaaaagcattgaataaactctttggaggcttattccaaatccaagttgattttgatgcttttgctttctttggtacccaataagaggatgagtcttagaaggagagaactcataatctgtaatatacccataattgtaataatacttcttatgattttgaacaagattgactttgaaattcctcaccaatttctgtgatttcataaacacaacaagctttggaataatgggttttctcatttttgccataaagattgaaactttaagcatttttgagactttgtgaaagatgggcaattttcttctaggcattttttggggtttttagacaaaaagattgaagctgtgaatttgagaggtataaatggttggagccatgagaggcaagagtggtttaaatggtgaagaaaaaggtaaaaaggtgggtgtgtggtcgtggtcggtggcactttggacttattatatatacatattgtatgaaatataagaaggtagccgttgaacccttgtggggttcaatcctttccctctaagttttcaaaatcaaaactttgcaacttttcaaggtcataactttatatgtggttattcaacctttttggggataaaaataagtttaccttttactgcatgttacttaagtaagtaagtgattttgcaggatatataatataggataagttaatactttagtatgtaagtgttttggtagatttcttatatgtttcggtatactggagagttatttaggaccatttataaattttcaaaaaaatttgggtagtttataataacgaaaataagatttatatattttattgtacgcgtgattatttttttatgcatgtggtaattaattgtttaaatttaattccggtactctaaactatccagaattttttaaaaattttcaagtgatcctaaataattacaatatacgctatcataaataaaaaaaattagagtaaaaaaattttctaagtaaacaatcaaataaaaaaaatctaacaaaaccataatgtaaaaggtatatatattacaacaaattggagtaatattataataatttaagcaccaacttttgatacgtgaaattgagtgcttatttgggttgtaattgagatcaaatttgaagtcaaaggctcaagggttattttcttaataatattttcaatggtggggttagccatcaacgtcaagaagcttgttattaaataataatttaggaataatattagagattaggaattaaaacagaatatagcattagaatttacaaacaagttgacaataaaaaaaattaccaaacattttttcaaaaaaaaaaaattaccaaactatagctctctaaattgttagagatgatcttgattaaaacgttaacactttgaatttgcacatttaaataagaaaatactagttgagaacatttaaaaaagaaaaagaaaaacttattcatcccacactttatcaaaatctcaaagagaaagaaatcaatgagcttttgatgaataaaagaagaattggtagaaaacaagtggaattgaactacatcatattattgttgattatataattatgtatagttgtgataaataatacatcttaatacgtaaaaaatattccataagctaattaaaaaattattgtagataaaatatgagcataacgtaagggggtgattgtgatccgtgatccgtaagggaaaataccaggtaagctgtgcaatcccacattgcctgagtaacaaagtgcatcttatttttcggtagctcatcacaaaagaactccacagttaagcgtgcttagcctggagcaatttcaggatgggtgactttttgggaagttttcctaggaagcgtgcgagtgaggacaaagcatgctggaaatactcgcgttggcttgtagggctagtcgtcagtccatgaagcagccagagtggtgtactcgtgtataagagccatcattccgtgagtttatggg

SEQ ID NO: 299136 - DNA, 7294 bp, Cannabis indica
cgggcaaccggaaatgacaaaattatgaaattgcactatatgacaataaaaatgcattctagaattacaaatataacaacaattaaataattatttaaatatctataaataattttcataattaaatcttaattatctgctaatttccaaattaattaagcggtctttatacatttcaagctaacccaagaaagtatttaatttttggaaagaattctctaagagttctatcttcagttctctgttacaagacaaataccttcacaactggagaatcttgtacgaaataaagcaaagataagagaaacctttgaaggactatattcaacggttcatggaacagacaggcagtatagcaactaacaccgaatccggccaatttatccaacccaaagttcatttcccacatgccccccaatgttgctaggcccgacaataagtgaatttatttacaatacataaaaatgcatttccgtttcatgaacatattttagaaatttattcgttatgtaattagtaaaagcataagaaattatgcaactcattgtgtacattaacacaaaagattatgaataacaaacttgaaatatttttatagttcagcaaacatgatacatattgtttaagaaaaacatcaatattcaaagagtatagtgttggttaatggcttcgatatctagacccctcagcttggcaaatgactcaacttttccttttagagtatgaatctcccgtaatctgcataatccaaatcaattgattaagcatactgcaaatttagacaatgaccaagaacaatatgactgaaaagacttgtataattcaaaactcaaattactactaacactttcttctctttactagacatactagactgttgaatgaagttgaagactaagtttacctggcaatctctgctcgccttcttgcttcttccgccatgagatttatgtctctaaaagtggtggccctctcagaaattggttttgtctctccaatctgaagaccgtgcaatgttctctgctcagtcgcccatgctgcttcgcgagcttcctttccaaagtccttcttgtttgtaaatgcagtctggaatgatagatgcaaacaaggattcttagaaacatttcgcttttgatcaatctttattagtctctatctcaaaatagttagatttgtacagtgagttattcagtactttgattaatgataaagcataagaggaagaatgaagatggatcttacccgttgttcaactaccaaattccaggccctgccactaagagcataccgaacgccaaacttgagtggatcaagcagcaagtacgtcaaaatattatacatccaaattataagggtccatccccagccaatacttttgatgccagcaaatttccaagttgcagtagctgatattactgtagcaatctacatatgagatattttaagtgataaactttatgtgagataagatgtggttgaaacttggtttcacataacaaaaaaaaaaaacaagggcaacaattcgtgtaccagttgagcaatgatgaaggccgaaacaagtaagaggccaggtctttcaaagtatgaccaaccccttgaacgagtcacaaatattaaggcctggctaatggtactgacttgaagatatacagcagatgctaatctttgttgaagtacttcgtctgacttgctgaagtcttttttatacatactaaccacattaaaatgtttctgcatgtagaaaaatacttactattataattcagaaaaaaataatatttcaaagaaatattaaactcagatcaattgtgtttcctttcaatgaacataagtagtatcaagttgtttttgaacaaacagtaataaaagtcagattagtataaggtgatttaccggaaagtaattagtttcataggttatcaagaagaatataacggtcataagagccagataagcaccaaggacaaccccagttgcaaaaatttcactgagcttccaactgtcaggaactggagatggctttactctgtcttttgatatggtcattatagtacctgtcatgaagcgtaaatgtaagcgacagttaagaaagaaacttgtggagataacataacaaatattttttcccaaaagaagaaagttgagtcaaactctgttaagtagatagaaaaagtataaggaaagcttaccatcattaagaatagcaatgacaagaaccatgaaaggagggaagtcaaatctccagaagactgtcagcaacataaatcctagctgtaatacaaaattcaagttccaagttatattagtattttggtaagagagattgtgagatatatatttccaactcatacattgttgtaatttggattgctaacttaccacaatacgtattgtgattgacacagcatatatctggaaatgggaaagaaaattagaaggcaaactctgcatttgttacatacacataccaacagaatattaagagttataatttgccttttccataaattttaccgtgtagtttttcattctttggaaaattgcacggcttgttaagacagcacttatgatgacactcaatcctggctcagttagaactatatcagaagcactacgagcagcatctgtggaatcatccacagcaattcctatgtcagctttctttaaggcaggtgcatcattcactccatcaccagtcattccacagatgtgttttctgtcttgcaatctccttacaatctcatatttgtgttctgaaataagagacacagttatgagcatcagaaacttagaatttaagagcacgaatgtaactaccaaagaatgatgtgacttctaaaaactgaccaggaaagacaccagcgaaaccatcagcattctcaatgagctcatctattggaagggtagcaagtccatccttgttttcacttaagagagaagaagaaggatacatgtttgtgcccatgccaagcctccttccagtttccttagcgatagctagttggtctcctgcaggttgaccaaacatgtaagttattattaaagtgcacctcttctttcatatcaatttttattagtgttatgcaaagatagatgacaaattttatatggaaaaaagaaatttttacgggagaatagctccatcagcaatgaagcacacctgtgatcattttaacactcacaccaagatcaagagctcttctgattgtttcaccactgtcatggcgaggagggtcaaagagtgggagaagagcaacaaattcccagggaccaccaggactgtctttggttccctcaggtacttgctatagataagcattcaagttaatttcaccttaaaagtcttatgagaaaacatggcatatgggattaaaactaaaattaagtagagataatagacctggcgtgctattccaagggatcgcaatccacgttctgcaaatttatcaattattgcatgtaccctcttttcaatttctgatctattatgtgctagattgagaatctacatgacatttgtttgaaaaatatcagtttgattcttataaggcatttcttaaacttttcaagtcatccttacctgttctggtgcacctttgctgaccctgtgcattttcccactaccatcaatatacgtaagtgcagttcttttatcagttggattgaatggaaggaagtgaacctctgtaattccagctcgtgcctttacaatttaaaaatgaacatgtcaatatattatatatgtaacttcggtagttgacacatatgaaataagcacatagccatgcagttcaaaaattatataatatgtgatgtaatacctctttagggtctgccaacattgcaacaattgcagtgtcaatagcatcttgattttctagccttgatgctcttgctgccataagtacaaccatttccctgtcaacacctttggcaaatatctgtagtttcagtaatgatgtaaagcgatattagtctttcacaacaagaatataatatatttctaaagtatataaaagaaagatgattattttgctaacatgatgcatgatgcatcccatgtaaattcataaaagcaatagcaagggaactagagtaaacctcaatcatgcttttgtctacagtaagcttgttaagtgtcaatgtgcctgttttgtcactgcataggacatccattccagccatttcttcaatggcagtcattctctttgtgatggcaccctgcaagaaacatattatcaccattatcacccaatcatccctttaattgtcaaagctgtgtatattttcttttcttattttattcttcttattagcagcatttgatcaaaagataatcagcaacataaattatctgaactaaatttgttactattaatgaattttcatagacaactactaatttagttttggcatcacaaaacctgctgtgataaacgatgagatccaatagccattgtaacagaaagaacagttggcatggcaataggaatgccaccaattaggagcacaagtaggctgttgataccatcacggtatcctctatgttgcagaccatatatcactactatttcaatagccatcccaatagcaatcgaacaaatgcagaagtttccgattgatgttaggacctgaaacaccatcagtgaaagaaaacaaaccagtcaatcaaaagattattttgacaattaaatatgaaaaagtatgtgaaaatgaaacataagaataatgacatttaaaatattataattaaaccttctgaaaatggccaacatgtgttgtgttttccacaagatgagctgcctttccaaagaaagtgtgaactccagttgcaatgacaactgcttcgatttcaccttgcttgcaggttgaacctgagtaaaccccatcacctggattttttgatactggaagtgattctcctgtaagagcagactgagagcatagaagatgtcaaaattcaacacagagtgaaacttaatcacgggttttttagcgttccactacacatggtaaagaagattttagggtgggaattcaactgttacatgaccatattagaaagtctctgatgcctagtatgctaatacatgtaggaaatcacatactcaacacagttatgaaaaccaattggtaaggtgcatgtggttctatctcaaaaccaatttgtaataagaggagtgacacattcatctttccatatgcaggactaactagagatcggtcatgtaaaagattttttttttttctcaattacctgatcaatctttaaaggatctccttcaagaaggcgtgcatcagcaggaatgatgtcaccaagtttaatactaactatgtctccaggaaccaacactgaagcatcctcctcactccatttcccatcacgcagtacctagtaattagaaacatagcacagagatcagaaaacgctttacaaatagcataaagtttctgaggtataggttcaagctttattggaatgatttatgaataggattatgacctttcctttcggtgctaaccgagccattagagcggctgcagcattaccagcattgttttcctcaataaaactaatggttgaattgataatgagcaaggctgtgattccaacaaaatctgggtaatctaagtcattgtctttctgccataacaaataaggttatatcaacaggcaggtaacttgcagtgtggaaaaactaattccaatagaaatgtttctaaattgaatttgattgttaaagcttaaatatttaaaaaatctttcaaatctaacaaatctaggaaagaaaaataagaaaaaaagagaaacacttttagaatgccatgttcttctttccagattctccttgatatagtatttttgagaaagtaatacaaacataccccaataggtgtaagagcaatggccattattgctgcagcttccatgacccatgacaatggattccacataaagcccaaaaacttcagtattttactttcctacgtattaacagtaacatgaaacaatcagtcaattaatttaagaaacaaaaaaacatattattgataatacaatgtcacgctgaaactctattgctaaccttcttttcttcaagcttattataaccaaacatatccaatcgcttttgaacttcatcagagctcagaccatcttttgtacatttaagatgctcgaaaacctcttctataggaatattctcctgtacaatgaaactccaagtttaccaaatctgtcttgttacagctatttttgttttaacaaagatatattggacaagaacaaactttgatacatacaatgatcagagtgagtgtgctgctaagtacaagtaattgttcatatttagattactagagattcaatacatgttggaagctcatgacatgaatcattaggacataccaaatcaacagcttctttagcaatagcatcgagtccacctgggccatcaaccatcttggattcttcttttaaccacaaccttaattacttgcagaaaactgcaatatgttacacacacttaaaattaaactgcttattcatttcactatgaactttttgcttattcatttgagaagttgatgtagcaagagaagagaagaaaaatgatatctagcaccgtaaaacaaacaagtaagaaatcaggggtaactagacagttaaaacggccatttataaaaatgatttatacattgtgttcctgtaaatagtagtctagtctactccacaagtattgaccttattgattttatatattgtttgaaaaattataacatcttttttttaagaaaatagtttgcacctatttgacaaattccctgtaaagctccttagagagctcaagagtaacgcttttgggtagactggagagtcagagtgtaacaagaacgaaagtcagagttggaagatatagaggctaaaaggatagatgtcaacatcaaattgaaataaataatgtattggagtaaagtattttattaaatttatttaccatttatataaacttgaaataaatatatctctttccttgaaatcaattaagtaatttagttggttagataattatatattaaaattttttcaaaattataagctttatagtaaattttagggtaaatactattttggaccttgtgttttgtaaaagttacagattggaccctgtgttttgttaaatgacaaaatagaccctgtattttctaaaatagtaaaaataggaccctgagcttaatttttgataactttttattaatacaaccaacttgaagacaatgcttaatacgaaca

SEQ ID NO: 299137 - DNA, 3661 bp, Cannabis indica
ctaggttaacttgggcgttgggcgcagttttgatgcctatgttgttgtcattttctccccgagtttatacagttatcttcgttattttttatgacaaaaaaatgcccagaacaaatttttgaaaacatgattggaaatagcccaggttgacaatacgccaacctgggcgctgggtctagtttcaagcctctaggaagtttcgtttgctcctaaaaaatacttgaatcttaatctttgatgaaaacagagaatgtgcctagaagactttttggaaaaactcattggaattggcccaagttgactaaatgtcaacctgggcactagaccatcaccaggtgtcaacctaggccttggtcccttattttggcctctaggttggtctgtttccaccaaaacacttgcttccttatttttttattaagacgaaaaagatgctcgagtcagattttcagtttgatgcttagaagttgcccaggtgacaaattgtcaacctgggcaccgggtgctcaaaaatgaaagttctccaaatctaattctgatgcttcaaatatgttcgtggtatttctagttcatgtcccaatgaaaagtttgacccatttgtgctaagacagtcctaaaaattgaaacccaagttggatggtcaacctgtgcgctgggtgaaaccctaggtgctcgagttaatttttgaggtgttatttcgtatgttttcagctcccaaaccttggacttggatgcttcatgtcttcgtgatacaaaatactgaaaggtagtgagttggaaacaacttcacaggatccaaacacctattttggagttcctaaagtcaacttgggcgcagggctagggactctcccaggtcgaattgctatgatccgggactactcaactctaggattttgtttcttgccatgcgtctaaaattaatgtccatgtcaccagggctacttttggcttaaacaccaagatatcaccatctggtggtgctggaattggagctgatggttatggagaggatcaatagctggaggttgaggaagtgtgcctttgagaaagattgtcttatttctagcaccaacagaaagttcaaagtcacaacggcatggctgaaatttttcatccgaaagtggtggtgtgaccaagattaggtcgggattatcacttgaacccaagaaatatgaactcgatccatcttcatgagcttgaggaatgggagcaggattgttttgtggtgcaagatctccggtgactgtggtagttggaggaatcatcgaaggaaaatctagaagtgatgaggaagtgtgcaacggagtagtgcgaccaacgttcctggatctagtagcacgagttcttactatgaagattttaatggcagaaagcttcgagagattggagagcaaaattcaaagaagtttcagtaggaatgtcaatcgggccgggctgggcctgacccgccacaaacccggcccgacccgatattactttggcccgacccggtccgaccagacttaacctgtatgacaagcatagtttggctctactattttgttttatttgggctatatagaatcaacataataatctttttcataacaaaagggggttttttcccacacaattttttgactatgttgctaattatccgtatgattatgttaatgcacattgtgaacaaattaaattgttagcacacatgcatgctataaataaccaggtacctcgactcgctcttgggcaatggatagtccacactgatgctgccattgaatttgtttccaagaggcacaattatggagttgtggctagggatgctggtgataatctaaaggcagtgtttatagccccttttacaagtgtgattccttctaaggtagctgaaggcaaagcaatcctagcagctatatcttggattcaagcagccaagttgccagtttcaattattgctttagattgtaaaaatgtggtggacaaaattaatagctcttattgtaatcaattgttcttagtgacattattaattgcattaggaattcattgttgtttagtcctaacttgcttataatttatgtaccacgagatagcaataagttagtctatagtcatgctaaggccgacttagtattagacagtgagtaattttggaatggttccttaccttttatattgggctgattactttgtatctcaactttgtttctgtttctttaatgaaaattttcaggtttcttataaagcaaagaaaaaaaaaaattgagtaacttattgactgatacaaaagaatgatatataatacactctaaaactaagtaagaaaacaaaaaaaaccatttatcaagactaagaagtgtgctgtatgacacttttattttagtaggattctaatggaacgaaacttactgaataatcattttaaataatttaacaccttaaatttaagaagtacctcaaattattatcttaaaagaatggagagagaaatatcataacatgaaattttcataatatgtattattttttatttttattttttgatattatctattggtttttcttcttcgactttttgtaagttggttggcattagcttttcttcaatttgaaaaaaatgagtgatctaataaataaaaaatggtcaaaccattttcggagaccaaacttaaaaactgatgtgattggttaataattaactatcatatttagtttcacaaaatacccaattgacaaaaagcacattgccttcctttagctttttcgataaattaagacctcaaaaaaattgtcggtaggatttgttgattacatttatattttaaaggattgattatacaaaatttccttataagatgatattaatttttgaaatatatttaattaatcaatataaataaattaataaaaaaaaattgttcacaattttgatgctttcgtgtgttattggaaagtaaggccaaataactggaaataaaaaataatggcatttggtacatccaataatttattataatatttggtgggtaggatgagaaaagttttcaagcttctacaacatttatatttgattttaattttaatgtaatgaaattttggtctgctccaccgacaaaggaggaatgcgtgtgtgggtccaaagcctttgctgtgtccaccttagcagcctctctttcattacatgatttttattttgttattgttcattttggcagaatgtctttctctcaattcccaaattgtccctccataataaatcccaacgtgttttcatgcacatggcaagaggggagctttatatgtataagtgaagaagattaatatgctaatgcacaatttcatatcatgtaaatatttcttatacacttaattcggatttttctgggaattttacaaaaatactgcttttggaccaaaactttacaattatactgggacacggcaaaaataacatttttactgccccagcccaatttcattacttttgtactgcccaagcccaacagcataacatttatactgtgtgtgtggggaaacaaccttcttcgtgtgtggggagacgccggagacggaaatcaccaagaaaaaaccattaaaaccggcaagaataaacaaaagcagtaaaatcgacgtcaataaataatcatggcaaaacaacagtaaaacaacactaaaa

SEQ ID NO: 299138 - DNA, 904 bp, Cannabis indica
ttaattgactaattgcataattttgttttaaaagttttaatttaccgaaattagtttaaatttccaattcaccccccttcttggaaacatatcttgggctaacacttttgtcatattttacactatcttttctcctctcatggtattaatatggactcggttagtattgcacttaggggcattcaaaatcatatgaacgatcaacaatttcattaccttacaaaggctttcgatttctctgaagtcaagtctgctctttttcaactgtcaggggataaagcccctgaacctgatggtcttaatcctcttttctatcaaaaaaactgggctatttttggttcaaaattttgccatgctattatggatgttttaaataatgaggataatattgctcccattaatgaaacttaccttgttcttattccaaagaaaaataatgctactaaagttcgagacttcagacccattagtttatgctctactatttataaggttgttgctaaaactttaggtaatagacttaaagttatgtttaataaccttgtctctcataatcaaggagctttccttaatattagagtgatttttgacaacattattattgctaacgagattattaatgctatcaataatagaaagaaaggcatgctaggttgggtggcttttaagcttgatatggagaaagcattttataaagtggaatgcggttttattaagtattattgactttgcttttagccaacgacaatgagtctttttgataagcgataaacgatatgtcgtaataagaatacgtagtaaagcaataataaaaagacacagaaattttatagaggttcagccccgagaattttggtaatagcctaatcctccttagttttattgacttaagaataaggaagaa

SEQ ID NO: 299139 - DNA, 1642 bp, Cannabis indica
taggtgctgggttcgggttgagctgggccagaaaaattgcctttttcttaataaatttgtatcagatttttcttttttaagaaataaaaaacattaaataaataatgaaaacaacagtatagaaggaaaataatataaccctaaccattccatcctccggctccgtcttgtagagtctggctactagtataagccttttcactattgtgaatattggtctgtttgtcccagtttctaagtttttcagtgggatttggctgatacttttgaagagctcgagagatggcagaaaagggaaaggaaatttgtatggatgttagagatgaacaaagggataaactgctggagagggatagcaacatggagatggaaatgctggagttatttgaagacataactcttgaggatgtggtagctactaaagcttgtgttggaagggtgattggatgcaaggatatgccagcctcagttgtgaagaagattctcttgggagtttggcgccggttggggtattggagaatgaaaaaatgtgaggatggggttcttggattcttctttgaagaggaagaggactacaatttcgtaatggatagaagaccttggatcatcaatggtgtccttctcaatttgaagtcgtggcctattgaaggtgaggttagtcttggggagtttgaagtagctctattttgggtccaattccacggactcccgacaaggatcttatcaaatgacaacatcccgattcttgctaagaaggtgggtaatctggtcaaacaagaagaaaaacgcaaggaggagttggttcaacgggggtttttgagatgttggattgaagtttggctttctcacccaataccggcgggtttctttctcaaatcggatgggaaaccagagtcctgggtgcaattcaaatacgaaaagctgccccatatttgtttcaactgcggcaagcttgctcactgggagaagctttgttcatcccagacggctatggtgattcctcgcattggttcagcagtgcagatgtatgggacatggttaaagagtgacacaggcagaagtaattgcttcaatatggctggaaagggcaccataaaatctttcgtggagtttgaagatgttccagaatgggattttgcgaaacaaaatcgcaggaatacgtggaggagattaaagaacacagtagctgagaagatttcggtggccggagattcgaacctcgacaaggaagaaggaaagcgcaacaaacgaaaagttgtgcatggtgaatcctccactaccactgtacgatctgacaaggtgtgtacgaatttggttgatcatgcaaaggggaatgaggaggcgtgtgaagttggtcccactgtggaaaacgtgggaattgaaacaaatggaccgttggtgaatattcagcaggattttgggccgaatatgttccacctacctacccctgatttctctttgaatgctgaaggattggacattattcctgatgttgggtcccgtctattgcccaaagcactactacaaatattcgttttcgcgacggttttaaaacgaatttttttgggaccgtcgctaaaaaattaagtaactgttcaaaaccgtcgggaaaaataagcattcccgacggttttgaacagta

SEQ ID NO: 299140 - DNA, 840 bp, Cannabis indica
ttttttttaaaaaaaaacctatttctattttatgattccgtagatactttgatataaactataaaaactagcaggtttgatcctatcaaaagtgtagagaagtctttggacctaactgtagggttatttatttccaacgccatcctttgctcgaactaaagcacacgttccaattgattgccttctccattgaacaatgtgaaggttagcatcatgaagcccttaggctttagctcttcaataacttatttggaaaatggagatttgactatatttcttatagttgttgtattcggatcatatatctctgcggcgtttccttttcgaattttggccacgacctctctcataacttgatctttccactttaataggtcatctttagactataccaaatcaggatcctgagactagatcataactagtagcattctttgagttattttgtcttgggcattattatgttctacttccttttgtttgtaactatttgttgattgatagtgcttctgaagcacctaccctgttttggcagcattttcaaaaattgataaggaagaaaatcttcctttagtgatgtggctgatcttatctcttcgagcagttctttactaagtgttatgaattctggctcatttcttacttcctttgcagcgttctgagagattattgcttgttgaaactgctcttgaatactaaattcaaattccatacattaacatacagtttggatccattgatagaaaatggatattaataacttgtgaaagttgaactgtattgtattctggaaacaaaaatataaaatttctatctggaatctaaaatttaaagtcaaag

SEQ ID NO: 299141 - DNA, 4639 bp, Cannabis indica
tagaggcgacaatatgtcgccccaaatttagtcgcccctaataaattaatttgttgtagtgtacacaaaaacacataccactcacatattcgtatgatgctttcagtactactgtctacttaataaatcgattgccaacacatgtcctacaacatcaatcacccttatgaaatcattcataaacaaaaacctaactatgtctttctcaaaaattttggagttgcatgctttgcctgcatatataagaccttaccaatcacataaatttcaattttaaaaattaaaatgtgtcagtttaggatacaatgattctcacaagggctacaagtgcctcactccaacgggtcgtgtgtatatctcaagaaaggttatgttcaacgagatagaatttctcttcacaactagttttctcaataattaccaaaatcctcaacctctcattattcatagctcctcatggtcttcccttcatgttcctctttctaactaatgctcctccaactcctgttcatatccatctcctcccattgaagcatcacaacaagtacattcatgaccctctagccctcacagttttgcttctataggtcttcactgttctgtttcaggtcatgcaggggagaactgtgctgatttggatacttttggtgataattttgatgactttgatgctggtaatattcctgaaattcaacatgagcctccaccaaaactcattcatgcagaactagctcctgaaactatcaagtcacatcactacggcccacacatcctatgcttactcgtgctaaggcaggtatcttcaagctaaaaacttaccttaacgcctcaaaagctatctctgattgtgatgtaccagattctgttgagtttgctaaaaacaaaaaatggaaagctactatgaatatatactaggttcatgctctcaaagtcaacaagacatggatcttagttcctccctcaaaatttcaaaatcttgttggatgtaagtggatttttcagagtcaaaagaagggctgatggaactgttgaaagattaaaagcaaggttagtggccaaatgttttcatcaaagacccggcattaattttgattattaaactttcaaccccgtcgttaaggcaccaactgtgagaattatacatacaattacagtttcaagtggatgcatagaaaatcaaacaattaaatattaacaatgcctttctcaatgacatcttggaagaagaagtgtacatggctcaacctcaagggtttgaagaaaaagggaaagaaaactttgtttgtgtaaattgaacttgtcaatctatggcctaaaacaagctccaaaagattggtttgatcgattgaaaaataccttgctggagtgcaaatttgagaactctaagtgagacacatctttattcttttataaatctgaaacgatcattgtgctcatttatgtagatgatattatttttatagaaaataataccagtcatgttgaaaagtttgtttcagatttaaataagtatttcattttgaaggacctcgggccatttcactattttgggattgaagtgtacatagagatgaaacaagtatctacttgactcaaactcaatatattgaagatgtattaaaaagatttgacatatcgaatttcaagccttgtcccacacctattactgctggaaaaccattgtccactaatgatggtgaaccaatgagcaatccatcaacttatcaaagtatttattgaagcactttatacccgtgtcacacacgatcggatataacatataatgtaaaaaaactaagtcaattcttacaagctcccacaatagttcatttgagtgcagtaaaaagaatattgaggtattttaaaggcacaaagacataggggcttcacatcagcaacagtagcaagttaagtgtcataggttattcaaatgcgaactaggagtgtcgtccagaagtgatatgtggcaggatactgtgtgtatttggggtgaaaccttagtgtcttgctcgtctaagaagcaaccagtagtttcaaggtctagcacagaaagtgaatacaaagctttggtacatgttgcagcaaagatctcttggattgctgaaagaactaacatttccactcctaatgccatcaattgcatggtgtgattacataagtgccagtatacgtgcttcgaatttattcttccatgctcgtacaaaaaatatagaaattgatatgcactatgtaagggacaaagttttgcaaaagcaacttgaagtgcgatacatcccttcacatgatcaaatcacagacttatttaccaaaggactttcagcatccaaattttattttctagttgataaactcggtgtgagaacttcacccttccgtttgagggcaagtgttaaggaagagaaaatttccctattggtgcacaatattaaccaaatgatctcatacgagattatagaactctagcttatattagaagaatttactaaccaaatatttcttaaattaaattgacaaaatttctatagattagtataattcagatgaaatttttaatggtaaaaataaaattcaagcggcaattagatatgatcgttgtaatattttggagtgatgccttatttaaatattattgtatattattccaatatattctacttctacttctattttttttttaaaaaatcatatttgtaattatttttgttttagatacgtaggtagaaaagtttagcatgcacgtaggtagaaaaatactagttcaaaggaataaacttttgatgtataataacataattggcaaatagaaattaatttttgatacattatgaattcaattatatatctcttaacacaatataatgctgataatgatgaaaaaagcaaaacacaaaaattaaattgaatactaattaaaaaaatattaattagtacttacacgaacacaaagatgcatgtatgtatatatgattattattgaaaatcaaatattgattaattaatatggaggatgatgatatgcataagtatgatcataggaacaatgcaacaacagcaacaagaatggagatcgtggcaaatactggccgtcgttcagcaccagatgtatttgtcgaagtggctactgtttcatcatcattggatgatgatgatgatgatgttggcgacgatgatgatgtagatgttgaagatggttttaatgaggacgagggtgattcagacgattcagtagatgccatcgattttttcttaggctttaaggctaccgcgggtgctggagacggtgccagtgagctcatcagcttcttaggagcaaaaattttcataggaagcaagacactattaactcgatagatagcgagttggttatcggaataaacagttccagatatggttgtgttgacaacaccagtggatatgttgacagaagatccgtcagtactagtaatgtttaatgggaagtcgcgagtgttaatggctcgagtatgaacagggtttgttagggtttggaagttttgtaggggtatgaaggctgagatgatgtgaaactggaccagttgtgttttttgttggggagtgagagtgttgagtgttccagtcttaagggctgagaatgctccattggttggagcaaaaatggtgacagtttggaagagttgagatcattttcgatgggagtgatgacatcagtgtttgttagtagacgaataaacaggctgaaatcgccggctttctccaagatttctgtaatgttggtgggatgtccttttctcctggaaatagccgctggtggagcttccaccaatggctgatccggcgattgagctggcgattgatgtgatgacggatgaatattcttcttatttggtgttgttgatggtgcttgagcaggtgatgacaactgagctaatgtcagagtatggaagagggagaggaataaaattaggcatgaaatggtgatcaaaatctgactttttgccatggttattaatttttattaattgatataggttggatttcttagctagaaaaaaattatgatgatagaaaattggtttgaaaatggttagttaaacttgaatgaatctaagctgagagatgtgagtatttatatattatttcactatatagtttacttcattatatgttggttgagagagaagtaaagttttacaataataagttaaattaaagggtgtaatgtcacattaattatatataagagttcgagtgtccatgcagtgagtagtactaataaaagaaagagatcagagggaactatcgaacaaatgtgatgctatcaataatcattttaacaatttcatgatcatattattatttattgtatatatatgatcatgaaatcactttcatatatagctagatcacaattatttgcatttgtcctaccaattatacagacgctatgttctaaatctaatccattcgtttcatataatagtgtgcatgcatataataaaaatctgtagacatatataagacatgatcattatgtgagataataattgatttaagtagaaatcatctcatatatattcggtgaaattgagtatatctttatatattaaaaaagtgcctatctaacggcaattcttggtttaacgattcttggtttaacgat

SEQ ID NO: 299142 - DNA, 4242 bp, Cannabis indica
ccataaaaaagtaaatggcaacaaaaacttccatatttatagttttttttcccttaaaagaactattacttcaaaatcaactaaacagaaatgaccttaggatttgtaatttgtttgccataccattaaaatttatccatcttttttactgtgcatagcttattattaaatgtcccatgatttgttagaatgttcccagccacacttagaataagaaaacggaattcccattatacttcattgccacattaaaaagaaaaaacaactcgataaaagcaccgtgaatcttatctaatccatgaatcagctcactagaaatgtacagtaaaatttggcaatcttttgctcctatatacaagtacaattaataagcactctcccccggatcccaagatatagtaaatataatatcaatgttgcgcttagaaaagataaattaaatcattgtaggaatagaaaagggagcatcacttaagctcattactaataaaagaaataaatctttcatcagaacaagaaaaaagataaaaatgaatagtaatgacaattataaacttgttaaaatacaacaatatatagaaaacaaattccacccactacatggttgccatcaacatggcacggattttggctctaaactcatcagagacctccgtggattcagagggctgtgatggggcactctcttgttggtatgattttaacaaatctatagaagtttccctactcactcggtcactttcatttgcttttgattgatctgacttagcacagatctccccttcttccaactcgggttctctttcagacctatgtttcctatgtttagtggttttgctcctgtgacgacccttgttgtcaggggaaccaccatttttgtgtccatgttcagtcctctgctcatactcatcttcagatgaaccaccacacttgtgtctgtgtctagtaagtcgatgttcatcgtcagatgagatatgatgtttatgctgccttcttgaggatctatgttccccactatctgaggggctattgtgttttcgtcgataccgagaacaccgatcatcgtctatgccacacttacgactgtgttgagattctctgtctttggacgaggaatgtcgtttcctgtgcctatgcttgtcttcactgtggcgtgatgatttataagaacggtgcttcttccttgaatgcttatgatctattttatcatcttcttcctcctcctcaacactctcttcttcatctccttcatgtcttttagatttcgaccggtagctcctctttgatctttgttcgttgcgttcgtcaacaataattttcttctcagatttatcaatatagcccaaggcatcaacatccattggaaccgaactaccctccctttctttccctaatgaaattggaacctcattgccagaggaggaaatcccagaaccaggtggttcaaatgatgaactatgcaatggcttcggtttcaaaggtgcagctccactttttatcatggcagcaaacgttttagcacgtttcaatctctcagccttcagcttttcttctttagtcaaggatgcttcagaggaatcagcctcactagcagctgcacgagcagccgtctctgctctaaccgttgctacaggggaagcaacgctaggctgcccaactgcattttgcttttggactgaactttgaggttgagatgtgtggagactcccaaagcttaaggactgtccagactcatcactggggtcttcaccaatactgccccatgaaagctttgggaacagctcaagatttggattcttgatgcccctggtggcagccctaagtatagctgcagtaacatctgcatctatagtgacttcaccttggggctggttcacattaggaggtggatctagtacatccttcttggattttccaattatcattcggaatttctccttatcgtagtcacaaggtatgtcattatcagcgaatcccgaagaatttgcattaccttctccacatttagcacttcttttctccattccatgccccatggatccatgcttttcagagacacagcctttgccaggtatgccagactgttgaggaagtcaagcacattagtgacaaggaagaaaaaataaataaactcaaatatgaaaattgcattatcaactaaaaagtagcaaagaaatggagacgacaataaatttattcttatcaaaggatacagtaatatggtctcaccaaaataataaactttaaagtgatcattggaggataccagttactggacatgtgcttcgtttattagaaatgacgagaataagggtgaaataattgctactttttgctgatcaataagtgactacttttgtaaaatactacttgtaaaaaacaagtgaactactaccccgaaacacaatagtataatatgaaaaggcccaaatcaaagcattggaatggttatatgttagtcgatgcttggtatgcaacatatcggagggagatctataaagcaagcacaaagcacatatacagaacgtcaaaagaaaattcaaggtacccaactgactggcaatgagaactaattgaatggagaagttcagacatcataactagtaaaagggagcatgaaaggggttcaataatcagttttgtatcaaagaggcatacatagataactactacaccaagtctttaatattcagcaaaagaatgaaaaggaaatctctattactataaatgttgtggaaataacatgaaataatgttttgtaagatttacctcctgattcttttgaagaacctttaaatagtaaggatgatactgattagtaggcagaagaaattcgaatcttctatatggttgatcctgttcagcaagtatagcttcaaatttcttgccattttttaagataaactcaactatcttgtcaactgttcttttaaatcagatggaggctccaatataggtctttcaacttttggtatgctaggccctgcaaatgcctgtgacttactggtagcagcacaaattgaccccaagccaactccatccttttttagcaatgacgtagttcgacttttgacattattattaatgctttgatttcgttttattacatggaccttttcttttaaagaagatttattgttggaaacatcacttttcaccattacatttactgtagattcagtgtgttccgatctgtgtgaaacactaccacttacaccatcaaccatttcattagacctatttgtatttgcttcaggtgcatcctcagttgtgtcatcctcttcctctccagacccataaattgaaccaagcaaagacagtgcaccaccagtctgatcacgtcttgtatcacccttcttctcttcttctagttgctttccatcaacatcagactttagtagttcttgatgatcgacaaggaatctaaagtacgcatgaagagaatgatcaggcatcaagaacccaaatgttgggttgtctccttgttttactctcaaaacaatttctgattgcccaccatgctggctgacaaatgtagcagttcttgcaatgatttgatgtaccttttctgatggaggctgaaaaaacaggcgagcaaaattttttttaaaaatctaagaaatatcacttatgcaaggaaaaagatcaataaacttttgtacttaatcctaacacaaacccatagaacctcccatattctggataacaataaaaaccaagaaagagtatcctatgatgttatgtctcaaccaatatgctcacaatcaataagattcatcgaatttctaccatcctaatcccacctgcacagccccttgtggcacaagaactccatctttgctccgagcatctgaaacttaagacatggtaatccttagaataacatatgcatcttagtggaatatcatcttgtcaggccacattgaagtatcaaacacacatgaacatttgtattccatgaacgacagaggtgaaaattgagactcactaggttttgaatcaagctttctggcacaggaaatggtgggtggaatatagattcaacttcagtgtctttctgctcagctgctccatctaaattttcgtaactgaaggcaacagcacgatagccactgtcaactactgcttcttcatctttagatacacctgaacataaggtaatcaaattaaaataataactctaacataaacacttcttcatggaaatcctatcagatatcagttacagaaggaaaaaaaaaa

SEQ ID NO: 299143 - DNA, 2763 bp, Cannabis indica
ttcttttctcttttgcatgaataatttttcaatgttggttttattaatgataagattattatttctaagaaaagtatgcctatttgttatgcaaaatagagttaatgaagttatgttctcaagccaagtgagcaattgatttcaaataatgattcgtttaaagtagctttgcctcaaggtttctgatgatgatgaaacatatctatgacatctatgtttatgccatcctggcctagacagaattaactggttagcaaaggatgctctttcgagagaactataggttggaactcttccagtatgtgaatcttgtctagaaggcaagatggcaaaaatacctttctctgcaaaaagcaatagtaccaaaaaataacttgagcttatacacactaatatgtgcggacctgtaaatatttaagcatgaggtggttatgaatacttttttatttttattgacaattattctagatacagtcatacttacctaatgtccaagaagtctaaaatttttggaaattcaaagacttcaaggctatggctaaaactaaattgggtaaatcattaaagacactttgatcaaatcatggtggcgagtatttagattctaaattataagtctatttgttggaagaagggatcttgtcccgacttataacacttagaacaactcagcataacgatgttgcagagagaagaaaccagacgttgttagacatgatcaaatcgatgaaggtaaattatttaataagtaattttaagtttgttttaaatattttcaatgaaggtactaactaatattttctttcttttgttttataggtcaagttcagcacgttatacacaaatgatgagataaatattctgtataattagtgagttgataacatttaagtagagttgatgcaataaggacaattatgagtatatgatcattcatgtatatttttggttagtttaaacactttgttttgattaagtaattagtttcataacttctaatatatattatatatggttaaattagaatcatcattaatttttaaataattaattaaacacattgcatgattattaagatagtttcttactattaggaatattttatattaactcaaccacatcattgtaactgtatatacaaaattgtaaaaaacctgaagactaatgcaagggaagaaatgacaaaaaaaattgcatttttttttttccattttgcaatatattgtcgaactgtagtcgacactattcaaaagaatagtcgtcatttacaactggttgattgactgactatagccgacagtgtagaatcgacaacaaatggttagtcgaccctattaaactgtcaacaactctactcagtattgtcgttagttttcaacagtcgtcaaaggtaatactcgactgatgcctattccgcctaattttacgtcagtagcataggcgtcaaacttaggacccaataacaaaagttaccccactattaaaaatggacgtaacgatgcaaaatggagcttacatatattcttttacttccccataagaattctatgtacattttatctatctctttaaaaaacaaattgaaggatattgtaaatactcatttaataactcttccagtaaagaaaagttcatcaaatatgtatttttttttagaatgtaaggaagattttagttttttataagattttttagaaaaagctatagtacaccatctcgggatatttcagtagaccatcattttgtttgtttcggcatatagaaaagttttttaatgttctttggtttaatgatcatgtacgttataattatttaagattacttgtaacttttcaaaaaattctaaattgtttataatgttaaaattaaggttcaaacaattttttttccaggcgtataagaaaaataattgtgtgtgacaataaatatttttttttcaattttctaaaaatttataagcggtacttaaataattacaacgtaaacaatcaatggaaaaaaaaattaactataaagctgttttggataccaaaacatataaaaaatctaatgtaggataaacttattccaaaaaaaaaattataaaattttgaaatacaaataaatttctcttttttaatttaatgctaaaaatgacctcaaagaataatgatagaatattaatggccatgattttaataattgaatgattgcttctattttttagagggaaaagaataattttatcatttgaaaaaataatttgattccaaggtgcatgcgtttcatttctgaccaacctaacatctactaagtttttgtaaaggaacccagcgaatcccaatgtgagaaacgaggggtcgtgtgttgagcctggttaactcagttacttgtgctgtgtacaaaaacacacatttagtctactgtcaaatcaggccatcacttcgatactcacccagccaccaaaacatcattcatgatatatatattttattttttgaaggtacacgatagtcttagattttcttcgcctaataattattctacattgaagaaagtacatttatataaatacaaggcagttcaagatttttatcaaacgtgaaaagtaaattactctgtagggttctttagtgttacacgaggcaatgacgacagagttgaaaacttgtatggtttttactttgtttcatagtttttaccatgcgtttttccaatttaccatcaaaacaaacctaatataaaaaccaacggtaactggaaaattgtgcagcatttttaatt

SEQ ID NO: 299144 - DNA, 1378 bp, Cannabis indica
taagcataacgaacacccccgtgaaaaaaatttaaagaaaaatattccgacatgtgttttcggacgtagagattgactaagaagttataacagaagattgacagtagcactcctcataataataattcaaccccaaaattttggtcggagtaggattatatagtattattttttttcattaggagtactatagtatatattagagtaaactcataataagaaattaaaaaattaattaaaaatatttttcaaagaattttttttaaaaaaaaaatatgtaatactaaaatgtgtgaaatgccgtgattattggatacacaaaagaaaatagagacatgctttttgtttgattcattgaatgaattaggatgagaggaaacagtttctacaaaggtataatgctttctcgaaagatggtgtagaaaagaaaactattttttttcttttgtttatttattttttaatgaaaaaaccatcttattttgttatttcgctcttgtctcttttttaacatatattattattattattattattattattattattattattattattattattattatcattattaataataataaattcgattaaatatatcgtaggattaatgatttaaataaatctgcggtcaaattatgaagagcagagagtacattttttagtatgatttggaaagtaatagcatacagtagtactttgaaatgggtataccggacatgcaatgcaactacagattttgtgggtttgatacaacacatatttatgcaagttgtattcttgtttgcgctttattaatttttcatgtcacgaatcgtatttgcgtcggttatataaactaaatttaaaaatttaacatgatgatactaaagcatataaaaatagcaatttagcttataatgcgtaaataccatgcaagatttttcatgttagtatgacacaaatatttatgtaagttgtgtttatgttcgtattttataaatttttgtatcgcaagacaaatttttaataaatttaagatcccatgtaggacatgctaccacaaattaccaacccttcactattatacatgaagatttttataacaagggtgtaactgtaattttggtgatgtgggttatagcaggaataagaagaaataatttatgagaaattttatttacaccctaaaaatttataagtacaatctattttttattttatataaaatttatatatttaattgtactaagtatttttaacttttttctttcaatttatattcttaaaaaatatacctatcaaacaaaattaaattatattttaaaaattatgacaaaaaattaaaataaaaaattatatgaaattttcttagaaaaatataaataaatat

SEQ ID NO: 299145 - DNA, 1793 bp, Cannabis indica
gtattaatgtggcgtaattcgagagtatagacacaaaatacctgtatattatggtactaatgtggtataattcgagagtagacataaaatagtaaatacatgtatgttatgttatgctacactaataaattattaggtttaatatctgcattcttaaaactaattaacactaagcttaattttaactaacttcaattaattatataaacttttgcattgcaattaatcttatggcctgaaaaaaggagtgaaatataatagaagtggcatacaattgttgctataattcaaaagaaatttttgccaaaggaaaaattgagagagattttggtcatgttaaaaaatacagggagacaaaattcagtagctagattcataattaagaggaaaacttatcgatacacaatatattatttcttttagtttttgtgataaaaaaaaatacatgatttgattatttcttaatatataaggacatttatgtttatttacaaaagcatatctattattaattaatgggtaactaacaatttggtacctttaagttttatttaaatacaaatttggtatatcttatattttctaataatactcatgagtcattacatactatgcaatttaaaaccatacaatactacctccactttcattggctatagcctaaagtggtttcttatgatattaatgctaatgtagttaggtaaactaatttgtatttaacacaatgctaatcccatgattaggtggtgttacactctataggaaagccttggggaaacctcttagtatcagtacaatagttataaatcatgtagttcctttgcacccatttcagcttcttctcaccatttggatccatttcttggttgaaccatggattggatggtccagggttagagccacaagaagatgaaccatagttcataacacaagcattggctttgaaattcctataggaggctgtgaaaggagccttggtccaatcagtcttcaccaaaccacctcttgtggcccaatcatctgcgttccaaagactcgagtataatctcattggttggtactttagatatgggacacctttcgattccaagttcttgaattttctaatcggtgtaccatccacagataagctgaaaattaaaacaagaaaataaaatactacaattaataaggtagggatggtgttgaaattaaaagttattatagttttttaatatgtatacttacattatgttcaaagggttccaaagaatggaatatgtgtggaaattggcagttgggtcaaaccaaaatttgaattgttgctctctatttcctttgccttgagtaaatatgtttgtgtgaatagtgtagggatcaccacttagatttcccaagaactcaaagtcaatctcatcccaagtttgcccttttgatgataactgaaaatttggaaaagaaaattaataggaatatatatatatattgttgttgtggttttatatttgtagatggattagttagatgttgtgttgtgttacttttatgtagtttaagattttgttgaattctacatatattagaaaataattcttttgattctattgataaaagtgtttctttattggtaattcaaattgttttagatgataatattgcattgcagttagtaagagttcttacaagttttggtgaaattttaaagaggtaatttacggtataaattaggggtgttcataaatagcaatccaatctaatccgcactattaattcaattcaattcgcaaagtgcggatatccgcacttgtacggat

SEQ ID NO: 299146 - DNA, 5548 bp, Cannabis indica
gaggtatttaggtaataaattgttcaaaatgaatttttcatgtaaaatttctattattattgaatgaatatatatatatatatatctcataataatctctattattagtaaccatatctcatatcattactaatataaaagggaaataaggaacaatctcatatcattactaatataaaagggaaataaggaacaatatctcatatcattactaatatatgtaagggaaataaggaataatgactcactcaggtataataaaggtcatgtgtaatcaagtgtggtgtgtgttgtaaactttgttctctatctattgagtcatttgtactaaagtgaagtgtgtgtaaactttgttttcatatatatggaagctttgttgtgatttatataagtataataattttcttctgtccaatttttcttttattatatatgctaagtttgtttatttctttattcctgtgaaataattgctactttgtataagttgtgtttatagaattataggtgaatcttggtgtttaaatatgtggtgaattataatacctaccaagaatcgaaaaacaacatgaactgaagtaataacacatgtcatcaagtaatgaacaaaaccagaaaatgtaatagaatattgaagattaaagaaattgacacgagtatggttcaccacccattttgtggtgactaatcactactttttggccaagctttattgatgtaaacaatggtggaatacaaggtcacagtaaagaaaaatcactcttcactaataatgtcttgcaccttacaaaatagctcacttgagagacttgtaaccataatcattcactttttggtcttggggtggaagttcaaatcggcaagctcaggccattgaaaccgaaaccctcatggagttcgtgggtgaaaagttcataccactataagatcaataaattttaagttaactcaagtagacaataaagggaagctcaagctttcataattgcaaattctgagcaatgaaaagggaagctcaagctttcataattgcaaattctgagcaatgaaaagggaattcttaaatattagtgaaaattgaagtccaaagggtttaggccattagaaccagaacctcaaggaaccgaaagtaaattgctttcgtgagaatttccatcctaaaattgatgggttaaagtaagtacactgaaatctaaaggctcaagccattagaatcggaacctctaggagtccctaaatcgataacataataaaaacgttgaaaaaagaactaagtataagattgaaacccaagggctcaagttgttggaaccggagcctcagagaattcagagtaaatagcttaattaaaattctataaagttataatgttatatgaatcagaaatgtgaaattatattcaaagtaataaaagctatcttaattcccaggaacttgtcaaaagatagataaaatattacaagtataaaacacatgtggttagggaaaaactattgactccacaaatactaaaagggaaacccatatcctctaaataaaaaataaaaggaaaaagttaattaaacttgaggttggacgatcgacgacgaatccttgggccagtggggttcaaagctggaagatcaaaagcgttgtatttttcttgggatggaaggttggcatcacgctctcatgcccgatggataacagtgagttcctaagatgcggagtcggcacatgtttcttgagacgaaagagcaacaagttgttcttgtgattctcaagttcttccttccaaagtatctcctgctctcaagcaataaacctggctctcgtctccttttcctttaggctaaatacattgagagacatgtctcagtctgtgtgccatatcgtaaatgttgccacctcaatgacttcttttagctctcgcaccctatctgcattcatgtcagaaatttcatttttttccatcatccaattaaagcttttgatcaagcttaaggtcttcttttgtagacaaggcattttcccgtttcttagaaagggcttggatttgtccctccaagagtcagacttactcaatctttgagttgaggtccatttgaagtgcgtcaaaattccccacaatgggctgtaacttgctctcagcctcattatacttggcttcatatgagatgagttggcagggggcttgggtataactgagttatttgaagtcttcagttgccttaatcgatttggttttttcctccaaataggtctatcttgtggattcaattttggcgcccactttcttcttccgaaccttcgtgaggttgtctttcatggcacaattttcttgattgtcttggtgcagggccttcttggctttctctagagttgccttggtactctccaactcctttttaacagtgtccaactctggcttattcttctccaggtccgctagggccacaatccttttcatttcggtggcatctcactcaacccgaacattttccagctctagagccaattttgttgttgtgttttcacgctcgacaagaaaagcatcttagaaagatgaaaagaagatacttagcaaaaaaaaatatcaaaccatagacaatttgaaagcaagtgctaccaaactagaacacttaccctaatgacatgatgacagagagtttgattgagtaacataaatcctcgctcgcggccatgacccacctctctagcctcaattgactcatggaggctgaaatttgtctgttgctacaaacttatccactattatcgtcttggaaggaatgttcggatcccttgcagccaactcgatgttctacctcagggtgatctgaccagtaggtgtatggacatcatccttcccaacatcataccttcagaggatcaattggcttctctcctcattcataaacatgccctccttatctaattgaactgacttttagttttgtggtactaaatcaggtacgcatcagaataaaagtatttgattatcactgtactacatcatcaggatcatcatatgtatatattatatttatataaaaaagaataaatgaaaaatataatttacctttcgaagcctatttgagtatcctcaagtctttccgcatgttgtatccttagttgatctcaaagtactcacatcgtagtctttcgaatcttccaccacacacaaggactagtgtgggctagtagaataaagtgtatacaaagttctggttgaattcttaacacatgagcaataactattctatagtgatggatagaaaagattaatcgaattaattatttttaggcttaccaaaaataatgtctataattttttgaatatacggtatatttaaattaaactaataatgcttttatttaaattcaatttatttaattaagacatatttaattatgttaataaataatataactggattctgttatagatatttatttcttataattgattgagagaatctctcaaccacttgagggaatctctcaattacctttagagaatatctcaaccaacagtaatatctttaactacttttcaaattcaaatttaaatgaatattgatcttttgaattaattaacccaaaaacaaatctagtgggacaaccctattagtgtgggcgcctatcactgtgccagaacacaatgatagtggtgccacctatgtcttaacgagacattgggaggtcttttatctagacaacttttatatttttcctaatttaattaataaatttaaaaataaattatttattataaaataaataattactattttgaaaaatcaaaatagattttttagaacttccataaatatacaacttttatccctaataataataatgtctagctttttctctctctcgatttttcgccccttttaccctgggttctgttcctatttatagatatctagggtaacagttattcccttgagatttattcattcataaccactcatgaaacattaatatttcccatgttttattattatgcatatgggataacattaagtaaccgttcaactgctcttttatctttatatacagacaactatgctgactctttactgtatttgtaggaaaactgctaagtatagggatacaacacttctcgtagttctcttttgccattttggaaggtattagcgaggcggttacttcaacgcataaagagtgagatgaatgaatgttgttatcactctttgaacatactcatgagtatgtgggtcaattagttgcaatctcttactcacaagtatgtgggtcaatgagctgtaagttctttgttaactcgtcttgaaaaactattccattatgtattctattcatcctgagatagacttgatgtctcatcaatcttactagttaataatttttattcttatctcacttctgcctatgtggtcgtaattttgaatatttctatcaattgtaatagctgaagtgatttatttaatgtgcatttaataatgcaattcttgagctgattcatattccttactcggtacacatgtcagcttctcattgcccatgcaatcatatcctcatgaagaacctctggctcacaaagcttcggcttttgaaatgttttcttttttatagtttttgaatttgatttttccctcaaaagtattaatgtggagttaatttcacaaaaataggcatgcatgggagagaaaaagccaagagttcaaaaatgggatagtgtacagccgtcaacacgatttctcacaataattgacataaaagagtagccaatcaaagagatcaaagtgtgaccatgcatatctgtgtggcaaagggtgtcatagtaccaagcagagtgtaaagtcgctatccaattagacgtttggacaggttagggacaaatgttatctcaatttcggcccacctgacgtggcacctgcacgtggccaaaagcagaagacacatgggagataggtgaacactaattggccaggctagtgtcgtgcagctccctaaccctcaagatcttagggttgtaagatccacttgttcaagcttctaaaacaagttcatcttaatatcagaatctccaacaaagctatggggatcatgaacggtttcaccaacaaagacagggatacacaagaccttggtcgaacctctagttggccggccaagggtgaaataacgaaatttgatcctagtcagactctgcttcagttggctaaatttacattcaacacacttcaagacatgttacttttgctagcacattttttgtgctggcaaaagtatggtattacactggtaatatggaatttacttcggatatattggcaaaaggggttagcaaattaacgttggtgttagaatttttgtcagcacaaaatgaaaagcgctggcaaaaatgacttttttcagcgcgtaagtgcgctagtaaaagttagattttagccactgcaaatgtgcgctggtaaaactttgacctttttgccagtgcagtttgcgaaatgcgctggtaaaagttacttttaccagcgcagtagcaaactgtactgataaaaatgatattcttgtagtg

SEQ ID NO: 299147 - DNA, 813 bp, Cannabis indica
aaacccaacactttgtccactcggaaagatgactattctgttgctgaggttgagtcgttactcatggttcaagaagttcgaattgagacatttgaatctgatcttgatatttcaaaaccagtagttaatctggcagctcaaccaccatcagctactcgaggaggccatcaaaacttctctccgattcaatttggttcttttatagggggcgtggctcttttcgtggcaactttcctccctacaccaccaatttcaatcactttcctccttacaacactggccatcatcaatatggtaatccctatactcctccatatccttcttttactaacaatcctcgtggatctcgaggaagttttttcgtggttgtttctcaggaattggaagagattcctctactcctaaggttcagtgtcaactatgtcataaacaaggccacacagtaaagtaatgtttctaccgattcgataaatcatttacaggacctgaatctttccaatcctttagtggatcggttgcaatggtagagatgcaagccctggttgctacacctgaatctatcactgaccaaagctggtatccggactcaggtgccaccaactatttaactccagatttacataatcttgtggctccccaagagtttcctggtttagatcagatccaaatgggtaatggctcaggtttgaatatccttcacattggtcacaactcttttatttctcccttctcttctcaatcccttaacttgaataatttacttcatgtacctgatattactaaaaacttaatgagtgtctcaatttgctaaag

SEQ ID NO: 299148 - DNA, 2521 bp, Cannabis indica
acagtccttttcgggttgaacccgacccgactatacgagttttcagttggtcaatttttttggcattggtcggggcgggtgttcgggttttccgggtctaaatgtgcagccctaatatctccacctaaaaaatttcctatatatacaattatagatatgtagtgattgtttttaataactagcatatagttttttttttaacaaaattttagaaatcaagcttaaattagctataataaataataataataatagtaaaattcaatacacgttctttttatggtagctgatttacttatgcatcttaaattatttgaaaaataagtgtaactgcattgtacggcaaaaaattaagttgacgtaggtattttgtagttggcaaagaattatgaaacaatgtacaatgatgctggtaaacattctctaccaaaagtaatgttacttccaaccaccaacgttagatagatataataacacttccaaatgcctaaaaccattgtaatctatcttattaagcatgaactaatgatacaacactagctatcgagtactcaaaaacaaaacttgaggctgaataataataataatatacatttttaatttctatattcatcacaatcacgagtgagctagttttgcaagcatagctaaatctaagatcttaacatcaagagtgtcatctacttttacaattccatcagtgccgtccactcctattagcttgccggtggctccgcgtaatgcaccacccatgatcttgattctgtcattcttcctcggcaccacagcctccaattcactaggaacggccaccatggattcactaccgccacccgaaccaagaactaccctacaagatccatcctgcaacaacagaaataacatcaatattattcaaacacatagtatttgcatgtctagaatgtcacttgcacttaaatctcacagtttatattagcaaaactaaagattaaaagggtgaatcaggaacgtactgagagtacgtcacggattgctccgacaatagcttcatctccagatctgcgtacagttaccaatatgtccggtacacaccatggaccttctgcatctccccctgaaaaataaatataaattgatcattacttaccgcaacactttcaagatcattcattaagaaataataatccagtaaattccaaatcaaacaacattctaatttataactacaaaacaaactagatattaaattgcaagtcttacctatgacaggagacatagcatctaaaccaccagtgcccggtgtcatcggctgccctccaggagttcccggaagataggatgctgaatttggagtcataggctgcccacccggagtggatggcatataagggcttggagcattggctgttcaaacacaaaaaacatgttaaaggaggcaaacaaaactcaatagaaagaggatgtagagaaagaaactatacaaattacaaaaaagaaatacataaaacaatgacgcatgctggtcattgatagatactagacataccataagaagaactactatcccttggtgttccagcttcactgtagttaccaccaggggtgttagcccaacctgaaccaggagttggtgcttcatatggacgtgaaggcgggctgcccggctgagaaaggaaaaaaaactgaatgtcaacgaaaaagccactacacttagcaaaagacaaatcacaaattatacaaaagattgctgacctgatactgtgggctggtagcccaagaaccagggtttccttcctcccagttatccctaaatttgtcgatatcaaaaacttgcaaaaattagtagcagttactcaaaaggtcacatataaggtgttgcacttttctcctcttgaacaaaattcttttattacgtacaacatcaggcattttgctattgacaaactgaatccaaatccaaacagaacgttatgctaatacatgtgaaacaaatctatttataacatcttccagcactaattaagtatctctacatcttttttgttctttccacaatttttcttggtggaatgtacctggattctgagtaatttatgcaaatatggaattcttggacaagtcatgaagtacgaagcaacttttatcaacagcaaataagttatattgttcttagtagtaacccatttcttaaattaacccagctggggtttgaaccccagaactcttaacaaacacacacacccaaccactaagtgttgttatgcaacctgtgactcttgtaattgcaaaatgagcaatacaatttgttcatttatggcagaaaacttgggggtaggaaagaactaatacagttcacaatttaactaaaaattagattttgataaatcacctgggtggactcatcggagtataaggattccaagctcgatctcgcatgggggttctcatgccatcatgaattggagttgctgcattatgaaatacagaatattaatgcataatttcctcttccacgaaataaaaactaaataaacaaata

SEQ ID NO: 299149 - DNA, 4790 bp, Cannabis indica
ctcttaaatatcactgaaaataaaccaaaattctcctttcatttctttaacataccaccttcatatttagagttctttctttctttcatttctcaactcccacttttgttgcatcatatatatatatatattttagttttactcttctcttcatctatatttcttcaactttgatacaacctaataagtaataattgatattgataacactttcatttttacagtttttccttcaaattatatagcttgagtaatttaaacttgaaaaaaaaagtagtgtcaattgaaaaagaaaaaagaagtgacctttctccaatttccaatgttttttttccccatacactagttcatgtctttatagttaaagacaacaaaggttcttacttagcttcttacatataatatgttttggtctattggtcccttcttctttggggcttttctctttgttttttcacttcacttttttcaatagtctctgttaaagaaattaatcagtacttatgtagggtctcttttgtctataactataatataaacacattataattaatcattataaatttataattgatcttgatgccttttaacctcaagttttttgtcttcacaaatatgattttgtagctttctaatttgaagaactttaggtaaaatattctcttataactatatatttagaaaatattttttttacacaaaagtaaatggaaaagctttattgttttttgtcataattttaatatgattttacacatgccctacaatattatcttaataaattgtattttgatttttttccaaattattcatattttaaaaaattattgaattttaaaatatgatttttctagaaattacaatcttattttaagaataagatttatttataatttcataaaaacaagaatttttgtatttaaactttagggtaagtctaaagtacactctctaaaagagtttttcgacagacttttatctattttgacatctaggaatattttttttttttttttaattgcatacattgtagttatttagaattacctataaatctttagaaaatttcgaatagtttacaatatcaaaagtaaaatttacatatttttttgcacacgcaatttgtaatcttaaaaaaattaaattagaaagttcttttaaatataaaagcaaataaaaatctaccaaaaacaacattttaaggttctgagtacaaaaatttcctaaactttaatctaattgtccactaatgttttgtactaaacacgtagtgcagtgctatacttttgtctttgttgagaataatattttttagtccattaatcttagattaaaaaatccgactttatgctaaattttagtttatcctcttacaaatctattaacttaattaaattattaaaaataataattcaattcaacaattttcttaagagctaagattttcattttcttccttcaaaaaaatatacaaaagccacgtcaccaaataccggtggtcgtttaccagccactgaatgatatcattccctcgtccacgtggcattaaacgacacgcgtaattatgtcactcgttctcattctgcatgttttggaccgcgacttttcttccgtcacccgccgtggcatttaaataaaatcaccgacactccacctcgtcaagacacgtggacaaacgttaacattatataacggaatcaaatagtcaaacattgaaaaaggtcgataagttaacggccgttaatctttaaaaccgtgcactgtccattctttcatacccacccaatccccgacatttccacctgctctctcatttcgggttcgggttcgggtttcggatcctaaccttcgatgaaatttcaacggctgagattaaatctaaaattccccaactatatatataaattccagagagagactttagtttttgaaaacagaaagaaaaaggagagtgagtgagtttcgagagacttcgattacgattcgaattttggattttgattctgatttggggtttttgaatcggtaaaggcgagttttttccgattgttgcgatgggagaaggtgaacaccaggaggatcatcatcatcacgaggaatcgttgatggagaagatagctgataagatccacggtcacgattcgtcgtcttcctccgattcggataacgagaagagcaatgattcttcatcgtctttgaaatctaaggttttcaggctatttgggagagaaaggcctgtttaccatgtcttcggcggtggaaaacgtatgcgatcgatctttcatttttgttttattttccatttctggtgataattgatataattttgttggattaaattgcatttgattttggtttttatgtgaaattttagattttgaatcgagaacacaaaatctcttattttgataattttatgcattttgaatgttttggtaaagttggatctggatctggatctgcctgattcgttctaaattatttttgttactgtttggttttgattagatgtgattcatttttttggtttgagaattgagaataagaaaatccaggaagagatagcttaattgtgtgtgattaaatagttacatttaacttcaaacaccaaaaccgagtaccgacactttttatgtaacggaaaaatgagtcttttatgcgatttaataagtgaaattgcagtttgtgttttaacttaattgttcttaatttttggtttttcagcggctgatgttttcttgtggaggaacaaaaaggtatcagcaggagtgcttggagtggccacagttatatgggttttgtttgaattgatcgaataccacctactcactcttgtttgtcatgtgttgatacttgctttggccttgttgttcttgtggtcaaacgcctccaccttcatccacaagtaatataatttgctttagtttttgtttattactttcagatacgtttccctgttccttttttgacaccaattttgttcactgcaggacttcaccccacattccaaagctcagcattccagaagagcctgttcttcaggttgtgaatgctttaagaatcgaaatcaatggaggtcttgctgttcttcacagtatcgcatcagggcgtgacccgaagaagtttctttcagtatgtttgtttatactttttactcaactctaatgatggttttgatttgagacataccttattcattgtttatttataatcctttaggtgattgctggcttgtgggttctatctatgttgggaaattgttgcaacttcttgaccttgttttacataggtaatgaaatctaaatccaaaataaatagtcttttgctaacttatatgaaccattctctagtccatatagtaaagtgttttatgattctttctgaaacacagcttttgtcttgcttcacactgttcccgtactctatgagaaatatgatgacaaagttgattcatttgctgagaaggcatgtttcgagatcaagaagcagtatgcagtgtttgatgcaaaggtgttgagtaaggtattgagtaagattcctagggggccattgaagagagattgaagtggagcttgagagggtgagtggactggactggactcttttctgacatataatatttactgggtagctacaatataatctatatatatattttcctagtgctgtgaagaattgtatccatgcttggctagaatcctctttctctttctccccatcttttctatttttattttttttaccatttagagtccttgggttctcaatgtgaatggattttctatggtttattttttgttattattactattttctatatacttgtttaagatggtatttgctgcaacttggtataaatggatgataatcatagaaataacctttttggaccaatttataagatttatatttctttctgtagagatgatatttacttttgagtaattttatgtcaaagaagttaggttccattggacagtacatgagttgttgggtgtgtttgtagtatctaatgtgtcttattatattgggaagcccacaacgttgtcatgtcatccacgtgtcactccaaatcaaggagaatctagaagatattcagaatcatggttaatgcaaaattatttatatttttcataaattaagcaccaaagtatgtggaagatattgaattggaccattaataaacatgttacctttagtcaattctattattattacaccatttatatttagtgggtcctatatcactcagcattttctgtatagagttttttattgatattttatggtagttaatggttcagttctaataatagcaatataatgctcaccaaactattttggttaagatgcccaccaattgttcttgggttagttgtgctctagtcaagctagttaggtttaggacttgctatatgccatggcatgtattcttccctaacttcaccaactgtgtggcttgatgttcgacgaggaagtctctgatgagcaagttgggatctcgacaatgatgggtagtagcaaggtggacgttgggttttgggtgtggggcggggcgtggtgtttaggggggaagggggttgttttgttttagctaaagtggagggttgttgttgttgctttcttaggtttttgcttgtgttatgcttttatttttcttcatatttttggtgtgcaaatatattgagaatatttaatagtcttaaattattgtagaggttgataattgtatgataggtttttggaataattacataaggcactattttttataaaatatttacattttt

SEQ ID NO: 299150 - DNA, 3247 bp, Cannabis indica
gaataacagtatattagtttatgcatttttttagttgtcttttatttaataaatgagatagtggaactagtctttgaacgttgtggtggtttcctcgagaataggatgcttcatgcttagaattaggaataagttgtttttctgaatattatatatgtaatcaccattgattattaaagggagtcatattttaaatcatcacttggtttgattttcaccctaagaagatctacaattttcctagtttaattctacctcttttggaggccggccaagaatgttcatgggaaatggaaattattatatgttggcaaaaacattcatgcaagcaatggctccaaaaatcagcattgtaaaaaataaacaacaaatcatataattaaagtggtaatgtaataagtttaaaaagaatattattgtcaattccaatggactttttttttcttttaaaaaatgcaggcatttccgtccaagagaggccagactactattgatcattgatcaatataatatataatatggtgccaaagcctataaataaccaaacagttcaacttataatgatcaccagtcatcatttaattaatatcacattaataatcaatagtatcattagtcatgggctcctccaagtttattattatcttcattaatattgctattatagctatctcattggttccttcaatttcagcagttgattacattgttggggatgaagcagggtggacaacaaacttcgattatcaagcttgggctcaggataagatgttttttgttggtgacacactaggtaactatttgaaagaaataataattgggagttattatttaatcactcaaaataattaataattattattttattttttgtttcagcattcaactatccggcgggagaacataatgttttcaaagtaaatggtacggatttcagacaatgctcaacaccattgggttcagtgccattgacgagtggaaacgatgtgataacattagcaactccgggaagaaaatggtacttgtgtggtgtttctcaacattgctccctcggcggccaaaagctctctctttatgtgattgatcagtttgcatggtctcccatgtacccaccaactccagctcctttaccatttcctggtgacatataataattaatatggggtctatacttatttttggagtgttttgattcttattaattaggttttgttcaagaataaatgtcatatctttgattattcacttgttagggttcggtcttatgagatcaataatgtacttgggtgaaaggatataaatgaacgctttattaataatcagtttgaaatatggttattaagccaaataatatttacttgtattagatcggtgatactataaaaggttaaaacaataaagtgcctcttaataatatgagtcaggggcttagtgatatccaaaaggacatgaacttaaagatactgtgaacttccacaatcgtactcacagacttgccaagtttgaaaccccaactcggactcatacaaaatatcgtgactttatgaatttgaaccaaaaattctacaacgtaaaagttggtcacagctggatctgcaaaatgattggattctttcaagacaagaaggttatcatcaaagatccaaggccctccttcaagcacgcgtttgcgatccgttaagagagagaatcgaaagagaaagatattcttttcatgtaccttcacttcataggtgctttggactttccaatagaaacgagccattccaattactgcacagcgagaaacatgttcagtacatatctttacccaccagcaagctagcgagcgctattctcagcccccttcgctaataaacccttatcaatgtcgtcacaaaactcatcctcataatcctcctcacactgctagagttatcatataggttgagaaatcctccataatgcaagatgagaaactacatactggaaaacaccctactcttagaaagaaaaagtttatctgaacctctttgcaattattctaatatttcagagcattttaaggtgcggcttggctttgttggtaagttagtgattgacaaggtgggtcgtagtttgtatgtttggatctgacaatatggtagttgatttgctaggctactcttgcttttttatatattaacattcttatatccccacacattaatttaaaatggcggtatacggtatatggacaatctgatcaatgtttgtgtgctagttttggacgttcttctcttagtttgtgaatgggttcaaatggcctttgttatgtgaggaagatttattatttaataaaattctttctcctcgtcaaaagaaaaggtggggctgtcgttcgtgaccctggtttgatgaataatttcaagaaaattcttgttcatgtggggcttgctgatgagtgcacatttgttcactcattcctcgtcagatattaatgaattagtattgatttcttaaattttgtgtacttgggaaattttgagctttaaagattataatactactgttgtttatggttttcctataatacttggcaagttaggagctgaccgtgtagcgctaagactaatgttctgggaataataatgataaattttcctaagagtacaagggaaatcattagccacggtcccttcagaagaataagctatagtattattccacctccgagagtcaagtttatcaagagatgtggtaagaaaaaggaattggtccgatcaccgcgagtccaaactagggtcactatagatgcattaaatgtaatatggaggaaacgtctgcaaattaccttgaaaagacgtgtcagaggtttaaagccatcattctctgatttcacactatccaatatcccttatgacggctacacaatgaacagtcaaatcatctgtgttgtacaaaataggcagacatgtactattgttcaaatttaagaaattgtgcaagtaatactcatacaattacgacaatggtgacctttttactatctttatgaggccataaatatcccaaactagattgagttaaggggtcaagaaaaaaaaaaatagatagtgagaaactctttgtagacaactactacattaatatatatatataatagtgtggctcgtggactaaggctcgaaggttctaactctcgaaactggattgatattataaataaaaaatacaaattgatgtgagacaataaaattttgatatttttcctattgctataaggtgt

SEQ ID NO: 299151 - DNA, 4437 bp, Cannabis indica
ttacggtttgagtttctaaagtggttgcagtgctagttgcaataggggtttttgtacgattttttgttgcaatttaggttgcagcgctagttgcaataagggtttttatgtagaaatttcgtaaaaatgacaaaaaaaaaaaaactgttttgaagtagtaaaataaaaaaaaaaaaaaccctattttttttaaccaattttttcaaaatctattatgttcatttttttttttactaattttattcttatcatttcacgatagtctctatttttttctaactaaaactttgtcccaactttttcataaattgacacttcgtctctaaaaaaatacaatttattatgtttaaaattgtgtcttaattatgtaaatgtgtaaaaataatttaagtataactcataaaagaaaatatttaagttaaattttatttaaatataaatttaattaatgtataaaaaaaattactcttcaacttctctcaaataattacacacaaaataattcacttgtattgtatatactactgagcacaatatacaagaatgcgaaaacataatgcttaaataaattactaataaataataaaaaaaaaaattgaaaccgatttgaattataatattcttttgcagaattttctttttgaataattttcatataaaattagaattaaagaaatataagagatgtaattacagaatttctcatagaaaatataatataacagagcttcaaataaaagaaaaaaaaataattgtctataaatgagaaatgaaaaaataaataaataaataaaagcacatacgattcttataagaatatactcatgaagcaaagttttcgtttcgatgattaatctaaatcaatactaatttaactctgtgaacttgatgaatatatacttactcatgaacaattatttataagtaatacagtcacagaaatcccatataataccgaaaatggagacaaagcttccaaaaaatggaaaaatataaaaggcacaaacaatgcttagaagaaagtgtgtaagtaaaacatgacacaatatgcaaaaacctcgatcaaagagaatgccaaaaccagctcaaagaaatatcttatgtctgatgctatttattatacaaggatagcaaatgacaaatgcataataaacaaccgtatatatttatatatatatatataataataatatatgatttatctccctgtaataacggaagatgaataatgagggtcaagatcagagctaacacttgagggacagggaggcatagtatacattggcacaggtaacttgggcggcaaattaggcaaagcagcttcaaagttaagaacactcatcacttgctttatagagggccgacatgttggatcaggatggcagcaccacagcccaacaaccatcacgcactccatctcctcatcattgtattccgtatcaacaagtcccttgtcaactgcctcaacaagttggccactcccgtaaagctcccatacccactccaccagcatcaccttaccctcttctgcatttgatacaattggctttcttccactacagatttcaagtgctaccacgccaaagctatagacgtcggactccttgctagccttgctggtagttaaacattcaggagctaggtaacctcttgttccagctaccagagttgtgtctagacccctttcatgatcaactagccttgccagcccaaagtctcctagtttagcattgaagtttgaatccaacatgatgttgctcgacttgatatctctatgcaccacacattgttcccattcttcgtgaagatacaaaagagatgaggccaaaccaataactattttatgccttgttgcccacggtagcatgggtttttcaccacctaggtgtttattaaggcttccattaggcaaatattcataaacaacaaggagctcatctcctttgtggcaccaaccaataagttgaaccaaattcctatgtcttaaacgacttataatttttacctcagaaatatactctttcttaccctgccttgagcccttagaaactttcttaaccgccacttcagtgttggattctcctaagatgcctttgtagacacctccaaagcctccctctccaagcttcccagcttctgaaaagttgtttgttgcttggcttagttcccggtaagtaaacctcttggggccaatccctgtttctaattctccatcgatggaatcttcctcctctgtttctgcttccctaccaactctctttctccaaaacatgaaccataccaagcccagtccacagcatagaataccagtgcccacaccgaaaccgattcttgataattgatggcttcctcccccttttttagtttccaagggaggtgtggggcttgggatagcagatatggtattattattgtgaaagatatttgagtgaaatgaccaagacaaaactttatttaattgcacatatgaacctgtagctgcagagaaaccaactctgacctctcccctaagaacgtcaaatcaactagagatgaaaggctagtgttttcaccaatcactgtaccatcacccgcataactgagaaacacggttaaatttttagaagtagagttgtaacttattctagcatttcccactcttgaaccatttgtcattttagtcttcggtgagacatgtacatttgagacaatggagttgacattgataccaacatgattggagttaggatcccagtaattcttaaaggtgtcaaactccactgcaacgataggattacttacaatcgaatcagattctctgggtatcagtccgaggtttccgccttttgagttattaggaataactgaattgaacggcgcaatgaagaacgctaatccatctccgctattatttttgtggcctccatccattacaaattcgaaattagtggtgaagcttgcaagaagttctctttcgggatcccgaagttggacagccttgttgtacgaggctcgaccgttaccgtggggaatagaagaattaggaggaagcaatgtgagctgtagaaccccgttgtctagataggcgtccgcctcgagtttaatgtcgttaatgctattttgatcaaaactggggaagctgaaggaaactgaagaacccttttggagtaagaagaagaccacaataagagtcgttataataaaattatatgagctaataaggaactccattgttattgttgttaaatcagtaacgaagcataagaaagatcacagatacagagctgggaagtagtgtgtaactaactatatcattagataaatgtaattttattcaaaattaaggactatatatgatctcttactcttaaagacgttctatattattcttgtttattagcttaaaggtcttagtcaacggcgttgatttggtcatgttggcatgtatagaattattggctttagttagacataattgaggttcaatgagcagagaaaaatcaagaaaaagagaaagactaaagatttgaatgagaaatcgtctcattaattatgactatttctagaagagaaaacatttctgtttactaatcaaatcaactggacggacagtaacgatgggcatgtgatggcctggtgtgtaagtcttcattcatacgtacaaaattaagtactccttaagaccccatgtttcaaatttgcacattacatacacttttattgaagtgttcatatctcatgtagaattcaatacaatcacacattttacttctcattttagaaaatttcactaagttctgaaactcttgttcctctaaagttgctgatttttgtttcctgatagtgttgattcttatcttgttgtgctttgataccactgttaaaagttaggtggtcttttaaccctgaatcaagaaaagcacaattagtgatattaggctaattaaatttgcaaaacttagtattattgcaatattagtactcattcatccatgagttcaagaatgaacagtaacgaaacaattagagtcggttttgagttgaaatggactataagcagaaaaacttttttgggcctttactataaagatacagagaaaattacacttactatgagattttaaaaatttttacgttaaatatgacacttttaaatttgaccaatttatatggtatttttttgtttttaggtctttttcgatatttgatatgccatatatatgtaaattaggttttcaaatcccatatttaatatttttatatgtttaagtagttttatttcccactgatgccagaaaagtcgtcggagtttgctgctggtgccgaaaaaatcaccagagcagctgtcggtgctagaaaattcgtcgaagctgttgttgatgccaaaaagtttgttgaaatcggcattatcgccgaaaaaattaccaaccatcaggtgggtggttacgttggatgatt

SEQ ID NO: 299152 - DNA, 5219 bp, Cannabis indica
acattgggtacttatgccgttaagaataaacattgagttaatgccgcttacaaacataaaactttgggtacttatgccgctatttaccctaattataataacattttcaagtacgaaaaaaataaaaatatctcagattaaataatatgatgcattaccactttttgtttcatgtagatacataaaaagacaaactttaatttcaatgtattacttgaaaaagaaaattgttaaaagcgatacttagtaatttttttagtatcatatttttattagtataattaaataatatataacttaagaaaataatttttgaaaatatcgaaacctcctaaggtaccacctatagcatagaaagtgttgaccaccattagtttgcaataacttgaaaaaccagggttgaatttttgaagccatcaatacacgtgaattgagaaattaataatcccaaggtctaatctatatagtcatgcccatgagcatatagttaattacttagagcacactcaacagacatttctaacattttgaaggtattgatgtgatgagaatgatgatcatatatttataatttagttcactaagtggaagtttgtcctcaagttaaaaatcttattgaaatgtttcaaattttattgttttcagaatgacaaataatatatctgtctctatctaataacttatgtgtagacgttttgggaaaacaatatataattcagttgaaaaagaaaacatacaattggtccttgtgaatggtgtaatttctccatctatattattttcatttttgctatttcagtggtcattttcctactacaacaaattcatttattaggggctgacttagtcgctcctaaaacaactataaatcgtccctaatgttttttaaaaacaacatgtccctcctaaaaggttgtctctaaaaattcacacctaaaagtattattaggggcgacataaaagtcgcctgacaatagaatgttgcccctaaaagtgctagggaagggaacaattgaactcattaacgtttttgggcataaaaatttcctcttctctagtctatcctactttacttttgctttagttttttatctcccttaaaaaaaagctgattgtttacgagaacggtggaccacagaaaagctttaattatgcattatgctttttatgatagcaacttgttttattgagttagcaatagcgcattataagttgcattctcgtattcttgtactgactacctgtctaacttttaaaatagaactgaaaactcagagctattagctttggcttcaaatctgatcaataataatattgactcttcttactgcatgctctgtctaaaacttatcaatttgattgcctggcagtacatgtgcacatcatacattcaagagaggaaagaactagtccatgcattacacaaggacagaaaaatgtctgatcttcccaagattacacaggttattataagttttaatttctactatatttataaacatttaccacagctttatctccttctttggaaatttatatcttaacaatgaaaatcccagaaagttcctctttctcagaatcttctaattaagtcattttttattattattatttatgcagccaactctgattatctggggagaacacgaccggatattcccaatagagctagcataccgattagagaggtacactgagtttttaattgaacaataatgtaactattactttaatattttaccataaagagttataatttatatttgaaatgctttgcattatgaccataaacagagtttgaattcaccccttttgcaggcacattggtgagaatgcacaactagcggtcataaaaaatgcagggcatgccataaacgcagagaagccaaaagagatgtacaaacactttaactcgttcctcattggtccactccctccttctaagccagcaaagggaaacaacatcaatggccacaagttggactgaaaaggttcaaaagttgaagcaaaatctagattttacaaatccacgttcacccaatcatggattaatttcgaagtttagaaatattggtgtatacctaaattattatactagaaagtgtgttagtaaagagaaagtatgaattaagacccatctctggtttgggtggagcgaaaaagttgctgggttggccacagaatctggttcttgatacaatttgcctagactagagtaactcttttttattataaaagcagaggattgggatgatattggcgtttgtaaattacttaaatgtacgtatgggcttttctacgtatttaatatttatcgtcagagtccatatttatatatttcaacagcttattcaaaactaatcgccagtacataacacgatttggatacaagaaaaagaatgactaaaacaataacattgtaattaccaattcaaactctcttttcatgacatcgtctacaagaatgtggctttaaaagaagcctacaagtggatatatatacgttaaaatccatttgaacagcagaagatgctttgtgcgttactttattttctactttttcaatttgatcaatcaataactacacacatttcatttccaaaacaactacttttgtacaaaagctgaaacagagtgaaaacaagcaaatttaaaggaagcccatctccagactccatctaatcttttaaactgccatgcagatagtcatgccagccaaaataccataccaaaatttccctgaaattttatcataaaataaagttaacatgcttaatgtgaaaaataagtactgaagaacataatggtatacatttatatgtaaccattcttttatattataaataaatatattgtatatagtaacttctacattaagtttgtgcctttttatccacgtatgaaaagctaagctttattcccaaaattagtttttttttaaggcaaaagctctatggaatatggtgcggatctatgtacgtaacattaacgcttcaatcatatcccaaaagcatcaaacttaaaaacaaatttatgcattccgttattaattggttgagataatttatttttcaaatgacaataatataaggtaaatatataatatatataataaaatataaacttacaggtgggtaaagaagaaactgatgaaccccaaaatgcatcctgagcataataaggaacagcgccattattacaatccgtcgtcgtattgagtccatttttacatacacaaagaaacgaattatcatgatcatgatcatgatcactattagtagtagaatacccacaaaccccatcacttatttcacagctcttgcacttggtttccacaacgttactctccaaaacgccgttattataccccaaagtgacgccgtattgccacctggcagggtcggtggcgtaatccccaagcgaaacgacagaggcgaacgctgaacacttcattttccggaggtttagctcatccttgccgtccagattcgccggcgcgtacacgcaacacgtgtttgtcggcgggaaaagcgggaggcctagagcaaccacggagggacacgtgtatatcgaagcgcagaggtgggagttggggtcgcagacggttgaggaatctttgacggtgagggaagaggtcgggggttgacaagagaggaggatgaaagttgatgggccgagctggaatgggctgggccagtccagaccgaagttggactgagagggttgcatgttgaagcaggtggacatggatggtggggtgatggttaaggtcgaggtggtgtaggatatggaggtgatggggtaggatccggtgtgggtggtcaggacgaggtggtcgtggtctcggttgtcgtcggtaggtgcgcacgtcacgtatggttggaaacgcggcgagccacagccgtagccggttccgaacgggtacttgacttgtgtagacccgcacatgtttcgacacgaagggtccgaagctaacgtgcgccgtggggtgatgaagattaacagaagaaggaggtagaagaggatgagtgggagtcgatgatgattttccattgttattagctgaggttactgtgaaagtaaaaacgtgaatgagttttcggtatttcttgtgtataagtatttgtgtgtggatatgaaggaaaaccaaatatataaaaagtaagacatatacgaaggaagaaaagttgtttgtctttttatttccttttcctttttccaattacgaataatgggtatgcatgacttctatattttctaatggaactaatactttgaagtttatatattcattttagttattgaactaaaatatgccagatcgaatattaaattgcattgctatgttattttttgatgaatactttaaactatttttaatgtaatataaatctcacaaaatagacatacaagttttcttttcttttataaatttcaatcacacacgtaagatttatccaaaaacctcttagttacaaccatgaatcattttttgaaaaaaatattacgaggtgtagttttggacactcaagttgactaagaagttgtaatagaaaattaacggtaacacaactactctttattcaattaacaaaaaagtattgctattagacacctcatatcgatgtgacatgttctttgtagttaggggtttcttatattatatacattcaatcaaatattaaattgcaccaataatagtatatcacctcttgtggtacatgacaccttaaggcgcccttagcatttctcttaccaaaaccctatagtggagttaaggcttaatagttatgatgtgtgtaatataaattccacactcacacatgagcaatgtgagacaaaatgttaattttgtaatactaatgtgtgcatcgtaagcatttaatatagattatcattgtaccaaacgataagatcccccatatgtgtatgtatattaaatcaaaaataaaaaatgaacataaaatatttaccccttgatgaattatcaagattcttcgctatttttcatatgttgtatctaaaaacggtaatggaactcacaccagatcgatcttccaaatcaacaactacacacaagaatcaatgtgggctgataggatacacagaataatgctcttgagttaaatcctaactcatgagcaataatagttttctagagaggagaaaaaataaaaatatatatgttctaattgttggaatttattttaccaggatct

SEQ ID NO: 299153 - DNA, 3454 bp, Cannabis indica
aaacgcacacacgtggcgtccctgagggtcagggcgttacactcaattactaatcaactctcagtccactcccattcaatcggtcactactaatttgcaggccccaagtaatatgtttcagcttagtgtggatgcagctctctctcccggttccaccaaacatggctatggcgctgttgtcaccgattttcaaggtcagatcattgttggtttttcagctccccaatctacgccgaagctgaagctctcaaccgtgctttgttatggtgtcaggcagttcgctttcccctaagaactattgtctctgatttccagacgctggttcgtcgaatttagaagcactccattgatcgatcggctctctcgggtttcattgcctctattatttcctctttgtcatcttttccaggtgcctcaattggttttctcccaagattagagaacaccatcgctcacaatctcgctcgagcagctcttggaacggatgaagagatggtctggaacaacctctgttcctcttcttgaagatcatttgtaactattttcctttgtttatccttggttactgatctttgtctttaaaaaaaaaaatggaaggagaagaatgagtgttttgagattttttattattattagttttacttttagtttgtttcaatctaaaataattattaaattagaataaataaaataaaaatgaaataatttggcacattaaattatcagaagttagtggagaccaactgaaatttagaaatataaagttttgagtattaatgtggtaattttaaaaaattgggtacttattagtaataaaacaaacaaagccacaaatttccctgttttttttaatgaatgatctaaacttgtttaccaagattctaagtctcacgactatatttagattggattaaaaggaaaaactagtggaagaagattgtccacgtacacccaccgtattcagccatgcaaaatcaccgcaaatgccaatatatataagtgatacacttctccattttctgactctcatcgatcaacatcagtttgctcaacaaaaacactttctcgagaaatcgaaaccgaaccaattttcattgctcaaatgggtatggtatttggaaaaatcaacgtcgaaactcccaatcacgaagtaattaaagccacggccgactacgaaatccggcgatacccaccagccgtggtggcccaagtcacctacgacccgtccgagttcagaggcgacaaagacggtggtttcactctcttggccaactacataggcgctttgggcaacccccagaacaccaagccggagacgatcgccatgaccgctccggtgatcaccaaaaccggcgagaagattgccatgacggctccggtggtgacaaagaccgaaggagatgaaaagaagatggtgactatggagtttttgttgccggcgaagtaccagagagcagaggaggcgcctgcgccagtggataagagggtggtgataagggaagagggggagaggaagtatggggcggtgaggtttggtggtgtggctagtgatggagtggtggaggagaaggtggagatgttgaagaaagggttggagagagatgggtttaaggtgattggggaatacttgcttgctaggtataacccaccatggactttgcctccttttagaactaatgagattttgattcctattgaatgagagagtcacatagtgtatgtatgtataatgtaatgtatgagcactatatataaatatgaattgagattggtagtttaactccaaacttgtatgttctgggttttgtaatatgctgttgttgtagaataagattgtatggttttgacttttcaaatgataagcatagcatagcttggttttggttcccagcagaaatgaagtgcctttttgtatgctcacttatctttaggtacatttaaagtgcagtaagagtaaacagataatgctctttctttccagaaaatagacaaatgcaatcatcagccaagtgcagctgactttaaagataaaggaacaaagaaaacaattaacaataaacaagtcaaaatcaaaatgtggtttaagaaaatggtcaactttgtaaatatataacattcagatacaacaatgagattaaatattgactgattatgcatttcactgaaatttgggatcaacccactaaattatgtctatcaaacacacactccctcaaagttgcaggcacaatgtacacacctgttttgagtttctgttgcaaatgatcaaagcctcatccagaaaacatcttcacaacaattattacaatattaaaaagtatgagtggtagtctcaagaactggcatgcatgtataagccctatgatctgtcccttcaatgaatttctccttcctcctccttgtacttctaacaaagtccaccctcttggagcaagaaaccggtcttcattcagaatcgccaaagcatttgcaaacagcagaaggccttcgagtaaagtccaaaaacccatcttctgaaatgacaagtgggttccaacaattcattttccagaagaacaaacctcaattataagcatagatgagttaaaacaagccgaatggtgtgtgcataaaattaaaatgcaagttaaggctccttcaaaagttaaacctttaatcaattaaagtactaactttacaaaatcactaatttgatttaattcaaaaccagcatcatttgctaattttaatctcgaaaagcttgcatcttagcataagtgaatcgttatcgatcaaattcacaactccaagagtttgacatccaatttctaaatgtgaacatcaactattgttaaagtaactcataacctgtaaaaaacgattctaattcaactactctgttaagatcatgtccatgagaagaaacagatgaaagaaacagattttttttactcaaccaaactcataagattttgaaagtttctttggcactgacccttaggcttcaaatgaaaaaaagattgagaacaagtctcggatcattattattaaaaagaagagaaaaagaaaagagaattggataataactaaatcaatttatatccctgtagaattccgatgtagaactcgatacaaaacagaaacaatcgcttgagaaaactcattagcaacctcaaaaccgtaaaaacagtacctattgtttaggccaatgagtgaaacggaattccttctctccgatctccgatcagttatcaaacgaggttgttaagatttctagggttcctcgtctccgatcagtaagtgacagaaccaaagaaagccaaaaaggccgatggatagattaacggggagagagagagaacatgaacgttgtgggcctgggcttctcgtattggactaactcaaaccatacacaacatatcttttgttttttttgggaaacttataaaaatactggaatttgggttaagtttta

SEQ ID NO: 299154 - DNA, 1795 bp, Cannabis indica
ttaatcaacatacttgtgagtagatctaagatcctggtaaaataaattccaaaaggaagtatggtaggggtcgtcagaacttgttagtcatgacagaggtcgagagttaatgaccaagatggttcaaattgggatagacatagaatgcttcagttgctacttgtgtgtgccaagaaggtcgcacatggagacaaagggggtaaatgtcgcgatcattagaggacagtcgtacttggaggtatttgcatgtgatctttatttgatccagacaagaagcaccgagacacttaagtgggaaaggttggctcgtagatatagagggcgcaagtcacgctaaggcattaacataaatgttgagttgtggaatgaaagcatcaagaaggctagcaaggccaacaagaagattgagcacaagtgttaagatggaactagagcttgaacggaggccagaggattgtaccagtgagacttagtaatcatgtgaccctacaaaggtcaagaagggtgctagagtttgtgtgaaggccaaaaggctgcatcattggagcttgatactttaggggagcccaaaggggcgtgatgctagtgcaaattagatggttggttgtgtggataaagcgcgcatataggaattgaaagaggtgctacataaagtagttgactcaagagacacatcttgtaggatacacttctaattacgcgatgtgcatgaagagttggggcatacaggcattcgcgtgtttgggccaatttccatcaagtggatggtgcaccatggagttggcctgtgaatttttcaaagacacttgtccagagagacttggcttcaatggaagagtgttctgtaggtgtcataaaataaaatattatttaaatacttattattaatttttgacaacaaaatgcctagttaacaataaaacctttataactctttcttctttatttttaccaacttggtggaagattctcaaattgacaaaacaataatatgaatattaattgattaaataatcaattattgtaatctactattacatattatcctagatactgcgggaatcataggtccatgaaatccaagatcccaataagatatattcgaaatttaacaaataaatttccaaacttattaattcctcatgatttcactatagacgcaaaattgtactcataatttcgcggaacgctatatataccaaatatatacattacaatattatcattgtttctatcatattgatctctctatagacaatgcaataccctaactaattaggcatgtcatgtcttacgattacactgtgctaattttgataattgggatctgttaaactaagtggatttaaataaaacaactgataaactaaaataaaattgtaataacttaaactataaaacaaaataatatgagtgttttatctgcaaatatcatttctttaatcactgaattagtagttcagttcacactgcaaaataaaagtatttcattaaaattatagatcacaatccaaatatataagagatgaaaacaaaattctaagcataatatagaacaatttaaaaacatttcaacttggctcatcatggtgggtctcgcatcttaatcgaaattaccatctcactcatgactagggatgcacacgaggcggggaattagcggggagtgctccccccgtccccatccccgttaagaattttaatccccatccccgcttattccccatcgggatggggcggggaatcccctaatggggcggggacggggcggggaatcccctaataataaaataaa

SEQ ID NO: 299155 - DNA, 899 bp, Cannabis indica
tatatatatatataaataaactctcacaaccattttcatatctaaaaccacacatattgacaaagaaaaatggtagaatcaatctaaatttctataggataatcagtgaagatactaacagaatgccatttggcacttcagaaggtcatcttcacagaagtttgagctctggaagttagttatttcaccaaatcctatatttaagccttgaaaaaagccattcccaaattccagatggcttagctataaactatgatgcccaaagtttttaccaaaaaagggcttaacagaacaagaatgcatataacaccccaactctcatcttctgacaatcactaattgaggtcagaattgtaatctcaactcaatatcccttctgggttgctcctagatttcactttgatcaacatcaatgcatgaaaaagaaaatttcaccatcctttaaaaatagaaaaagaagagattttcttggtacctgttaaaatgtggcgtagtagagcttagaaggagcaatggagttgcatggttggtggtcgagttatgcatgaggaggaagagtatgaagttgaagggagtagtaatattgtagtttagtgccatgtgtttgtgttgtgacaatccaccggagattcttatccacacatatttatcaaaaagagatttttaagataatttttgaggctcttaaaagaaacctgaaaaagttacaagtggagtagatttcgccaagccagtttttgagaaaaataaataatatcaaagaaatgaaaatgagacggtgtcgttttcagcgtttttaatttatggagggattattttagtctacaaatattttattatttgtagaattaaagagtttcagatagtttgggggaaatttgattttctatacttagaaa

SEQ ID NO: 299156 - DNA, 1766 bp, Cannabis indica
gagaaaaaaatttaactaaaaaattatttcagatattaaaacagataaaaatgtatcgataaattctttttaaagaggtgcattataaaattttcctataacttttatatccttttaataaaaatttagaacttttgttataagtttattttactataaaatttaggcaaaatataaagttagtttagtttttgagtcaagtatgtcataacaatttattttgttacaggttagatacaaaagagtagcgaaagcattaatgaggctaaaccctgactatctaaggacgtatacacaagaagaaatcgaccaaatcgagtgggagagtttagaaacagctatagctctttggatccaacacttcgacctggcagtcaaaaccgtcttcgtctcagaaaaaaagctctgcaattatgtccttgggggtcttatggagggtctgatctggtcagagtgctttgtcaaaatcgctgataaaattatggccgtcttcttccgattcggagaaggcgtcaccagaagcagtaaagagccccaaaagctcttcaagcttcttgacatgtttgatatgttggagaagctcaaacctgagttctcagatgtcttcgatggcgaatcaggggtcgacatttgttctcggttcagagaactcgtaaagcttctcattcatgcttccagcaaagtgtactgggaattcggcctccaaatcgaaggaaacacagacggttttcctcctcctgttgatgggtcagtcccgaaaatagtcagatacgccattaattacctcaagtaccttgtctcagaggaatatagtggccccatggctaaagttctccaaacagagcaaaaatggaagatgggcattttatcaaagcccgaaaacgaagagaacttattcagagaggccattatcaacgtcatggaagctctacagagaaacgtcgaatcaaaacggtgtcgttacaaggacaaaatccttccccatgtgtacgccatgaacacgtactggtacatatacatgagaaccagaaacactgagctgggaaagcttttgggcgatgtgtacatgaaaaagaagtacaaaatcgtggcagaggaatcagcttatacgtaccaaaagcaagcttggggacctctagtgaggattttagagaaggaagatctaaagggtagccagagcaaagaagagatagggagcatggtgcgagacaaagttgaggccttcacgagaggactcaacgagattttaaatatgcacaaaagggtttatagcattcccgacgttgatcttagggagcagattagagaatctacaatgggtctggtggtgtcttcttacactgaattcttgaactccttctcggctgcattgagagggaggtcgtatttcagtccggaaacagttcaagggattttgaccaacttttttgacaatggagatgggaagctgaagcgtcgtgactttaccaaggatcggtccagtcaaaaaagctccacctctctcgagggagatatcattaagaactttcgacggtcaggatcatacactaccgatgtttgatacttttgtctatcataagagatgtgcaccggttgtccatgtgttgcccaaaaatatagtgggccaccctacatgtgtcaggagagagaagagagatgatagaatcattcctaaatatacaccctgccctttactatatctaaataaaaagaaaaaaaaaacagaagaaaaatataatagtgggacagcccttggagatgcctaa

SEQ ID NO: 299157 - DNA, 4102 bp, Cannabis indica
aattgtatactttttgataattagataaataaagcttcttctgatttagagatctagagaggaagacatagttgatagtatttcactatcaaattgaggtaattgatatagatcaattaggtacacatacctaattattatctactaaaaaaaagtctcataataaatcatgagagataatgaaactaattaagcttaataattgaaatgcaaaataatatataggatataagataattaaattatctttaaatttcaatgaaaacaaagttattaattgcagatggatcagttttgttgtgaaattatttttcttcaattttatgtaacaacaacaattaatcactgataaaaattattatccacttcgatatattttatactatatctaaataatcaacaaactataattaattaaaagataattaataaattaacttatacataaaaattaacatactatatataattaacacacaaatcaccatcaaataaaataaacacttcaaaaaaaaaaaattgatctgtatacaagaactatatattgtgtcatattaatattattgtatgaacgtaactttgattgtattttgtacaatttaaataacataaaaatgaatcaaaaactcaaccccccttattttttttttctttccatcatctctcttctagattgagctaattaattaactaacttaattaatcccaatcaaagggtgatcaatagtataacaataataataataatgataatttgaaattaattaattcaaaaagatcttttaatttgcttaaaatcggtagtctcaatgcactcaagccttcctctatgaagattcaaaagcttcaacaaatcactagtcttctccttcaacttttctccacatcccacttgtaagagcaacaaaagcttttgaaaagccccgacttgaagagtttcgataatgacactcttctcgtcttcataattaatatcattctcattactatccttcttaatcatggttaataacttccaaagcatattaatcgaaaactcagttgcagaatcagaaattcgaagaatcttcttaaccaaaattggaatagtaagagagtggccacgcgcagccactctccctaccctacttccacaaaggcgatcgagaactcccaaagccttttcacacacacttctatctccctccacaagcatttcgattagtaactcaactaaccctaattcaacaaacttttcgccaattttctcatcgaaagaaccaatcaacattcgataaacaataatcaagatcgattttgtcaccgtaggacaaattggctccttaacaagcttaaccaaagcctccaaaaccccatttatctcgatcaccgctccaatagagcgatgatcagaagttgatgaaacaagttgtttcatcaacataacagagtttcttcttcccgccaagtcaccagactccaaaaatctcaccatacaattcaaagccgaaggtgagtttataaaacgacacttggattcgtcgtctaatgggaaaaccaatgttaaacacgacaatatttcctccataacgacgtcgtttgatgaaaaagcttcgaaagctttagataagatatttcctgttccgttattaacgaaacacctcttattcctttcgctttctttcgccgatttcttcactttaccgatcaaatccctaattccgttcgaatctcgtctctcgatcgccaaactcatcttcgtcagaatctccgacacttcatgagagctaatcggaatacgcggcgtcgggattctctcaacaccgcgtgaccgattctctacgcaccaatcttgaatcattttccgaatcgcgtgattgggaatgggttcgagatttttaagctcttgattagtaatcggacacgtgatattccctgcttcgatccaagtctcgatgctctggcgatcgtaagtaattccggtcactaaagtcaccggatctttcatcaaatctagcgaaatcgggcaccgaaaatgtccaggtacggttaattcctccatctccatattactgtcaatttgaatcatgtaattctcttttcccggtcgacggttacaagatctccggcgtctccatgaagagatcattattctgtttggtaagtaagaaaaattaagaaagaaaagaaaattttttgcttaagctttggttatttcctttatgggtttctttgctttgagttgaattgaatgaataatgagaagtatttgggtttggattaattgtttgtattatatatatatatacacatatatataggacacgggtttagactttgaaaataaataaaaagaaaaaataggctttttttatttttttttatttttataaattaattaaaaaaaaatggtagaaagaaaagaacaacagggtgtgatgagttttgaatatttgaccgttgaaaaagtttgaaagggtaagggctgcaccgctgggagggactttaattaagtttaaggtgtttgattaattacagaatggaatggatcaaacctcaaatttgaccttaaactggtcaacgcaagtcggtggactgactgacttactctgtctctcactcttaaaaacgacaccgttttggtttcagtacgaaatgtgggaccggtttgggcttattagacctaattaacaaaaccttagccgcgtaccaaacgcggtgttattgttgttacatattggtatgaattaaattaatatctaccttttattttattttaaagtagttaagtttgatgaaatgaaaattttaatgaacgcgtcttgactcttgaacttgttttttttttttttgggttataattgtaaaagggatttttattttttctttttataagaataaaaatggttagaatcatgtgaaattaatgtttgaaatattcttacacgcaagaaataagatgtttttggtttttcattacgtatgaatttggggtttgagtctttcttttttgtttggtttttagtcaagtatatattatgatcgtaaccattggggttatatggatttttaagtatgtgtctcactattttttttacgtaagaacatttgaattgaagtaattccaatgtttacattaatttcttgttctctatatttttggttgcatttgattttaaggcattgaattgaccaattctttctatctaataatgatgattttgattgagttaataagctaaagactaggcatgaaatactctcatcatcatgtttggctccttttaataatatatttgaaaaagtaatattattacataaaatttggtaaattttgaaaatccagttgtacactaagtcattaaatgtgtgtacatatagacatttttgattgattgttgaatgaagaaatataattgagtaatgatatatgcacataagtaattttaaacaaccatccttatttagaataagttttacctattaaaagcgatttatttaaataaacccataaatatgaattattgtgtatgttattagaatttgactaaaatgcaaacaaaagaagctcatgaactacctaccacatacttctttacaagtaatatatatcacaataacgactatagtgataacaagaaataaaatacaatttgtaagaactattattgtccaaattgtgattgattgggaaaactgtatattaggtagtattatctgagttgttagtatgttagtgtctgtcatgtgtcatgttgttattatgtttagttttgctttaaaagttgttgagaatttgtatacaaatactcttgtattaagtaaataaatgaaccctttttcagtaaaagaaaattgtcgttgtagtctatttttcttgtattgtgttcttgtttcttggttaaaaagagtttttgaacaacaaataaatttgttgatgagtaaatagcgagttcaaatttagctttgaaaggagttcgaaacttttaatgaataagattgttcaaccatagctcaagtgatcatgaaattaaatattaaattatgcagtgtaatatctatataaatgctttaaaaaaaaaaattaaaaaaaattgtttagaataatatataaacgcttaaa

SEQ ID NO: 299158 - DNA, 2262 bp, Cannabis indica
tcatgcatgtgcaacctcccctgtcctccgaattaacaaaacaaaatcttttattaatataatgacggtgtcaataatgtaatctcttccataattcagattaaaatatgaaagcatgaatcaatgtgtcatctttaaccatgtaatcttcctagttgacttattgtggtctgtcatttccacaaagggatggggaaaacgacattataactagtaaaaatgtacaataaaaactaagatagtgtattacatattttttagtatttcattgatctgaagaaactttctattgttcgaatgagttagagacttggcaccttggtagttgtagttacatttgcatacatccaaatatataattactttatcagcaactggtttatgtgtgtttgacttcacaaaataatttgctgtttattttcttttcctaatcaattaatgttgtttattttaaaatatatatcatcatgtaattgtggataacatgggtcccctttcctaacatggaccacccctctgtatttctttcataaatgttctccaatctgttactcgaattaaaaactctagcctagaggaatatatacgaacagttgatctatataataatatctttgtcaactctcctagtagtagtagggtagggacaaccttcatttccaattgtcttgcccgtgtatgtgtcccatttatttataaccaatcaatcgatcatataaatattatctatttaagattgatggattttaaaacctatttttctttaaaaagtcagaacacacatctttcataataatgacgctgacttttctttctcgttacagactctgaaggcaatgtaccactatgggaagcaatacaaggagggcatgaccatgtagccaagctattactagaaaacggagctgttttgaacgaaggtgatgtggggcattatgcatgcatttcggccgagcaaaacaacttaaacttgctcaaggaaatagttcgatatggtggtaatgtcacagctgctcgagctaatggcactactgccctccacgtggcagttagtgaagacaatattgaaatagtcaagttccttttggaacaaggtgctgatgttgacaaagcagaccatgatggttggaccccaagagcactagctgaccaacaaggtcatgaagagatcaagtcccttttcttgtacaagaaagagcagcctaaaactcaatctataattctcattcctgagggtgagagagacaacaaggttcggttttgggcagatttacaagcgagcctaccatccggcctgtggttcaggagggctcattccctggctcggaaggttcatggggccgtagccggccaaggaggaggactaataactttcacaactcattgtttggtataatgtctgctgctcacaatgtagataaagggccattatactcagttagcatgacaaagagtcccagaaacacaaatgggattactaaccctcctagagtgaccattagttgccccgaaaagggtgaatataaaggcaagcttgttcttcttccaccaacatttcaggatctacttgaattcggtgccaagaaatttggtttctccacagctaaagtggaaagtaaagaaggagctgaaattgataacatagaggtaattagagatggtgatcatctcgtttttgttaaaggtgatgacaaggaaagtggacttgaaaatcaaaatcctccgacggaaggagatttgtagtacatacaggctggattggatgttgtttaattttttcaacaagttactgccacatgccagatcaatcaaagtgttgggaagagatgtggttgaaaagatactaacatttttttttcttcttattattattaatatttcttttgaggaaggaaatatgtgtcctttttttttgttcaattcaaaaatgaaggatgaaacgaacataaagatgaagataatagagggttttatgtacatgcgaaaaatgtgaaagcaaatgcacaagattccgtgaaaagaaatatacgaaaagcttactccattaccaaatccaatggaatgtatgttatgatacgagtacataatttaatgtgtacataaatttattattactattttcgtattttctctcttctatgccatattatcttattctaattttactattacataccgaattgccgatggttctatcaatcaaaaataataattacgcagctaaaccaattccattcaactacataatatatatatatatat

SEQ ID NO: 299159 - DNA, 1907 bp, Cannabis indica
tagttgtaagatttttatttttaaaaaaaaaaaaaaatttcatagcggtgttcattatgcttacaatatcatctcagtaaaatttttgaatagtttacattgtcaaaaatacgtttgaaatttttgaaaacctttgcccacacctccggtgtgaccacatctggacgtgatctcctagtcgcttcttcctctccatatttctcaatattctccttccataccttttgcgtgcacgctctccagtcatgtagcctttttaacattgatttaagaccatagtcctcaaatataggattgtcagttggaacttaaactgtgtctaaaaaaataagtattaaagtcatatataattttattttggttttgtacatgcaataattttgtttaatctattacaataaaaatttgaagattaccgctattctattttagatagtctgaatggctggtttgtcaatgtccgaggccctatagttcccttctgaaatttaaatttcaacttttgttccgtaggatgcttggcaagttcttcttcaatattttttcccttgtactttttcctaactccctttttcttattgttgcttgcacctgcatcagccatcctacacatacatgctagaaataatgaattaatcaacctattaacaaaaggaacttgtatttgattgaattagcggtgggtttaaatattacaatactttaaagtctacaaatcattttaatcatcatcatcatcatcagttacattatttgtattatcactatcatgaatagtgtcttcatcatcagttacattatttgtattatctaaatcttgatggtcaggctgctcacggtctctgctggtcactttaattgggtcaatatcatcacagacatattcgatatcgtttagttgtggaagttatacgactaactggattcccggagagtttctgccttgtataatcgtggtctcatcatcatctgagaaatcccagacattgcagggggtgtgaatattaacaagcttccaatcaactccattcttcaggtcgagaatgtaatatataaaattttcttaagatgtaagtatcaatgatttattttggtaccattgacgggcgacacagacactagtgaaaaaatcatcactttctatctggttaccattttttttcccaccacttgcacctaaaaatgataacactgcaatccttaagtcaacttgtacacttgtttgagtacgcgaaaattttttttaccaccttctcaagttaccaaaataccactgttttgagtgttacgattgtcatctcgatcctcatgaagtacaaatgtaacaccgttaattaacaatacatcgaggataacaataccatgctagattagagggattcgcaatgacgtacaactcatctgagacttccccagacttatctactaaaagttgattgatcaatcattgagtgaaaatgtaatataaatactagtacaaaaaaaacgtatttgtatgacaaaattagtagaaaataataggcccagttaacctcagcaaatcaaaggcccaagaccaaatgaagagatgagaagaagttgtatcccaactgaaagagaagacaccagtcgttagagatcaacactacaaaaaaacttacttttagtcacatgaaatcttctgactaaaagtaaaaaaaaaatgtgtctaactataaataatcattcttatgttgtggctaaaaatattagtcacaaaaatcagaatttgttgtgactaaatttatttatagtcataatagttgttgtgattaaaactaaatattagtaacgaacttgtatctaaatattatgttttaatcacagataactttttgctgtgactaaaagtcacatttagtcacaaaaaatttatattatgattaaaa

SEQ ID NO: 299160 - DNA, 2677 bp, Cannabis indica
ttaaacaacaaaagaaaaaaaaagtcagaacataaataatgtaccaacagattttaaactttagcttataaaggagagttgctaaaaagttttattagtgactaatattttttttcgtctcatattattattattattattgatataattaagtgttgaattttatatataaaaaaaatattaaaagatattaatggtgcctagtaccctcttacatgttaatattgttattagtgaaattaagtatcaaatcctatatagtttaatgtaatagtttttaaggagtatcactaaccaatatcataagatttacaaatttaaaaagtattacactactagtatctaataacaataattaaaaaaaaatcttttaaaaaatattattaatcacaagattatgtatataaagtgttctgaattattagagattctaataagaatgcttcttaccaataaaagcaaaaatgggaatttaatgcacctggcgactacactcacagtaataaattaaattgtagtgcttttcagaatagagaaattaattttctgatgacagaattttaaaagcatttcctataccaaataattacaattgttgccaactatagatgataaaaaagacaaattttcctctcttttctcttatgtaactagtgcaaccaaatcaatatatgtggattgtctgaattaattgaagatgaaaaacaattatatgtatatatttatagagttagttaatatatttcatataaacacatgatgatcgagagataattaatatatataatatatgatatatcatgacaaagcacgtatcaaaaaactttatatatgtaagtcataattaatctagctaaatccaatatatactataaatatgtaaatatatgatacataaaacttgagaaagagattcaagggtttatataaattaacagtctttataaattgttatatataagatgaatgaactactcttgatctcattgatcaattagttttagttttgagatgaaatcttatcccaaaattctaaaaacaattaaaaaactgataactatagtaagataatgttaaactagtcgatcgatgctgttttcaaagaaggcactaaaaaatttagtaaaaacagaaaattaatgagaattggaaattacctgctaattaatataagtcccttgagatcatacatataaagctccatagctgagctacttgttgtgtaaagggttagaaccagttggaacgactcttttgtcttctgagattgaagaactactagtattattagtaataatggtagaagtagcaatagtagtagaagaggaggaagtgtttttattttttgtactaaagtagttagagaaatagtggcaaaaatgtagtactgatccctttgctttggagaccctacaatggctttgagtgagagcttgtagttgtacattattattaggagtataatttaagctccttttgtttccatcatcaaacatgaactcagtactcgccaaatttaatcttcttgctgcatctgatgacccaatggaattagccataatcaagagacacataacaaagataagctcacttaataatctcatcatcatgatcatggaattgtaacttgaataaatataagaacacagtaaagaaaaaagatgaataataagcaagacccacgagaggatatatgtaggatggagctgaatagaataacatagataaagaatgaaatatatgaaaggaaaaatatggacttgttgggtggttactggtagggacatgaacattaaatattagtaatattgtattgtatctcggatgtagtaaaacatagatcgatacgtccacatcgatcttcgttgatcagaatctccaccaaacttcattaaatgcttcaaaaatccatttataacaagaccggatgacaatttatattattaattatgtgtgtgtgtgtttgaaaacttctgtttcaaaaaataaaaacttgtgtaagtaaattacgagtgctgctgcaagactatatttttagcttaacattcttttttgcctaactaagtctaagctatagctgatgctgtccaatattttatgtatatactgtacatatatactgttataattgtacatgcttataagtatgttatgtatgtgttgagctcgaattaatattctctgctgtagcaaatgtggtagaaggatatggattaattaatggttattatgaaaaaggctgtcatgatttaaaatgtgcatgcatgcgaagatcaaagcatgttagcgaaagaaacatgaatatgggtatgtgaatgtgtataggatagagggttttgatcatgacaggatggctgtatctgcctttgtcaagcacgtttttatgccaaaaggggcagtgattgaataatgatgagggattttttaaccaccagctcacagagagagagagagagaggttgaagctttcataaaagcagcatcttaattaaccgttacacatataagttagttaatgtttggcaacacttattttttaatttttttatcacaaaaatttaaattttgttttttaaaaaaatacgttctctaactattattttttttaaatattaaaaataaaaataaaagtatcttctataaattttattttttatttttgttttctgtttttatt

SEQ ID NO: 299161 - DNA, 1668 bp, Cannabis indica
tctgtaaacactttgaaagtcgtagctagaaatcaccttgttctttttagtgatcttcccgatattatctcacaagtaatacaactaaggggagtaggtatttacccacctaaaagggggtgaacctctataaattctattttttatttatttatttattattctaacctctttattaatgattaaccagcatttattagattccaagtcagttggctaatttctttgtcaacagcttcaaaaaaagaattcatggtcaaaagatattaataacaagagaaaaatttaaaggattatctttaattgtgcaaaataaatgcattgaatgaaaaatattgaagaaagaaaagggatatacgatgaaggttttatactgattagttgttttgcaagtttatggtgtgaaattagcataaatgacattctcatcaatcatttccctaagcctaacgatatatgcctataaagtctttttaatcaatataattttggtttacattagtggagatgaattagttatgcaagcctataattatcttgattgttttgtggtatggaaagtctgtaaacacatgaatcatatgtaaatagaatttgtaggattgacatacacacactttaataataaaataatattgaaaattaagtttaatggattaaaattttagtccttagtttgaagtgcatgttgaataattgaaagagtttagtatattgagataaattgtcattgctctaaggtttttgatctgtcatccaataattgaattgttacttttttattttagttttatttttgtcattccatgaaggcaatcaatagttcaagtttgaagttgcgatgagtgcacaattatgcactcattcctagtaatttattaaatggtttaatatttattttttaaaattttgtatagatttaatgtattttctgtagtgtgcagtattgagcataaaatgatgaaattatacaaatttagagtatactgtatgtatttaaagtgtcgaaactagaaagcgagcgagtcgagaatcaagcaaaatgacaaaaacttaattgtggtgctatagcatcgtgcttgtggtgttgtagcgccagttatggaaaagaaaaggattaaatttggtgttccacatgacatctcgcccaatttacgaaataaactaattttctcacatggcagataaaaaagataggcatcttgaagataaagtccaggcgacatgtcgcctcgcctttggtgacatatcacatgacgcaatttcaaaatttaaattctaagtttggcaaaacatttagaaaagctaaaagatgctttttgaaaaagctgtgatcaaaaagtgtatggtgaataacccaactttatggagaagctacagctaaaagccaaaggtgatacaacccaacttgttgaaaaagttatttttattaaaagactaataaatttatttgtactaaaaaaatatttacttaattattatatattaaaaatcaataaatataataaattaaataatatttaaatttctttttttttattttatcttgaaaaatattttatattatatatttttaatattaacattctacttcaaccttgaatttcttatatatttaatttttttatttttatttgcgaaaatatattttaaaatactataatttat

SEQ ID NO: 299162 - DNA, 1435 bp, Cannabis indica
caaataccgatattacccttttgactttctgacatattagtttgctttccactatacatgccatccgaaattgtaatttcaagcatgtcattaagatatactattgagtgctctaaatcactatttatttaagtttcttttctgtgtataaagtataagccctagaattattcgaccacactcttcgtagcacatccccaaaaaccaccacctttcaccacttttcccgcgtcaaaccctactataaacctcaagtcttccctccatcacatgccaaacaaatcacaacttctttctctctcttaattctctctctagcctcctcttctcattccatctctacatcttcccctttcaagtatattatagtgaacaaaacagacttaaataaggtatcaagtagccatggaagccctcaagataatcttcctattcgccatagcaatggccttatccgtggccttgatcaccctgaccaaccctactgaagaagagaaaggtattggatggagtcagaagggagagctgaaccaagaaaatgatcaagatggagagaaagtagttccttcgaaaagagtgagtaggtttctggctgatacaaaggaaagaaaccctagagccgcagaccattgccacaaggacaacgaggtgtgctacacaggctacggaaatgctactacttgctgcaacaacaagtgcatggatttgatgtacgatcagcacaactgcggcgcctgcaagaagaagtgtaagtacactcagacttgctgccgaggggagtgcgtcgacctggctttcgacaagaggcattgtggagaatgtaactatcgctgtaaggatacacagtattgtatctacggtctttgtgactacgcttgatcaagaaaaaaaatgatactatctatatatatatatgatatgatcgtcatataataatgattgatcatgtcgtgtatatatatacgtgatgagaggttcgtcatttaatttgtcgcaatatattaaataaaacaaaaccacgtgaaatgaattggtggttctcaaaaacacaatacatataattttagtattattaacatgcattttttattacgttgatcatgatcaagaagtgtgtgtaatttcatcatttatatatttgaagtactttatgagtataaaatgtatccattgatttataatttatttttccattatacattcttaattgaaaaagcttaacacagttttgttagagctatacgtttactttggagagggtgttattaatttgtatactttgtcaagatggaatgcaattcaacgttcggtttataaataattaaggggttcattaaattcctttacatcttgtttttttttaattgtttatatacataaatgtatatttattatatatatatttgtgttttctctaaaatccttgcattaatta

SEQ ID NO: 299163 - DNA, 960 bp, Cannabis indica
aaaagtgcggattggatcggatgaacacccctaagagtgattgtgtgtcctttcaaactttaatatgtaccaaatcgtgcttttaactttaacatataccaaatcgtatacattaaacttttatttatgttagactctcgttagtaaaatttacaaaaattcttaaacttaataattttaatagttaaatataacttttaataacttgaagaggcacaacttaatacatctcaaaattaaagtggtataataagccaaaagctaaaggtgaaagtgtttttttttttgaaaaggaaaggtgaaagtgtttaaagtagtaatttttattgtcttttttaatttttaattttttttaaggaattattttcccaaatatatttatttaatatatattttcatacaaaaaaaagtgtttagaaaatagaaaccatatttgaatttgggttcatttcatctttacttctcaacaaagcaaagaaccaatttttcctcaaccggaccggcgttgattaccaccgtcaccgtcaaaatttgagcttcaatcatggctctctccacaaggcaaagaagacctttactctccgatccatcttcatcatcatcatcatcttctccatcatctttttcgtattcaaaggatcataagcctggaaaatcggagctgaaagaagaagtcgataaaggtttgagctgggctttgccgttgtttgctttaggaatgttaaggtacatgagcgccacatcgaatatcatacacgattgtgatgaggtctttaactattgggagcctcttcattaccttctctacaaatttgggtttcaaactttgggaatacaggtttgtaaaaacctaaacctaaaactaaaagcacccttttgtatgtaatttgtttttgggattaaagttttgatcttttttattcatactgttaaagctgtactgatttgtgatggggattt

SEQ ID NO: 299164 - DNA, 5115 bp, Cannabis indica
ttttttattgttgccaaaggaattctcttttatgcatgttcttacaataataataatttatgagaaacgcttaaagacaccagtaatgtctagcacctttttaaggtgtaatattattattggtacaattaagtgtcgagtgacatgtattttaatataataacttctattgggtattatcaatcacaaggcgccacttttaagtggtgctaggcgtcactgcaagactgaccttttaaaattagcgagccataggaaaacaatatttttggatccttatttagaaaaaattgtgctatttttcaaaattagtaagaaaatatgtatttttaaaagattttttttgaaccaatgggccctagacacaagcttaatccgcctatatttaaggcctaacctgtacaactggtatacctaataacaatgctctaattttataattaagaaaaaaataatgatataaaatatatggaacacaaacatcaaactataaatttttcctaacaaatttatggttagcgattaatatataaaaagattatataatttaatttaactaattatttaaaatggcaacctaaaattaagccttctaagccaaactgagtgaagcaccatatgaaacacatcaaagggcttagctggtcgattcaactcaaagtgtctactcactttcatcaccctcttctgtaatgtcaagtatttggagtaaggaatagctttcaaaatggtcttgatttcaggtattttgctaggtgggatttgtatagagaatttggtccaatcaagaacatcctcaaagggtatggagtagtaatcagatatgagaactgggacacagccttgtcgcattgcctcaacaactcgaggactcgccacttccgaaccactagggcacaagcaaaacttggtctgtcccatgattctgtggtagctgtagttttttggaagttgttcaaagacgagtacttcgttgtctttttccttccaatgcttgaataattttgctcttatgtcgccgtgagctgcaccagcaaagaaagctagcaccggccgctgattgggcggttggcccaatcgcggcggtcctagttcgaatttctttaggttgtattcgggtatggatacgtctcttgatggtttgaagccttcggatgtgttggcattgcataatactttcatgaagttgtcatatatgtgatgatctatacgtgaaattagtggtgcctatttatcattaaaaataatttaattagtcatgatatgatcataatttatgatagtaatgcaactattaattgttaggataaatatttgtgtgattataatggactctaaataaaagaatggagatcagtaaaaaataaaatgcaattaagttcaaaagaatgtataatgggttttcatatttacaaacattatgaatagtcagcttaacaaaacttaataatcagaaaatatacaaatacaaattaattagaaaagaagaaaacacattaagaaaaataagtgttgttgtttaatatcgatcttaagatataaattaaggttactttgatgcattaaaagggcagttaatattagtctaatttaagagtatggacaccaattatatgaaattgcatcatcatatatatggcgtgtttgagcattatacaattaagtttcctatattttaacatagtaatctgtaacctacgtttttcgttttcatattctatatatgatcatgagatatgatacagaatactattaatattaaatggatggagaaagtaattaaaacaagaaaatacatataaacaatagtataagtaattaacgtagtagctaagttatgtacgtacccagtcatggcaagagacaaaaaagtggtcagctccattagttcgattccaataaggatatttgcgagagagaacataaacgtagtcagtgaaaactcgagagagagtttcagagaagcgtccacctttactataggttgggtagagtgagtctgtgagttttgatatactcatgggtaggaagaaggcatgtgcttcatcaggatgctttgccatgaatgaatgatttgataattcactttccaactcgaaaatgaactgtccttctattgagtatatgtatgttgttggcccattgtggaccattggcatttctccttctctgtaactccatatcttcattctctttaccatctctatatgactcctacaatacatgtatataattaattgttatagtttcccatatcttatgtggtactggtgatagcatgtgacctatgtagtgtatggacaatcatatataatatatataggtttagtctgggtaatttctacttttacttttgtttatgataaatataagtttgactcattatttttacatgtagataactattataagaagatcatttttaataaaaaatacttttcaaagtagtatttgaatggcattataaaaaatatcttttgtatgtaaattaaaaattatataaattattaatttataaaatagtttcttaagaattcttttagaagaaactacaaattatagcttcttttaaaaagatttttaaattaaaaaagtaatgtttttcttttagaattgttaaaaggtattattggtacctaatactttgtccggttcatattgctattagcgtaataagtacgctctacgttatcataccatccgctattggtgtaattatatcgaatctcatataatttaaaaagttagattttaaaaaatatcactaatggatgttaacaaagtattggactatctaacaatactctcttctttttgccaaaaaatactctaaagactttgttaattctaaaagtttaaaaaaactttataaaagctaagacaaattggttatagtatgattacattttatgacatttaataaaacaaacataattaagttacgtagcatatatgcacacactctctctctatatatatatacatatatattagaaagattaaatagataaattcatgccattattgttagttggttattataaatttatgatcttgaccttttcaaatctatcgtaaaaattcgccaagtgtttctactggaaaatcgagatgagttgagttgactaattatatagctaaaaattataagagtcaatgtttgtgaatagtttatgggaaacaaatttaatttacactcataaattttaaatatttaagtagataattttgtgtaaattttagattgagtcacttaataatatattccaaattgggttaattttagctttgggattttaatttaggttcaaattcctagaaagaactaccgattcaaagcaagaaaaagaaaagataaatcatttatttatggtataacaaagactcaattagctagttggtaaattataatactaattcttttaatttgccaaattacgcacacatattacgaaattatatttatatagacatgaaaacaactcttcccccgataattgagagtactgtatctacttttttaaatgattaacttaatttagatattcaggggaggagattatagaaatttttctaaactaatcaaaagaaaataattaaagaaatcagtggtactattaaaagaaaagatacttaactgatgaaaagcataaggatttctgtaaacaggtcctctaggaatgtaaatctcttctctatcagaagtgtaattcttagtaagaatggctttccgtatagctgctcttgctcttgccaacccatcttcaagcctctgcacactgctcttattctgctcaaatacatataatacaaattaatttatataactaatcaaacaaccacatataaataataaatatatgagagagatatagtaatcagaataataataataataataatgttatactttgacgtggttgctgctagcaagagtagaaaagttcgaagaagagtactgctgatcatgatgtgatgtgaaattagggttactaaaattgttaattgatggagaagcaggtggtttgagatgatgatgatgagaagggcttagtaatgtgtgatatttgtttaatggagaggagaatgagatgaaaaagaagactatgacaaaaattggagggactaagtatggtaagtagtttttcattaatgaagccatatatgtttgattttgatggaagagagctattcacccaaaattataggcatcgaactatttatataacaaattcactactcagtcatgttacgccttctatgatcactctctctatatatatagcgtatttatcactcccttcggtaatgttaaactagatataatatataggatatttattaattgatgatataattaattgattaactaatttaaattccaggtagtatttagtaaggagatatttttatatattatcaatttattattaattataatgaattacttattctttttatcacgttatttttaattactttttttagaaagatttaattaattaatttgttttcgcatagaaaagttaatttctttagtactatgcggagtccaatttccacacacaagctagtacacctcaaaatttaaaaaagtgaagtttaaaataatttttgaaagtcactttttatacttttttaattttttcaatacttattttaaatttattttattgtttttttttaaaaccatgtatatattttttaatttttatttacataaaattttatataatttcttattttaatttttttgttataatatttaaaagatcatttattttttataagtatattttttaagaatattattagaagaaaaaaataaaaaaaaaataatataattaaagatatatattttagataaataaaaaaattattaaaatatcgtgtatttataaatttttaaaatgcaaataaaactcatgataatattatacgtgttttttatattcaatgtatattttgtttctctacatttttttttttatatccaatatatgaattattttgtttgatataatttcaataaccattatcttacaaagataaaaaagaaaaaaacatcaatttagtataactaatgttgctccagaattcgcccaaaatacgtgg

SEQ ID NO: 299165 - DNA, 4392 bp, Cannabis indica
ttaccaaaaatctcaccattttcggaactaggttagaattgtaataacttagattaaattagtattttcttcgatctcacgcaattcccataggttcgacctcgttcttcacaatctccatactacaataaagattcgtgcgcttgcgagttgataaatgtgaaacgtatcatttcggtatacaacacactcccacccaattctccgcctcgtttccatccctactccctagttggaattagattaggttacttaattttctttgcaatgtaactttaaaaatatttgcaaagaacatctatatacctaagtcttttaagacaattatcaaaaagaaatatgcattgattaaaaggtaattaatgacttgtttatttttgtcaattgagatagttaagaaagcaagaaagaagtcttttttgtataatcccatatgaaactttgtcaagggactagagatttagcattttaaatgtgaagagaattacaaagacatataaatgctacaaagaattaagaagactaagtaagcctcccattaatgacctaacctataaggacttgttggccttagccatattcaaagttgaaaaatctaagcaaaatcagtgccatccatttatgatgatgatgatgatggtcctgatgatacaaatttggtagaaaggttcttcttttttgcctaatttttggtgataatcttcaaattttaatatctactatatcatacctacctagttatctactactaaccaatttggaagctcttgaaaaccaaactaaatgtagccaaagaaatctacaatcacaagcagtgaagatttgacatgaatgaacaatctcagcaccttctaattatattcgagacatttcttccaatctcttctttcgtttgctctgatacaggaccatctccaagatacatactaaagaaagcctctgaagaaagaaggaaaaaaaaatgagcttaagattgtttacttttcaccattgtatcaggtttttatgatctgttccgaggaaaagtgcatatttcgggaaaaattaaaatgacaagaaaaagcagatacagttcacttactacacaaatccttgctctgcactgctccaaccttatcacctccaactgcatgtataatagtgtaaaaattaataataccgaaaatgggaaacgaagcataatgctcatctttgtctcaattcttgacacttgagaggaaaaacttgatgatggttacttactttcagtaatcaattgaccatcagctgttcgtcgaaaatgaattgttgtcccctgcaataataaccatatgttgatgtaacagccgataaaatagaatctttcgaaatcccaacaatgctataaaaaaacaaatggaataaggtttctttttaccgcaggcaaaggaatgtcttgtgtgaagcatgacccaaatgctcttaagcaatgataatcggtgtttgggttagcctgataaaagttggcaagaaataaccagagttagatactatgcaaagaactgaagctaagggaaccaattgaagataactaaccttaactaatcgtgctcgaagagatttctcaaaggcactgcaccaaaacaatgaaagatactttagcttgttaacttattttatcaagtaacacctttattgatcagtcgatcgaacatatgaactaacaatggcctcttgaatttcaaggaatacttgagataagaatatgttaaatcaccactactctgcatttttcggccataatacagaacacaatgattatcattatgaaaggagagttaatttttattctaacaaaaacttactctttcacagaattgattttcattccattgcaactaaccacaagcctaacagtcataccaatatcctccctgaaaggttcaaaaaagaacttgcatgagaaaaacaaaattagagactaaaattcattctatttcaaatacggcataattaagagaaacaaaacgcaaaatccatcaatgccaacaaactcctctttcgtcaaacagaggattagaattaatcataagagactaaacagcaaaagggaaaccagtgtttaacatcaatatcaagtacctaagaagatcgtcgtaaaattcttggcacttatttagttcatcagccgaaaatgaagcatatttttgacccaacttctcacaaacagatgacagttgaatatctaaaagaaaagataaaacttaaagggtcaggattcgggaagctatttggatagaatattttcaccaaccagagaaggaaacttacaaaatccgtaggcatagatcttcaaagacttcactttaattattgtcatagttctggatccagttccaacaaggacctgacataaatgtagaagagagttagacgaaaattgcacatatgtcagcttttcagggtgagaaaatgtcataaagactcttataaaaaggagaaaaaaaaaaggtgccaaaggcattaatttcgggtcagaagaaaaatttatgttcaaaatgcttacctctgaacataaattggaattactttctccagataaaatgttgtgcaaaatcataggaaactcaatgccagttctgggctcaattacatgtcttctccaattcaaatcggaaaaagaaagacctgcacgtccttgatggtccacatcacacggcctttgaaccatgacatcagaattctccaatggagcagttaacacctttgaagatctggagacaagcaacataaacaagtttcccatagtaaggatatattactactagataaaaatttaatgtgaagctaacaatctagcaaaagatttaatgacttacatgttgtccaatggtggaacaagcgcagcagcgagtgaaagtacagaaaacgattgtaacctttcagcttctctgaacacaagctttgagacaaaactcgatatcttgccaaatattacaggcatcctagagtcaccttgtgatctaaaactaaagcagaactttttaaagttttgtttactagaattaatgtgtttaacttgagaaaaagatgtacagcttctggttttggaactatgtgggttgcccgaaatttcccttatgttaacacttgatccactagacagtacaaaaagtatagcaccggcgagcttggcaatgtggttaaaaccttcaatagctaaacttccgggtatggatgataaatgactatgttggtaaaatggattgtccataaatgaagtaatctgagaaaacatgtgccctccaaaactattcattgcaagaggctcaactggaaaaatatacggcgaccctccatcgagatccataaaccaaagccagttattcctcatgattactcgcccaaaagagtgagtaaccaaggaatgacctcaatgtagaaggtgatattaagaacaaagaaaaatacaatgcacctgtcattttacaaaaggcaagaaatagattaatctagcttgatcatcaggtattattccaatttatcaaaatcttaaacatcatattaaacacatccaacttagcagatcaataaatggatggactcccaaagctttccatttcaaaatgttaagcactaccactatttctcatatcgctactatcgctactagtacaattcaatatcgggtcctactcagtatacctaactatttatagggtttcacttagtaacaatgcttatcaatacccaaatcgattcttcattgatgagtattaaaagcaacataagaaaactatcgcaataatagcattacaagaaaattgttacgaaaagattttctgagatcagagatgaaatacacctaccttgaaactagaaaaattgattaattgaacacctgtaatcgaaaaaccgcaaacactctgtaatgaaaaatcaaataaacacgctaatatttctaattttaatccaaacatgcaaagaaacagaaaatgtttgattaaatcaaaaggaagagagagaaacaatggccgattgattgaaaagttattcttttttccaatgtaatcaatccttttcgaattgttcccttttccaaattattcccaagaaccaaacagaaaaacaaaaacaaaaaaggcgccaaaaataatcaataaaagaaaatcagaagcaaaacctgaaaccagaatcggaaaacttgaacagcgcgatcaagtatcaagctttaagcttcttgcatttgaaagattagggctttaatcttcgtctccaattagagagagatagagaaaggaatatactttttggtatgaaaaaggaacaagcaacactttggttccaaacaaagaaataaaagtaagttttttttttttttttttgtacaaaaatggaaatggaatcaaaataattattttaaaataaataaat

SEQ ID NO: 299166 - DNA, 936 bp, Cannabis indica
tgatgtttgttgaattcagtgttgtcaaagtacaacactcttcatataatctatttcactagaaggagaacattgaaagcgacacaaggagttaaatcttattatgggatctatttcttataataagaaatgctatatgggacatccaaactagctatttagatacaacgaatcaaattcaaattcaaatacacacacctaaaggctaaagctttggagctctaacctacagcagaatcctcaaatgggcatatgttttcttcgacccaaaaactataataaattatacacaaagagtaaaaaatggtactttttttccccttttcataatttgagatcacagcgtatcaaccttataaacagctcggttaaatttaatagcataatttatcaacttgatcaaaatcggaccataaatttcaagttattcgagtataattaatataaaacatataaaaagaggtggatttggattgtcgaacaagcagagttgagaatgagtggaatgggagtttggattgtagagattacataccttatcctcgtactcggactcttccatggcaaggagaagctcttcgctttggggttgaggccattgggatggcagcaaaaaagaggtgggaatcttggtggtggaccatgggtattccgtcatgaatcccggaaactgcaacattctgtcccggaaagtgggtgtgtttggttagacgtttctgtattatgaattggattcaatccacaccccttcctatcctgtattagtgtttcctattctcttttccttcaaatattcaattcttcattctaatttggaaatcatatatttttttaggtacagtctattctacagtatgtaactatgtattttttaccatttacatatatattttgtttttttttaaaaaaatgattagaatcattcatgaatttgcg

SEQ ID NO: 299167 - DNA, 1367 bp, Cannabis indica
tatttggttataataatttttactctcaaattcatttcattcaagcccacacgctctggttcgccattcaaactacaaccagccccatcgaccgatgcagtcaaacccctctcctctcatttatcattaattcttgccctttcgccatctgctctttctaaaacccatcaaccctctttgcttctctgatcatcttatatatatattttatgtattattgcctagttagctacttctctagctaactcaccaagcgggaacatttttcaaaacccaaaaatttagtacttatttattatatagatatgttactcttactcatttatgtacacatgcctatatatattttctcaaatataatatttcatatggcttggtgtaccgtgtatgtgttattggatgtattatatgtgattctctctctctatctgatcactttaatatttgttatctattactatgatcacgaaatcaattatactttttaatatataatatatgattataattatctaaaatttatattgtaattattctataaaattaaaataattaagctcttggtcttaatatcttatatgaatagtatcatcgatataaataattttaagaaatatataaaaatcacgtgcggaaattgaatatatgtagataaatatgagttatatcaattagttactttgttttttctttcatattaatttatgtgcaacctttcactacatggcttatggaagaaagaatctcatatttacctaattataataattagtagaaaaagaaataaaagaatcaagtactgccgatgatggctactctttttattatacctttttttttctaaggagtggactgaactatagcatatatatatatatatacgaaagaaaaatatattaagcttttgtttattgtatcatattctatgataacaaaaagttagcctattgttgaatttaaaagatgtaaataaaaattgaaaacagaggaaaagtagtataaagcagtgaaacatacttttccatattgggcgtagaacgcgttttgttttgttttatttttcttctaatatatataactttaaacatgacattcatatgcagaaaacttattgtagttaaattataatttaagaaagagacgaagtaccacaattataaaaataataaaataaaattataatgtaaatgtctctatatttgttaattaattaattagtacttctataatatttgcaaaaattatataagttaattaatcattgaattgaaactgtataacattgtcaaatacatatatttaagctaatttagactcaaactatatgtatatacgagctaagtgttttgttttctaatattcagtct

SEQ ID NO: 299168 - DNA, 3919 bp, Cannabis indica
cattataattccgctgcacccactgtaaggtttctcaaattttatatgtgtttatttacattgttttagaaattcatatttaggatgttaaacaacatacatggtagtaaatttagatcttggtaaaacatattccaacaaaacggtggttaaccaaactgaaggtgagatttaagcggaaggagtcattattctgctgccatcgatgtaaggttttctaaactttatatgtgtttatttatttcattgtttcagagaattcatatttagggtgttaattaaacatgcatgttagtaaatctatattctggtaaaataagttccaacaaagggtactccctaagatgcggcctaactgtccgaccctttaggggggtagtactcctgagtaccttctcttttactccccatgttgtgtttagtgcttagtagtatgtaatattgataataagaggatgtattgcattaaccatgtcatatgtaggtagagtatgattcctaaatcatgagagtgcacggggtgatgggtatatcttctaaactaatctatcacccttaggtggatgactcacccccagggtagggtagaggtgattgcttaacctaccttgggggtagtcacctatctcacccttggggagtgtgtatactcaccctacgggtggttgctcaaacatagccatagggagtaattactcaatctcactctttacatagaatatatctcatgggggataataactttacatactcctcattaattcaattatggtatttttgtgccacgtgtcattatacttgtcgcgtcatccacgccaaaatttaggtaaacatttctcccttaagtttttagcagtatagctatacggtagaaacttgtctgtgtaccccgcatttcgatcttgttatcgatgacttagtggtatggtgctgggaatgtcatgactttaccattacaatacattataaacccaagaaaaataaaatttccttttttcatatttttacaagttcactccaacaataataattttccaattcaagaaaagaaaaataaattacaaagaagaaaaaattatttacaagaaaaattaatttaaatatttaataaatagaaataaaattattattgtagtaaaataaatggaagaggaaaaatatgtggagaagtgtggaaataattagagaataagcagcatatgccttatatttaacgtataggcttaagtgaagactcaaaatgatcaaaactataaaaaaaaaatactcaaaaattgcattttcctcttctctctattctccattttggcccaagcataaagaaccaccattggaggcgtttttgagagctttggaacacaattggccttaatagttggtaagttccataacccttcataattttttgcaagagtgtttacaccaaaagtagtcttgatgacatggacatcaatgtttgacacatgacaagaaagatgacatctcgtagttgagtagtcccaagtaatagcaagttgacctaagaggggtccctagccctgtgcccaagttgactttgggaactccatgatagaagttcaaaccttgataactcatttccaactcactatatttcagtattttgtatcatgaaaatatgaaacaaccaaatccaagcctcgggagctgaaattacatgaacctgcactccagaagtcaacctgggcacctagggtttcacccagcacccaagttgacatccttaactagggtttcacccagcactcaagttgacatccttaactagggtttcagtttccgggacctcttagtgcaaatgggtcaaacgtttcattgggacatgaactagacataccacatacatatttgaggcatcagaatttgattcagagaaattcatttttgagcacccggtgcctgggcacttagcgcccaggttctcaatttgtcaattttggcaatgatgtttttcgagaactcttccgagcatgttctccgttttcagaaaagattaagattgaactattttcagggaccaaacagaactttcgaagggccataaaggggactaggttgacacctagcactgggcccagcacctaggttgagatattatgtaattacgctacataatctaataattacactataacttttacattacaacatataagaactttttatttgttcaaatataaactaataagaaacggagggatataacatttgaagaatgaacaataatttaggtaggtagagaaacacaatagcaagagaaaagaatgtaaaataaagcatcctaaactagtaaagtaatgtgaaaacaaaaaaacgaatattaagtcttgacaaaaaaaaaaagaatattaagtgattccctccatggcgatgtcttttaggggcgctcaaaatggcagccaagatacaagtcaaaacaaattcgagttccaactcaaaaaattaacaatcaaaagcaacaattagcataagagtggaattaacagataagagatcaccctttgaggtgggtcgaagttatcacccataccaaacagaacagaaagaaaatgttatgcaggcatagatacatttcaaccatcaaagaaaggaccaagtaatatgcctaaattagagaatttattatgcatttcccttgacatttatctaatttgaaaaagaaatgcataaagtaggaacaagttatcttaaattggtaaatgaagttttgaaagataagttgttatttaatcgaagatggcacgaagatgccccataaatagaaatacaccaattaatggcatagtgatgtccgagcattcaattgaagatgttcaaaggaaaacaagcgacaagcttatgaattagaaagtttctcacatctcaatatcccacgagctctcagcggttaattttggtaccttaacttctgcagccaaatcgcatgatgctgaaatctgtaagaaacaaacaagcaaaagttatacataacttttaaccaaccaaccaagtgaagtgtagaaataacaaattagatgagtctttaaaaagtacctaactccatgtcattattggttaaatctaaagtagaacaatacacactataataggaaagaaaaaattacacacaagtatgaattttgaatgtaagtaattggtataaaaaaatggacaaattttgaaattggatgaatacattacacattgaggtatataaacacatctaaatttgttgggagaaatttgacaacttgttagatgatttgggcaaaaaaaaaaaagggtcaaaattcaagagaaactttgttacgtcgcaggtacaaagagacgacgttgcacatcgctgcctagtaggagacacgcaaaggcaatgacgcatatccaccacactttgccacttttttgaaaagtcattttttttttattttttaattgcaatatgtaaaacaaagtgaatgcttacattatttaaagggttgatcatacttttgcattctttttctaatgcctcttgttctcaaagatccaccattttctccagcccccaaaaaatcaagaaattgcttgcatgaaaaatttaaaggcttgtaccccaattctcattcttcgttgaagaatcctcaagcactgagaaacttcttcaaacctcttttgtgtcttttattttatttgttgatctccaacctcatccccaacactcccttagtacctcctatgactagaccactagcccaaaatcactaacgaaatttgttaaatcctctcaataccactgagtgactagaccactagctcaaaatcactacaaaatctgttaagtctctcaataccactgagtgactagaccactagcccaaaattactaacaaaatctattaatctctcaataccactgagtgactagaccactagcccaaaatta

SEQ ID NO: 299169 - DNA, 1945 bp, Cannabis indica
ttttttttttctttctctgttttaactttttgtgttatgaatttatttaaccacagcaagttgtcataatggtgctgaaggtggaccttcagtgccatcgatgctacaagaaaatcaagaaaacactctgtaaatttcctcgtgagtttctctctccaatgatatttctaaattttattttgaaagatctctctcattgttcggtatatatgttttgaacattttaacaattgaatagatttaattagtgtgagtttattatgtaacgaaaactgagttattatgtgctgtgtattgtgatttgtttttttgaacaagagaaatacaagaccaggtatttgatgaaaaaaacaacacagtgaccatcaaagtggtttgctgctctcctgataagatcaaagaaaagattatctgcaaagccggagactctcttaaggagattactatcaaagtacctgaaaaaccaaaggagccagaaaagcccaaggaaaagcccaaagagccagagaaaccaaaagaaaagcctaaggagccagagaagccgaaggaaaagccaaaggagccagagaaaccaaaagaaaagcctaaagagccagagaagccgaaagaaaagcctaaagagccagagaagcccaaggaaaagcccaaagaaccagaaaagccgaaaccaaaccctcctgcccctgcccctgctcctgctccagctccagctccaccaaaggaacccgcaccggcggcgccctgtactgggtacccaccatttccgtactatcgcacgtgctgctcggagtgctacggaggccacggtggtgggccgtgtgtaaatggttttgggggcccaccaggcccacccccatgttatcaatacgatgggtattatggaaggccggtgtacgatagttacggtggaggaaggggttaccaagtgaacaggtgtgagtatgtatgtgatgataaccctggaggttgcacggtcatgtaaattacgaaaaacggttacacctcatggggccaaggcgatagcgagcaatgctgttaattcatcgtgttattaaaagagaacaacaaaaataataaaaagacatgaaataataaattaaaatttgtaaccaatgttttatattgtctgtgatgatgatgatgatgatgatgatgatgatgatgagggtaattaattgagtctcgtatgtattgttaaatgacaactaaacgagaaattaaagtggtgatcaagctagcaatatatatgtaatgtgcattgtacatttagccatctcatctctaatgtgaaaccactttttgctttatgagtgatatttttctttgatttactttttcattgtggtaatgaaattattttggttttattgctgatgtttttgagtcgatgtagtcgtaatcgatggatcattatggtggattcaaatagttaaatatacatgagttggcgcatggattttttcttttcagaaaataattattgaagttgtagatttctttatcaatcatttccttcagttggtgtccctgctttttcatgacttttcctatttttatatataattgatgtttgtctgttttatttgaacctcgttgtcatggaaattaaaaaagttaaaatgataaggttttaggcacttaaagcatcacaaagtctaagattgattggtttataaatttttatatatgagatgatgatatacatatttatacaaacatcaattgtgaatcttctatgtctatattcaattcaaatctgatcattgaggaagactctcttcttaaatgattgttcacgtttcatttaaatattacaacgaaatgcgcctactccaatagttgtcataaacaccttataataaaattggttgtttgttacataattaaatttcttattgtataataacacattattgattttctatacttaatttttttttctttt

SEQ ID NO: 299170 - DNA, 5665 bp, Cannabis indica
ttaaaaaaaaaggctctattttccttaattacttgtataactggcctttaagataagttttaacggcttgtcgtcatttatagtggaaatgcggggtaagctataggttgtccatttactatgtttatttctagttcctttgtatggctttaccataataattcacttggtctgtggttatggcactgggaatgactatgacagtgtataaagatttcatctctgaaaactcaaataaaattctacatgccttaaatggtttcaattcaaagatttataggaacattagttctgaatgtaccaaagggaaagcaacattatgtgtcttgttgttaaaaaaattcatttaatatttgtgcttccttcaagttttctgaaagtttataattcaggagaagctcggggaagttcctggacaagatgacctaagatctggcaggagcgagcaacatttgaacaatgacacccgacaaacaggtcaaatagaaaagcacggcggtcactagacattggttgccctgtttcatgctgctctcaaggagcataacctaaccaactagcaacagaagtttttattttggcatagcttgtagtttgagttaaatcaaagaaactttttttccccttatttctttttcctttttcttatttgtattagttttttttaggatactgcttatttcatatgatcatcctccatgtttctgattcggccttatatgtttgagaatcgaaacaataggatgatgatatgtagtgtgaaattcatgacagtacccttgttatataaagggtggtgttcacttcacactttcctttaccttgtattaaattatgattgatgaatgtaccatgctgctgttatgtacttgggcaagcacatttgagtatcacactttctatgtttattgacttattcatgtagtttatcattataatgcaatgactccaagtttgggactgtaaagtttgttcctctcaaatattttaattatagcaaatatttctgacttaacccgtacattttatttttagaaaaaataaaacttgagtgaaatataattttacaaaatttaaaagaattacaagtatttacaaaataaataataataataataataattgtcttatcaacttttatgaagagggagggaaattatttgaacggtaattttggaaggaaaatttgctaaaatttgctacaatttggcttaatatgtttaattgtaaagcataatcttttaatataccattcaattagaaatatggtacttatacttttaatatgtctttctctaactctttcactttaagtctcgttgtcttcaccctgaagtcctaaaatttacgagctcaaccacttcgaaaccctaaaaaattgtcggagttctcaactcattgctcgttatttatttatttatttatttttatttttcaatttttttgcgatatcttgcaatatttagagagggaagagatttttttttaatggcacaaaaactaagtctgactccaacttgaatattttattttatgcgccattaaaatccaatctcttccctcgtgctcccaaataccattgtacatcaaatagctaaatagagttgaccctattaatttaaaataaagtaaaataaataccacaaaaaatatctacaaaatgtataaatcaaacacacatcatcgaacaaatatcaagtaccatttattgagatcttcattaattgaattagattcacttaattatttttaatctttttgtgttctcgacatataatattttctatcataattttcaattaaactctttaaattcaaattatttgaatgaatcatgtctctttatatatctatatatacaactccgcattgccaaatataactatgcagtggacgagctgtccaaaggtgatgttgaggccgagactctaaagaaatggttaagggaggcccatgacgggcccttccgaggtgagtacactggggagatctagcacttgaatcttgaccctatgaccgactggtttaagcgcttcttgggcccaaacctggcatcgttcgcctctgagctggtgagccattttgctgctgacttaacccaactcccaacaaagaggtacgcagcttgtgcctcctccaattctgtttaccaaatctaggacatgagtgttgccctcacctccgtgagtatttacttttcatttttctttcttctattattactttttggaggcctgaccttattttactggtcgtcagattattgcagaggctggtcgtctttctaaaacattgatcgaccaggggtttgctgtctcagagttgggtggcatgaacggagtcatgaggaagctcagggagtcggaggacaggatggagactcttcgcaatgatgctctagcagagaaggctctcagagagcaggatcaggaggcattgaagacaaaagatgacatcattgcttcaaactagaaggacttcttgaacgcttgagaggagattcgggggctttctacgaaactcaagacctttgaggagctacaccagaccaacttggaaactaccgccattatgtctattgagctcaaagaattacgtgagttttgggagcggacccaaaaggtggctacaaaggctacgagggagctttatttactccggggacctgtaagcactgcgtgaggcgcttcaaggatggagtttttatgtgctggaaatcgaacaagtttgaacctcgcctccacttcatgcctgatcccaaagtcaccgtggtacgcttctgggaaaagaataagaagttagtacaagcctttgttgagcgggtgggtcctcgtcttcctccgagagctgattgattaaaccccttctctttttttctcttatttctctccccctaagacaatattttaatttttagtttatattatctttattttttgttatgggaaacatctttatggcctttccccaggcctattattattctgttttggaaaacttatattttaagtgcttatatttacttatttgtcgcctcttttttgtttttgatttttgcccgtctgcgtgtgtttatgccttagtaccccctaagtgatttaaaaaggggctttttaggtcacttatcttagatttcacacgggataatacatatcctttgttcgtcacaggttaaggtacaaagtataaaggtgaaaccaactactgaattctgaactattaatagtatttccagagatgatcagcattttatgctcggggcattatggaaccatccattcgcttcaatttataggtctcggagcctatttatcttcgattttgtatgggccttcccaatttggtctgagtacacccaatcctaattcttggtaggctggaagacccttcttaggaccaggtcaccaatggcaaatttcttatttttgactttagagttgaagtatttttgccactttcttttggtatgctgccatgggtatttaagattcttcccggagctcatccactaagtctagtgcttcttgtaacaaggcttgattcgtggctgggtcgtaagtggttctcctatgggaggaaattatagcctctaccgagaccatagcctcgcacccgtatgccattgagaatggggaatttctggtggtagttttcgcagtggtcttgtaggcccataatacgcgtggcaactcttcaggccagttgtttttgtacgctaagagttttttcttaagggtgacctttagtatcttattgacagcctccgcctgtctatttgcctgtctcgcgaccgcagagaagctctttatgactccgtgtttgttgcagaattgtgtgaactcatcacaatcgaattgtttaccattgtctgagactattttgtgaggcagcccatatcgacacacaatgtttttttttataacaaagtccagagctttcttgaaaattatagtcttcataggttcaacctctatctattttgtgtagtaatccaccgccactattgcatatttgaccccaccttttctcgtggggagagaccctataaggtctatttcccacaccgcgaagggccatgggctcatcattagggtgattttatttggcggggctcttgggatgtttccaaatttttggcatggatcgcacttgacatagtctatacagtctttcttcatggtaggccaaaaataaccttgtcttaatattttcttggagagactcaggcccccggtgtgatctctgcaaaatccttcatggacttcttgtacaatccgtctagcttcaggatccgacacacaccttaaatatggcatgttgatccccctccgataaaggataccatcgatcatcaagtatcggtgagcctagtactatacctttctggacatagctctctcttggggcaattctcccgttgttatgtacttgatgatagggtccatccaacatggcatttgctcatttgttgctacttccgcttttggcctaattctaggctccgtgagatactcaactggcaccagccccagcttttctacctcactgtctgatgctagcttagctagacaatttacatgggcatttctttcccgagcatccgttcaatcttgtaattcctgaattcttgtaacaattccctgacagttgagacgtaagcgatcattttttctccacgcgtttggtattctcccaacacttgattgacaactagttgtgagtcgctgtatacctccactctattggctcctactaccttagccaattttaatcccgctatcagggcctcatactcagcttcattgttggaagccaaaaatgtgaaccttaaagtggcctggagccttagcccgtcaggtgatatcattgctactcccgctcttgatcaattctcgtttgatgcaccatcgacatacacttttaatgtaggcatgtctagatccggctcattggcgttaactttagtttcattgcactcaataatgaaatctgcgagcgcctaacctttgatcgagacacgaggtatgtatcgtatgtcgaattggcttagctccattgcccacttgaggagtcttcatgaggcctctcgtttctgtaagacctgccgaagtgggtagtttgtgaatactttgatggggtgtgcctgaaaatatggcctcagctttcttgaaataataaagagacagaaggctaacttttcgatcacggggtaccgaacttctgctcctatcatgcatttactgacataatacaccgagtgttgtgtctttccttcttcccggactaatgctgcgctaatcgcattctcagagacaacaagatatagatacaagtcttctccgtgaacgagcttggacaacacaagtggttgggccatgtgttcttttaacttcctaaatgcctcctcacaatcttcagtccactcaaacttttggaattttttaaagatgttgaagaatgggatgcatctgtcagttgagcaggaaatgaagcgacttagggtggctaccttcccgctcaagctttgtacatctttgtgtcttctcaggtaggtcatacttaacaaggcctgtatcttttctgggtttgcctatattccgcgctggctcacaataaaccctaaaaatttccctaatttgacaccaaaagtacacttcttgggatt

SEQ ID NO: 299171 - DNA, 4236 bp, Cannabis indica
ttttcaaacccaaacttgcataaattgaattccatacatcaaaatcacttctagatgctaaaaccaactcaaatgaaccttaaaattcaaaccctaaacatttctaaccctaacagccatcaattcacaaaatcacatattcaaacaaaagtagaaacttcaagaactataaggtaaagatgctagggcttacattggctagatttctcttgaatttccttgctgaaatcaccaaagttcagcaacaaaccctcttgttgtagctgggttcaaagagagagagagggaagtaaggagagagattttttatttcctttggtttttcttaattgcataaggcttaggaaattgttagtgcaaatgggagtttgttgggattttataccctaaataaaatatattttaatataatcttattcgttatcaatagaagattataagtcgtttatgtttacatgtattattcatatttatggtttaatatataatttctgttaaatcctgaacacatagttattcacaattacagtgatgtcaaaaaattagaaggtatgcttcaaaagattatgttgatttatcaatgcactggatttacactgatgtgatagtcaacgataaagtttacttacaccttgaataagtgttatgttctttctaggacattggcaaagtatgcttgtatcagatgtatggagtatacattggactgggaccgatattgatcttggtaaacatgttatgatcttaccgttgtatcgttctaagtcaatatcactggttgatcttagatcaaaagatcttaatcctgatatggttaggttcaatgtcaagagtgttatttatattctaagagttgttagttaaagcctaccaattggttcgggtaacacatacctcttgagaacatgatagtacaattgagtgggaacactaatcatagatacataatctatagcttctatttgggcatagaagtgaaatgatgatttccttcgagcttggcttaatagagttaaatggtagagctcttatttcagtaattatattagattattgaaatgtcatttataagaagctaaacgtcttaaggataaatacattgaggggtggaaaagtaaattatctctacttgatgtaaatcatctatagaggatatttgattattgggattagaacgatggataatttcatagcatatctaatcgttgaacatatagggtgctctatataattaaaagtgcaattctaaatctatagtggtgcaaggaggaattaataagttagagaatttacttggtaaattctagatctggttattggaagcttgattatataggcccatggtccccacactagttgagacaatactgcttataagactcagttaattgattttttttggtcaatcagtgaaattcactactccaaaaatatcaattacatcctacaagcatcttcatttgaagatctaatttcatctatttgtacaatgtatagcaaactcaacaaatctttttacaaatgcttttaaagttacaaagttaaaaactaacttgtgtctaccggattgacatgtttaggccaaattcaagaaactcttctcttcacatcttcttttataactcgaataacatgttccattgatttctctgttgaattccatagtgaatcattttgggccctccatagctgatacacaagggcagctacagcagcaaccaaaattgctttcttgaacttgctaagttgggctcgttcaatccaccttagcatcctgcataaagatgttgattcaactctccaaccgagccaatcttacttgtgttaagtaaagattagagaaggagcaggagaagaaaaggtggtgtgaagtccctgttcggttctgtagacaagcagaatctcacaattatgttgagcttgtgtagcctctctctagttctcagtctatcttgtacaacaatccatgaacaaaagttgtgtctaggaatgttaagtctattcaatacctcttggctccaattaactttcctttgagtaggacaaagagccttgtatccattagagatcttgtattgcaaagttgtgaattgttgaatgtccatagaagctctaacttgatttttgatagcaaccattttcttccagtaccagctagcttggggtggggcttggtagttccaccaatcctcaccctcgatatagacacagtgattccatctaatccacaagctgtcttctttatttgcaatttcccacacatactttgtcatcgctgctatgctccattctgcaattttttttcaaactgatcctcctgctacctttggttggcaaacatgatcccaagaaattggtccagagccaagggacaaatgatggcctttccacagataagcacggcaaatggcttcaatatatcttatagtcttctttggtaataccataacttgactccaataagagtgaatggacataagaaccgaattaacaagcacaactcttcctgctagtgataagttccttgaacaccatgttttgattctagcagtcattttttcagctaacacaatgcattctttaccagttatacgtttggctcaaatagggatacctaagtatttgaaagatacctctttttttctaaatcccgagctgtcaatgatacgttgaatttcatgatcttccataccacaacagtaaaaagcagacttgtttggatttggttgtgggccaaaagagcaagagaaaagctttagtccttgtagtacataatatatactcttgaaatcaccatgacaaaagattataacctcatcagcaaacatcaagtggttcaatttaagctctgcacacctgtcatgaaatttaaaatctggtttggttccaattctcaacattattcttgatagatactccataccaagaacaaatagtaatggtgaaattggatctccttggcgtaacccccttttcccctcgaaatatccatgaagcgatccattgaacataagaaagaatctaggggtacgaacacatatcattattatcttgacaaacttatcagggaactgaaaagcttaaagtatttcttccaaaaaaatttttgtaaattaagcttgatcatacacccatctttggtggttttccttccataatgcctaatcagatcttcacatatcatgatattgtgtgcaataaacttgccagtaatgaatcccctttgattttgagccaccaaatcaggtaagatagttttcagccttgagcagattagtttggttgtagttttatagataacattacaacatgcaatatgtctaaagtcactaaccgtattaggacactaacatttgggaataagtgttaatactgtagtgctgatttatttgagaatctgacctgagcgcaagaaagatagaacaacttcactaatgtcatctccaattaaatcccaattgtcttaaaagaagcaactggtatagccatttggtcatggagccttgattccagggattgtaaaaattactttcttgactttatccttggaaaactccctcattaatgaatctgcttgtgatttggagataagaggcccatgtttcatgacaccagcaattaccttcctcctgtattccattttagaaccaagcaattggtgataaaatgaaagaaaagcatcaataatctaagctggttcatcggttctttctccattttgatcttcaattgacaaaattctatttagttttctcctctctctgaaactagcatgaaaaattgttgtattttcatctctgtctttaatccaactgagtttggatttctgatacaaaaatgagtttaggccttttaaagtgtccatatttatgtcgagctgctatttctttgtatgtaagttcctggttcagaggctctatctgcaacttcttttgaacatctatcagctcttctctttctcttttaatcgtctcctaaatgtttgagaaatgattacaatttagttctttgaaggtcactttaagtttctttagctttgtagtgacttaatacattttagaacgagtaactctttactgccagacccattttacaatctctgtgtatctcgggtgggatgtccacattttaaaatgcttgaatggcttttttgttaggttttatgccctaaataaaactcatttcaatataatcaggtttacttattaataaagatcagaaataacatttaatgtt

SEQ ID NO: 299172 - DNA, 984 bp, Cannabis indica
ataaacaactagtactgaaactagaaatcatacagaagtgaacttattcatcacgttacaatataggaactcaactatttcttcttatttagtttgcataaaattaatttttcaacaaacttcttccatcattcctaaaacaataatataacactttatttgttatttccttattcgagatagtttgtaatagcctaaccaaataaactctttcaacgactatatatgtaaaaacaaatacaaaaaattgataatggaaacgcaagaaagtgaaccacctttacaatttccaaaaattaactaaaactcaaatccaattctgaacttgcacttcagttcttatgctcatataattcaaatgtacatagatcatacacaataattaaagtttaaaaagaagattgtatattactaacctctaactatgtcacacatgctgacatgcccttttcattttatctaataaattatcaaattaacaatattatatcataaaaagaaggaagcacaatagatacaacttcgagaaatatatatacacagattcttaaaagctataacacttgtgtgaaacatgagatattagacaataataatcatataataaatcaagaaaaaagtgttgaaaataccaatttcattcaagtaaccattattatttgaaagaaggggcatccaagacagtaccgagatatctttgaaataaagaaaattcaccataacaacctcaaccatatcggataccacaactagttcaaccattatgacaacccacgggtggattggccaatagcactctcgactaacaacaactttggattctcatacttagttggaatgtacttgttgttagattaaagttttaatgtgggcacatatgtacaatgtatatgctacaccaaattaagtgaccaattatgttatgggtatcaaaagagtattcaattgtcatagaaataatgtgtagataccataagttaattt

SEQ ID NO: 299173 - DNA, 3801 bp, Cannabis indica
atattatctctaaatatttcacaccaaaaattcactccctctcacaagacaactctcagtatttataggcaagactaacaaataatcctaactagccaaccaaattagaacacacaaatttactaacactgaaagcctacataattctaatgagttatactagtgagactaatattaaggcctaacatattattatgatttagggaggaaaaccctttccatttcttgttttacttcattcaactttgtgtattgatacaacaagaagtggttttattgaataaaactactatcccttcacattaacccaaaatctgttgcaggctgttgaaactgttgtggctggaattcttcatgatgttgttgatgacacatgtaaaagtttgcaaaacatagaagaggattttggtgaggatgtagctaggttggttgctggtgtttcaaggctgagttatattaatcaggtataactaatagcctgtgagagaaataaatgtagttgtaattggtctttcaattgcttatctaataaaaaagtcagccatcttatcttttttttcccaacactaatagtttgtgagaatatctataacttcatattgtaaactcaaaagtcatagaaaataccaattatgaaaagttggtagagtttttttgtttcttcttctaggcagttaaaagaaatgtctatttctatgttaataaggttagattttgttgattcgtacaattgtggcattgcatactctagctatactggagagaaactgaacgatttgatcttatttatagttagccaaactaagttgatgacatgaaatgactattaatctgctatgcagctcttgcggagacaccggagaataaatgtgaacactggtacccttgggcaagaagaggtatgcaatgtattctttatgctttgatagtaagtagccatgattaatggtgataactagttattaatctattcattataaatctaaaatctcattggatataagacataatcttctaatcctaatgtcctcgtagtttaataggtgagctgttataatcacaagtacttaccaggcaattttcaattcctcaacgatatgtactcggttaataataatcagtgagatgttactatgtgtgtgcatgtataaagttattaactttcatttaaagatacggtgaatgggcatttattgtattgaggatatgtatttgtgctggctgatgttattagctcgttctgaaacatgaccatatgagaattagagcttaggtgttcagtttttccttagcttacacttgctttgtttgcatttcaggcagacaatttacgggtcatgctcttgggaatggttgatgatccacgtgtggttcttatcaagctcgctgaccgtcttcacaatatgagaacaatgtactgattctcacactatatgagactcttctacagttgtgtataaatagtagcaattggtcacactatatgacacttgtttacagttatgctctgccaccgcaaaaggctcaagctgttgcaaaggagaccctcgccgtttggtgttcacttgcttccagattgggtttgtgggcattgaaagctgagctggaagatttgtgctttgctgtacttgaggtctcttatatctatttgctttagctccaagtttcatgcactttttatataaagaatttgcaattcatgttaaagttgtatgtctatgcagcctcaaatctttcagaaattgagagccgatctagcttctttgtggagtcctagtagtaaagcgggaaacacaaaaagattatgtgcaagagccaccttgcaacccttggacaagaaaatctctgaatgtgattgtgaggggactatggcagttgatgaagacattacgagcatgaaagtaaagttttttttgccattacactttgcaaattaccaaggcaaaaccgctttgggaaacatgggatggctgtaaaatctattgtggtttcttcttttgaattttaggatcttttggaagctgtattgccgtttgatgtcttgctagacagaaaaaagcggtctagatttcttagtactctaggaaaagatctggagacgacaagcccgaaggttgtgcgagatgctgcagttgctttacaatctctggtagtttgtgaggaagcacttgaacgggagttgattatttcaacttcgtatgttccagtttcacttttcactgtttttcttgtagtttctttaattacatacttaatacttaataatatacaagaattgtctaccattctgattttgctgataacaatgaaaatcataatcattcggctttattttctttttcccttgcagctatgtcccaggaatggaagtaactttgtctagccgtttaaagagtttgtatagcatctacagcaaggtaattaatatagtggagtgatgtttgaaaggcattctgttctttcaatcgaaaaaaagtctgacatttactatttgttaatttaatgcttctattgatacttgactttgctcatatcattttatcttcgtcttttaaacattgtttaaaggatccttgtacagaacttcattcccgtagagattttgacattgttatctatgtttctgtagatgaaaagaaaggatatcgacattgaccaagtgtacgacgcctgtgctttaagggtagttgttggagacaagaatggaactcttcacgggcctgctgttcaatgctgttatagccttctcaacattgtacacaagtactccaaaatgaacctttcgttttgttcccattcttggttatatatggcataaagacatcataactgtataattcatgataatggaatatttggcttattatgcagactttggacccccatcgacggcgaatttgatgattacattgtcaatccaaagcctagtggctatcaggttagatctttcactacgaattagaaggtttctccggttattctaactatacctttgggtttataattacataaatttctgtttatagtctctgcacactgcagtacaaggccccgaaagatcacctttggaagttcaaatacgaacacaggtaagttccaaacttcaccaaacaattaaaaactcagggtgtatcttttaatttatcgattgtcagtaacaaatcttaacagagaatgcacgaatatgccgaacatggactagctgctcattggctttataaagaaactggtaaccagttatcttccacaccaatcacagatgataccgaagtggaggctgctccgtatttctccagtgattcagaggatcagaattccatagaaggcaatttgttacagaagtacagtttgctgaaatctgggcatccggtacttagagttgaaggaagccatcttcttgctgctgtcattattaggtacgatacttcatcgtatatctaactgaatacagttttcggttacatgtcatttaacagtagcgcgtcttttgaaatgatcatgcagagtagaaaagggtggaaaggagttgcttgttgccgtgagctttggactagcagcttctgaagcagtagctgatagaagatcttcatcccagatgaggcggtgggaagcttatgcaaggctatataaaaaggttgatttcaatataaccttaaattacccgatttgaaagtcgttgttaattgcaactttgcatgtttttggtgtccaggtgaccgatgagtggtggtgtgaaccaggacacggtgattggtgtacttgcctagaaaaatacactctctctcgagacggtatgtacca

SEQ ID NO: 299174 - DNA, 2283 bp, Cannabis indica
tcttatgttctgtcattgtgcatttactctttgttatgaattgagaactaacaaccatttcttctctttcgagcacagctggggataggattcttgatgagagagcggcctttgtttgcgcttgctactgttgcaacggttgtggtatgaaaatataacttatctaataaaaagctaaaaccatgtccataaaagtttcaattatgtggagatatctgacttgtgttttgtaatcaaatagggaatttggactgtattcccatatgcggtggctgcttcaacagcattgttccttttcatgcgacgacggtactcctctagctagattaaacctaatacacaatttttggacttcccttgaatagagaagagaccatgatattatagaatagaaagaaaatcaaccacatttattttcgttatagactttataaattaggaaagaaaatttagttctgttaatggaaaattcaaaaacacttctgcattagattttcacaatcacataatgtaagatatccttattgctgctataaacagaatgtatgtatatacaacatttataatggtgcacaacttatgctgtaaacttataactaagttaactcatgaaactcgtaaaggagaagttgctatggacattaagaaagtgttccttagcatttaacttctcttggctagaataattttttgtgtgtttctagctagaaatatagaataaaatagattagatactcctattaacctatcactgtgaacaattagaaaaagtagaagaacaagaaggtataataatgagcattgctatcacgtgcactaccataacgtgacgttttgtaaatgattagcgatattctataaaaataattaaattttgtgtgatccgatacttaatcctactaataatgatataacatattaaatagtgttagaaacgagtgttagtaccaagagaatgagaaacaatgctaaaaaaaaaacgagtaaaatggtactagaatgttattatcacaagaagaatggtcactagagagttataactagtacaatgtttgttattattttttttttgaaatttttggaaagtaatgctagatgaaaaattagattctggtgtttgatttccaagatagaaagtttctaatcaaaggaataacaatcatttattctttcattctaatttacttttttaactaaatatttcacaaattctataatcttacattttcatttgagtaatgggaaatatatacattggtcacttcaacatattaagagtagtaaggatgtgggactgattaattactccatggaatggcatgtagtgtccttaatggtagtgagcttattgaatttgctctttctattcataaaaatgatgttcttaaaagggttgtgaacaagtggggcataagcaaatgaagacttaggtgagtaaatgtcgtaaagggttagtctcagtctcttatgaggttactaaagttgatagattgttggggatctgcataaagttgatgattgatcataaaacgaaatattgtagcgttatagcctatctctaaccttgaaactaaatttggtggtgcatcagcactaaatataacgttatatactctttttattccaactacagcctaaaaattacataaaaaaaaattgtttattatttaaaataaaatagactattctttttattattatattaactcacaattattatatttaattaattatcctctataaatggtctatatagagtattatccattgtttcaattagagcaatcaatgatcatctatagatgtctacatagagtgaggacaaaattactttttttatccctcaatacattttatcatttgaagtgaaaggatgataaaagtgtacacatcatcctaaaatatatattttttttattttctctctcatccacataagatttaatgatttttcatacaagaattactctaatggttgacaattacaaggtgccaccttttggtagtgctaagcacccaataacaatgctcgaaattaaaatacttatataaataaagagcattgttattaagcaccagtggtgcctaacaccttctcgacatattgcgttgcgattggctagcgatactccctaaaaactattatattaaactatatgggacccgatacttagttggatcatattaaattatattggccaacgatactccctaaaaactattatattaaactgacacataggaggatgctaaacaccactggtactttttagcatttctcgt

SEQ ID NO: 299175 - DNA, 1649 bp, Cannabis indica
cttaaaaagagaaaattaacacaaaaatgaaataaatctaataccacactttgaattaatcttatcttttaattaggcaccttgagacaaagattcaatggtatcaacttgacttgtatagtgtttgacaattgaccaagagcaactatatatgctcattagtttttcacatcaccaaacaacttcattataacaacaacacaaaatggctggtaataagcttaatgtagtaccactctttcaggtgatgacactagtggtggtgttgatgttggccgaggctcctgaccgagcagaagctgaggccagcataacatgcgagcaggtgagaaactggctgacaccgtgcatcagctacggtgttttcgggggaacagtttcccccgaatgctgtcaagggattaaagatctaaatgctgcttactatacgaaagatgacataagggcagcttgtagttgcgtccagcaaggtgcagctatgatccccgggatcgattatgatcggattaacaatattgctactttatgtggcacttcctgcccttacaaagtctatccttccactgattgctctaagtaagttggtacaatcttttaagtttagttgacaaaacaaagtactactttttcttaacattttaaactaccataaaatagtactaaactcttttatggttgtgaattgatcatttgcagggtggtttgatgaattagcttgcattaatatcatatgtgggagccagagttatcagctcaaatctagtctttttatgaataagaaatcagaaagttgtagaagtattgtacatgaagtgcaatgataatttgtgctttgagttccaaataaataaaactaaagttgttaccatctattgtctcctatcttagcccacttagctatggtattatcagctttgccattttggtttttatagctaggtacttgatcctattcctacatagtacatacatacatgcctctggatgttttctaatcactttgaaaaacagagattttggctacctctctatttcgccaaggagcatagcagaacaggcatgaaataataagcaaaaattggaccagtttctgtttaatcgtttatgactactaaattgaacatgaattaattatgattgctattaagtattagtggtgtctaacacatgtggatttacaattagctagcgatttaaaagtttatattaattatataggattcgattattagttagacaaatagcaatataatatataagaaagtgttaagtatcactaataccttttagagtttctcattaattaatgttgaccttaattatgttgttgcaatctaacttaacccatatgtcaatttgcaattaagaaattgggaacctgcatttaaggtgtatgttttatatttattttttggaataatttagtaaatacacaaaaataataaaagattacaaaaatatagttgtatggaattttgtatttttttcattttttaatattttatttacagaaaatacgagttttttatatatttttatgttgtaatcttgttttgttaattttttgttatttgtatattatttttgatattgtttttctattactttcatataattttcttggttttttttttttgtgtgtgtgtgtt

SEQ ID NO: 299176 - DNA, 3124 bp, Cannabis indica
cacacacacacacacaccaatttgtactgtgctttatttctcatgtctaatatatgaacactaataatctgttctaaagaaatttagattttctttttcttttcagtcttaaattgtttcaaaaaaaaatcatgcttataaagggagtagttaaggtacgtacctcttcattcagtaagtatgagctgttaacatactttttttaatacaattcttctgaacattttcactttggttcgaaaaagatgatctatgtaatatgtgtggtggtattaccatgttattttatttttaatattagagatttatattattttacttatttgattcaataccatattgtatttgacatgatttgtcagtgcaaaaaaaaaaaaaaagagaaagagagagaaaactcaaattttaatattaactaaaaaataaaatccaaaaatacttgaattaattagtaaaggactacttgcttttctgaagaatcttgatcataaaacagtagttacaacttacaagactatgaaatagtaaaggcagtatgttttcttaacataaaacaatcattacaacttacaagactaataaatagtaatacaatgaggaatgaacaaaatgttaaaaccaatattaattttcatagtagatttataaatctaaaaccactagtggcactttcagtcaatggactgaaacaagaattatgctggttcaaatgatcttttacacaaaacagtgttgttactatcaaacatttatttttgttcaaacatctgggaactgagccacaatcggttgtgaagacagttcttgaattcctttaagaatctaacacgagaacatttgatatatagcatgttttaacacttgcaattaatatagcatgtttccttatattagtagtttttaaaaaaatttgatatataatagaagagagtttatgcataggatgactaaatgctcttcttttggggctctattttatgcaaatggctattcaaatggaaaacatttaataaaagatttgtagtctcagaaagtaaaatcaagaacttgtgtagcagaactcaaaactcttacttttacatgaattggctcataattaggacacccgtgttaacttctttaagacgaaaattcgcaacaacatcatgttaataaagcacataaacgctaaagctgattagcaaatggaaacaaaataataaagtagcattaaaaatgaaagaggaaagaagataaacaacttaccttcacaacccttaaaaaatagtgtgttcaagtaaccagaataataaattgattagagcccaaaagtttaatatagtttaaatttgatattcttcaaagcaagttggataaacagagtattttgtcttcaaaagaggtactacaagctatgttttgaaaccattttgtcagattagcataaggaattattatttccttctttgattaacaactactagttcttagtatatctttcattctttctaatagcagctcaatacaaatttatctgtcaaagaaatgtcccatactgtcaatgcttagaccacaattcagataacatgtttgtaagagaataaaagacacgaataagatcgttctttctactggctcggagctttaggatcctgatcaggtggaggtggaagtggaaacgatgaggctccagctaacgcagccatatactcctccattgctcttatgctcgccatcataccttgaacttgctcataaagaggaggttcatcatcatgttgcgccctcaagccaagggcggtgttttcctcttcatccatggagatggaagcactcgcagctgatgaacttgcaggagactgtaattgaatctcaagcacatttttcaacctttcctgtatcatacaatttgcaatatcaaccctaacaagttacaaataaacatagtaaaaagcttcaaaaaaatatacttacatagctgtcctcgtcgtccttgctgtcccaaccttcgtcgtccatgtgattagttgtactccatgtctctggaatcccaacaacaggtcctagtttacgcagcaacatcttggcctcattacgtgactttggcaaattatttggagctggaaatgcatcttgtaacagccccaataactcatcaaaaatattgttaggaattttccccttgaagtacatcaacttaactaagaaattcaaagatgtgtatttctcacaccctggaaataatggagcttccatctctgcagacaaatcgcgatgatcctgtccatctctgaaatctgtaggtatctcatcatcatgctggttttcttcagttgtaggtaactcatcatcatcaccatcatcatcattacactcgatttcttctcttgtagctatctcatcatcatcacacacacattcttcacttgtattcatctcataatcacacacaatttcatcatctttatttttttctggttgttctatatcattaagaccatccattatctcatcttcctgacattgttgcaccactttatttgttggtattatttcctcctcttcatgccaataccaattagtataactctgaagaaaaccattattgaaaagatgatgttctattacattgattgtctgcaattgaatattgacacacttgttacaaggacacttaaccagtcctgtttcatccacaaaatttttagctctctcaagaaatgccactactccagctccatactcatcagataatttatttggattcttgatccaagtcttgttgatcgacattttatgtgcgtagcactacacattgtttttttttttgaaaataagacgttgcatagataaagaagcattagacctctcggtcattacaaaggatagaatcaggtatggagggtgactccaatactcctgaaaagttttgggtgaaagcccatttagccacattatgggcggcaaaattacaaacacgggaaataaaagcaaagttacaagaagaaaaataattagagagttgattacacacagatacataattatcaatgttccaaacatagtgcaatcctttcagagctttgataaccacttctgaatcactctccaccaagacaaagttatgcttccttcgcctcgccgt

SEQ ID NO: 299177 - DNA, 1510 bp, Cannabis indica
aaaaaaattcacccactaatttctcataaactaagaattcggttatataaacacattttatatagaatagatatatatatattttttttaaatcaacaaatggaggtttagacgaaaggtattaaatgaagatgtcaatcataattttggggtagcaaattcgcgacaaatattgagctggctacaacttaacatacctaacctatacattcccattgacaaaaaaaacagctatttcaaagttaattactatccattattcaaaaaaaagtaattactatccaacaaaataatgatcatcagaattattaccataaataattcgttgaccggtcaaatttgaataattacattaattgtttttttaaccataataatattaatctttaaaactcttttaatgttataaatttttaaatcaatatttttttttatatatttctatttagtatatatatatattttcgttatttatatgtatatataaaaatatatatacattaataaatattattagtgttattcatccttttaatttttatatcaatattgatattgatacattaaaatatggttacaaataatataatgtatagctttaatagaatatctttcattgattgtaataatgtttagtattttttttatgtattaatattgtgattgatgtaattaagtatgatacccaatcacaaaattataaatctaaaatgtgctaaccaatagccatgtccaaaatatatctctaaaaagtgttggcatgaatgaatgctttgttcctaacttcctactaattaaaaaaggtgaaaagaataagtgtaataggagaagattgtaaaggagtaattgaaatgagaagttaaatattagagaggtgcggaaaaagcgtgcgtaacggagttgtccctcgagtacagaccccacagtcagcacgtgtctcaaacggcgcttcccagttaccggtcacataacggtgactcacagtcacagcctaccaaaaacaaactcttctctttttctcttcttcctctctactcacctcttgccttttttaagagcccccaccattccatctcactgtttttatttatttatttatttttataatatatgtgcaaacaaaatatattgatattaattcatatgttacgggtatgtattaatattaaaatggaaaataataatggagaaactatatgttataaataaatttaaaatataagggttaagaaagaaagatagagagagagagagagagataaagcagaggtgtcccaaaggtttggtttatggtggccaaagccaaaggttagcttccgctgatttgcacagagaatccaaaggacaattagagagagagagagagagaagttgtaagtaaccagaactgaacacaacgccgagaacccaaggaaaaaaaaacaggagagagagaaagagattgttatagttttgaaatttccaatcaagtcctttttcttcttatccaatccgtaagtccctcccattt

SEQ ID NO: 299178 - DNA, 3615 bp, Cannabis indica
aaattaatttaaatatacttaaaaaaaaatgacacgtgataataatttggtcaagtacctacttaaattttaaaaatataacttaaatattattaacgttaaaaattaaatttaaatatttatttgcgattgaaaatcaaatatttacattacatattatttaaatatttacatggtaaattattctaattttattattttctaattaattatagcaccaacactaaaggacaccctccactgacatgaatgaattctcatgcttgtgagtaatgagaggcaataaattctgtcgagatttattattatattgaataaatctgtcaagtagttaaatatctccaaaaaaatatcatcatcaccatcatcataatccatggaagctaaaactatatctaataatagcacaaagacagtgacatgatacatacacattctctctctctctctacaaagagctaagaagatctttagcaacaaatgtaaaaatggtcaaaaatattgaagcaataatcaaagatggttgctgttgttgttgttgtcgtctaatcgaaaatgctgaagaagattgaatctggataatgaaattgcaagttccttgtgaaatattctgtgtggtctctactgcgagaccttcaaagttacaagccctgtcatcttgatcctgtgcttggtagtacatgttgaaagcgtacgaggcattgccattcgcgtccaagttgttgcaagatgatccataaccgagcgctgtgcaatcagagaaagtgcaggcatagtttatgttatcagcaagtttgctcacatccttggcatttggattaaacatacaccatttgttaggaagatacattacactctgagcaggcacaggtaacttgttttgaccttgacccgaaagatcaataccaaatttaggttgtccatcgtacctaaaaatcccccaatggcgctcgaaacttcctggtgcaatgctcttggcatcctcatcaatgagtccaaacaagtacacttcaatgtttccagggcgcaatggggttcccttgttacttgcaagtctttgtagaagaccgttgtagaatctataagcgttaccaatgttagcattcttgtccccatcggttggccagcccacttctccaaccaaaatgggcatgtttccataaccggctgctctcaaagctgacacgagggtgtcaaagttggcatcaaacacattagtgtattggattcctgtagctgcatccacaacaggattgggtgcaccatcaaagaaggcgaaatcgaatgggaagttgtcattcccatagagactcagaaatggataaatgtttacagtgaaaggtgccttgtttgcatcaaggaactggactatctgtgtcatcaattgattaatatcagttcgaaaccttccagcagatggaacagggttgttttcgggtgagttgtaaacatctgcatttaagggcacagtagcttttatagagtctccaataccagctgcattaagggccttttgaatattttgaagagccgggaaagtggtgtttaagaatgaaccattgtacgacgataggaaaggttcgttccctactgctacatatctggccagagattagaaaacttaatgagaacaagtatagcatattgataaaaacaagcacataaccaaaacaaaaatgccaactttccaaacaaagattgttgtataagagactagtttgtgaaataatcatggagaagaaataaattacgaaacaaacacaataatagcatcggcccagttgtttaagttcacgaaaaaagttgaagcagattcttcaacaagacatgaatcagtaaaatttaaagagaacatatcagaatcatgtctttggtaaaggtaaagttcaggatttcgggtggatggtaatgcccgaaaagaccattacttcaagaatttatgcatagaatttcaaactgaaaagtgtttaaggatcattccatttcttctattattcatttcaggattggggagattattttccaactgttgtgttttgattgattctctcattgcaaaagtagtcattcttgtttatgatgcttctaatgacaatccaaatgtactaaaacaaaagcacatgctaatatgtcttcaaccataaaaaggagactaagcttcatatagttcttttcttaaaaaagataagacagataagagaattgtaaaaccaataccatattgagcaacaagaacatgttctgcaaactttattattgatcttcttttcaacattctgtctttgatcaaacttttccactttccagaatttattgtttcaaaaagatcatatttttttttctttttttacagcacaaagttttcctcaatattcccactcaccattcctttacaagaatcaaatactctgatcaaaaaaaggaaactaaaagtggggtaaaaaagattctcttccttccacaacaaatcagaaagataacacaagctttattctctcaacaaatttgaaaagaaatccaatcaaacacgattcaatccaagtatggacaaacaatacaatgattttaatcaaaccccaagaaaattaaatgtgaattcaaccaaagaaaaacagccacttaacaaaatcaaattcaatgtatgctatacctacctacctacctaccaaccaaaatcatatcatcatatataatataaacaaagattaaggcaaagatcaataaacaaagtattatatatatatatatatatatatacaacttacttgatgttaactccaccactaaaattgtaacgagttacgtttctcttaacccattcttgagctcgtttatagctattcatagcttgaagttgatcattgggaatagccaccataacctcaagaccacttccagtcagagctgtcatggttgaatcttctgaatcaaaaagcttcactttttgaataccattgtctttcaacatctgaacaacagtttttgggggcaatttatgtgtagcttgagtcccccaatttacaccaagtccctcaacaacatcaaaaccaaataaaccaatgaagaagaagaagaaaccccagagccttataaccaatacccacttagaaaaattcatcctttccatcattttcccgagaaaataaaaaatacccaataactaaaaactcttactttcgctattggagggaaaaagaaacggtttttaccaggtgggtttgcaaggatcggcgaaaatcctgcgatcctgctttcctcaacctcttttattttcccacgaaaattaataacgcgttgtcgtgtaacaaaaatcaatatatatttatgtgaaagagtatatgaaccactccttttgttctgtgaatataaagccgattacgacaagtctaagaatctcaaaacaattaattatgaaccaaaataggaaactttatcagaaaaataggtactttatataaacgatctaagacgaatgagagagtcttgagatcgaaacaaaaactaataatgaaaagtgaaagggaagaattcaaaatcagaaaacagggtaatttcctatttagattgtagaaagagagagagagagagtgagattgagattgagagagagagaga

SEQ ID NO: 299179 - DNA, 2305 bp, Cannabis indica
tttttttttaaaaaaaaattgccacacgtaccaatatgacaatcacttatttattattaataattatttttgaaaggacaacacactcgttaagtacaaggagctagctttggtgttactacaactacatggatcaaaactactattacctttttgtaaaatcacactactgtttgttttcctttttatttcttctctctctctctcaacttacacgtacacatacataaagccaactggcagttttgattcattcacaaagagatgaaataattaggccaaaagatatgaaaaaggacaaatgtagtctaggatttgaatgcgattttcttggttttttctccctccattcttctcctttctttctttcattccacttatttatatggaggaacactaggcatgaatagagagaagacatcagctcatgaattactctttgggagtttaattagaaataaaaatagagtgaaaagagaaataatgaatatatcaacatcaaaattcagtggtagtgggtgtgaatctggttggaccctttacttggaagaatcaaatatttcagaagctgataagttaaggatagatcataaggaggaaaaagaaaatgattgtggttatgaggagggggaggaggaggacttatcaatggtgtccgatgcttcttctggacctccccattatcatgaagatgatcatgatcatgactacaacgaaaatggctcctatatttctttctcttcttcttgggcctataacaaatcaacaaacaaggataagaagaagatgatgaaatctaagatgaaagaaaaatgtacagaagaagagcatcgttcttgtctagatgacactgctagctcccctgtttccaaggcaatatcacttatatcattcttaattaataagataccatgtatatatatctatgtatgtatatttgtgtgtgtagggtgtgctggttttggatataaatatatatatactaataattttattccaattctgcagaaaaagtcaactttttctaggagcaaagctttaatggataatgtagttgaccattctcaaggcttttctgcaacacatagggtattttactctcacaagcctctttcctcttctatatgctctattttacttttaataatctctgacatgatatttttctaaagaataaaatctctgtcatgatatagtttaatggtaattcttgcagggagaatcggcaatggggaagcatgttgatctgtatcaatccccaatgaccaaatattcagcctcgcaggagccaggtaacagtgtttctttttttttttcttttaaatttatttatgattatcaaggccatctgcagtgttctcttttcaactctcaagctccaaaatcatttaaataaagatgtgatatttgtaattacctgttatctttttctataaatatccttaattattggcaggtgatttacaaggaagaaattggaaatgacattgtaatattattaaggattttccttggtatctgcttctgcagtggctgcaaatagaagaaatggcaagagtgttgtaaaggccaagtaaggagttgaaaagttgatgcccattgcccaaaaaggaatttgttcccaaccccctacccctttttcttttctttttctttttttttttttcaatttcaattcttcttcttttttttcctcttgtcaatgaagtgggaaacaacttaagcagttaagtatataaaatatatcaatttcttgtatttggtttctttttgtcattatgcacacagttcatgggaacataatttgtgaatctactacttcattaaagatggtagcatcccaacaatttaagccaattaatgaccattaagcataatggtgatgcagatctaaacttcaaatggacaatactgtgcttccattttgattaaaataactcaaatcttcattattctgaagagacttgaggtgattttcgagtttatagagtaaggatatattattaatagggaagttgaaagtttcattgaacagaacaaacattttaagaaggtcacgcccggaacataaggtagcaaataatcaaactcaacactgcataataatgtgggtataaccaataaatagtaaaacataaccaaaagaatacgccaagttaatgggctcaatgcatggcccgcttttttttaggataaaaagaaaaatcacctattgccagcctagctcacacaacaaatagaagataataaacgtttttctgctactctaatatgactgaaaaacaaacaattttttatttttttt

SEQ ID NO: 299180 - DNA, 1637 bp, Cannabis indica
catgcatagtaaagaagacttggggctatcttgaccctagttacttctgcattaaaatgattaaattaagtttgtaaaccctcaccttcttcttgtttgatgttagacagtgttgtgtatggtggtttgtaggtcatggttgcctgaaagtgtgtcaataataagtctacaaaaatctctcaggtataaattgaggcgttaagtaactggctaaaccacttatgtacgtcatcctccaagcttgagacaaagatgctgcacttggccaattgggggacctgatcgacgtccatgatagtatcaaatttatctaaatagtcaatgggattaatcaaacctttatttttgagcgactcagagaggtgaaaacccttagggtgttgagcttgtcgcacttcaacatgaatggggatgtcccatgcagtttatagacaagcttcctctgttgtttgaccatccttagagctcttagcaaactttcctgatctacccttctaggtgagatgttagctactgctgcaagattgagcgaaatattcatattgttgatggaaatagcgataggattaataagtgcgacaattgggttaactggtgcacctaatgactggtgtgacaactggattgactagatcattaacatcattatgaattattacctcaagtttttatgtgggagggatgccttgattgtgtgtttggggttcatggggctcccgtcgacgtatgttgttttcatggtttttgactttgggtgatcgcgcaagcaaagccttgttcattcggtctcatagatctgctctttagacatggtattttcctccaagacgtataaaaactaatctccatttggtatacatgctaggagtgagactatcaaatcaaaatgacccggaatcatactccttaggggttctttaatcaatgcgacttctaagattgcgaacctcaccgtcttcttcctcgtgatacctttcttcgtttctaattctaccaatatcccatggcacccagaatcttgaatcttgttgctagtcttccttgaaaacagctggtccctttccatgtgtggcatctcaaggtggatggttcaagttgggagtgtctgaattatgctcgtctgtccattcctttatataatacttgcaaacacgttcaccatgacatctagtagtatgattacgtacctcattaatagtattttgtacattggtaagttcactcgacggggcaacgttctgagtatgtggcattcctgcgacttcagcctacaaggctcacatttattcttgtatagttgtatattgtgtggttgttaattgcaccatatccttagtggtgtgagtaggtgtaattgaagggaaatgaccaatagtctccataggagttgtcgtgtctcttgcggccccaaaaaattctaagaacaaatttagggggatggtggtagtctatctgattcctcccaaaatggcatcaacagcgaggttcacagccaaagttccacctttattgggtggaatagtgtctcgttgacgttgatattgacattgacattgttgaggtaattttggttcacaatcattgtgatcttcctccaaaattagagaataatgttggaatctgttggaaattatttt

SEQ ID NO: 299181 - DNA, 2786 bp, Cannabis indica
attattatatatttaatcatttatgttatatataataaaaattaaaaagttaaaaaaaattaaggtgcaaaatcgggttggtcgggttggtcggtttaattgggcgggttggacctattttcaacccgcccaattaacagattgggcgatttttaattttttcagattatttcggtttgtaatttttatcgattttttcgattcagtttggttgggttattcggtttgggcggtttacgaatttttttgtacagtcctacaacatatataatacacttatagtttaattaaatctttaaaattgagaaattataatcctaatgccaatttcttgaaaatagggcccacaatatatataattgggtataatcataaaatacaattaattaatgttaattaccctactaatccatattctaagtatgcggttattacatgtctcaacaccaatggaaccaaacatcaagcttagcaaagacttacgacaattattatctgatcctactcaataaagaagtctcattcgaaagctcacatatctcaccatctctaaggttgacattagctcattagttttaatgtaaacaagctcagccagtacctccaatcacctcgagaaccacacctcaatgttgcttatcagatacttcaacatctgaaaggtacacctggacaaggcttgttcttctatgtagcagctctaacaccactcgaaattcaagcattttttgaggctgattggcgttcttaccttgacactcgaaggtcaatcttgcattttccttggcaactcaaccatttcatggaaatcaaagaaacaatagacaattttccactcttctgctgaagtagaataccgtgctctagatcatgttacttgtgaaattacatggctaaccacaatcatcaaagacttagaatcgacatatctcttcttgaaactctcttttttgacaataacacaaccatacatatatcaaaaaaccctgtcttctacgaactcatcaaacatgtggagatatactatattatagttcgggaaaaaatcaataatggaactttgaagatgaatcatgcttcctcaaagacaaatctagttgatatttcacaaagcctttttgttctgcaaaatgaaataatcaatgacttacgattcagtttacagtaccaataaacacgcaacacgatcaagaaacaatataccaagatatctcaagaattcaagatagtgaattgagtaaatagaaaagaataacactagatttaacgagttcgagtcatgtgcaatgctctacatctcgattagaacaccagcagccatatatatatatatatatctttattgatattaatgtttacaaagttacaagaatctccacaaacttctcagagattacgagaagaagtttctttctctagtttagactctacctcaaacaacaacaattttcattcaagcaaatctagtttgattctcacataggttacaaagattttcagctatcaatagatttgcattatagcaaaaaaatatctcctaaattatcgtgacacatttacgccgccttaaatgatctagctcatcaccagctacaaaaaattcacgtcatcttgaaatacacgctttctgtatggacaattcggaagctttataaacacacaagtttttttggatacatacaagacttcattcccagatgaaccttcaagactgatagtaagctgtccaggagtgtacctccagattaataacaagctatccgagagagatattccatacacagtacaagcttatctagaagcaccttctagattttacaagaccttccgcacatggcttttcggatccacactaagcttccaatatcttctctccggattcacagctttcaatttcgaatgacaaaacttgtaaccataacttacaacctttatttcctactcatttcagagattgtatccaaaatgggtgtaaaattattttacactcctccttgaaaggacctattagaattagttagttagtaataatggaataaattagttagttattctgctaatatacttagtactgaatcatcttagttattctattgcttatataaacaaaggcttgatctatgtatcaaataattaattcgagtgttacaatgaacaaagaattaaatagagctttatttctcttcgtatttttctttaatagtagcttccaagttttaacttcgtgatacttttagtaattgtataaaagttatgtaactattcacattatagtatagttttggtatgattaatctaaaaacaaaaattataattacaagtaactattcacattaatgattttcacaaaatttgtaactagaaagtacaaagtatactataatgcaatgcgatgattatgcacctatcaacaaattcaacactatatattcttaaatcaataaaatcaaaatgtatgcgtgccattcgaataatattctttcatattaatgattttctttatggttgcggtgtagattcattttaaaggcatccctctccatagattcaaaagcattattaaacgaagaaagatcgtgttactctatcttggtctcccattttcttatttctacttttttgatgttttgcggaatattacttttattattcaaagtatacacgtaacaaaattttgactatctctcaagaaatataataaaataaaaataaaatatattccattaaatccaacaaaaaaaaatagggttctagattttctttaattaccgtatttctaaccctat

SEQ ID NO: 299182 - DNA, 1896 bp, Cannabis indica
gttgaggcggaaggccatggctccgcggcggccacccccaaagccgagtccggagaaaggcttgtggaggctggtagcgggggaagatggttggtggtttgcataatatcgtctagcaagagggtctgatcattgttggtggtgatgatgatgtgttgttgatgatgatcatggtgcttgtcgttggtggtgttggtgtaggtgtttgaattgaaatagtattgatgatcatgatgactagtagtttgttgtttaggactcatattagcgaagagggttatgtccattgatgatgtatggctttaattattattattattaatggaacaagaaacccacctctggatagactctcttttagctaggaggggagtctcacagctcaaatatgctaagaaaatggccaattaaaaagccacgatgacttcgaaagctccattgtatttcaagtcgttgtcatgactatatgatatcatataaattttaataatatatgtatgtgtttataataaggtctagatatataataatttaattaatataataagtcaggcgctatatcaagtggccgggttgccttgcctttatatgtggtacgtattattttttttaatacaatttactcttatatataaaaagatttttagataattagtcaagtggagtttagactaattaattggtaaaaagtacatatgaatttaaatgacatctattttttatatataataaatttaattatttcaaatacaacatttaatcattgccaaaacttcactattaaaagtagaaaacaaataatagaatttttatttattttttggaatttttgttactatatagtatagatgtgtatatagggaattggccaaaggaataaaacacttgtatgcaataattaaatatacatataataggacgtgggaatccgaagtttgaattgtctctagaagtgcaacgatgaaaaagcaatgaatcataattatttgagagatgctaaaaggcacaatatcacaataataactaaatgtactattatcattgggtatatatttaatataggtctaatatattttaatttgatagttaatattaaaaatggtacgttaactaagaagtgaaatcttataatgcactttaaaatgcataataatactctaattatttatataccctttgagtttatatagttattatatatggatactctaaagcaataaaagcataaaattgattaagctaataaagcaaggataaaagacaacatattttcttttgggcaacaaaaaaacaaagagaagaagataaagggtatagtacttcaagccgacaagagtttgtgggttcaaaattaccttatgcaaacattgtcaacttcactaaactgcaattattatttcccaattaccaacataaatccctcacatgtacttgtggccgtttaactccttttattttttaagaagaatgctagtcaaactctcttttgtactctcttttacactcacttcttaattgagtgaaatgtgtaactttttaaattatgtttaaaaatagttacaactatgccctcatttagttttcattaatcatataatcactacaacattctacctcattagcggcggatcactctgccgctaatacacccactcttggccactaaagggtattagcggcggagatcgaccgctattggtccgccgctaatgcttggccgctattaatagtattagcggcccaaaaaggggtccgccgctaatactattaatagtggcggagatctagtactgaatctgatactggttatcagtttgacatttcggaaacagttctaggcgaaagatttgactatcaaagaggcgtgggtaaaaggctcaagggcaaaggaaagaa

SEQ ID NO: 299183 - DNA, 5231 bp, Cannabis indica
  modified_base (5212)..(5212): a, c, t, g, unknown or other
ttttttttttttttttgtgttatctgcagtaccatgagacagtattttacgtttgtttattaggattgatatttgaaagggagatgaatcgtttactcattcacctgtttattgatatgtttcggtgttgaggaatatgttctgatatatatctacttcattttagttttgtgatgataatcttcaatagaagtatccaatttgtattatctgtttgtgtgctcaacttatgaagtactttgtactttgaattattgttcatatatgattctttggctgcagttcttgtcgctgttcaattcaagtgctgcctttaactgtgaaattatcagggactgttacgaggcttttgcattgtactgttttgagagatacttgattgcctgcttaggtatgtctttagatgcctgtttttttcaatccttggtaatgtatatattgttttctcaccacggcattatgtttgtgtgttttttactagaagtgaattacccgtgctcaagctcaaattgactgattaaatatggttgtttttgtttgttttggggaaatctgctcttactaaaggtggtgaagagaacacaattgagtttatggaaggtcacaacttaacagattccaaattgcctctcttaaacgaggcttatgcttatggagttgtggaacatccatttccactaaattgctttataagagattggcttcttggtcctgacttctataatgctgtgaaaattggcattgttcaatatgtaggtgctcatttacttttctcctggagtcctgaaaaactctttaatttctggttttcacctcgtctatttggttttctattgacatattatccagatgatactaaagatgatatgtgccctcctagccatggtccttcagacttttggagtctatggagaagggaagttcgagtggaaatatgggtaagtgtttaactccttttttctttcccttgtttggatcataatatttgctcatcattatgcaattgtacatgtttcttgtaatacacattttaaggacataaatataactgcttgatgtgctatgtatatgcacattcattattgcacctgcttaaatgactgaaattttatatgaactgctctcttccatgtaagggaattgataagatctaaccccaataaacaaagacctatgtacccttttatttattctcttatactatattctattattggggttcaacaggtagttttttttttttttttgaccgaatcccatctttttcagtgttcttgtttttggattttagatatggggaaaggagggtgtatattgttaaatttcgtaattaattattatgtttttcatcattgttcttattgtgcatattctgatatgaaactttaattacttgcagctacccatacttggcagttgttcttaattttagtcagacctgggccctatattgtcttgtacagttctattctgtcacgaaagagagattagaacccataaaacctttggcgaaatttctaacttttaagtcaatagtcttcttgacttggtggcaaggtattgctgttgcttttcttttctctatgggagcctttagaggggctctggcgcaggagctgaaaactcgaattcaagattacatcatatgcatagaggtgtgtgtttatgtaatagtggtgctacattgtgttacaaaactaaacttttatttttgtgatgcaataaatttctagagaaacaaatatggaatcatggaccttttggttcacgggcaagccatatgcggggatttagatttgtttaacaaacttcgactacacaatgacttggttttactagagaataagtccaaacattattgaaatgggtaaattagtgttaagtctaatctacttcaaattgtctcacaagacaactttatacaagatatggttatttaaacatcatgttatgtatatttttgagatggacaacaaagtcttcatctgaaattcctcaagctaaatatgtttctgattgtaaatttgttatacagatgggtgttgctgctgtggttcacctatatgtctttccagcggcaccctacaaacgcggggaaagatgtgttcgtaatgtagcagtcatggctgactatgcagcattgggttcgcctcctgatccagaagaggttcatgattgtgaaaaatcaactaaagtacgcttagctcgtcatgatgagaaagaaaagcgcttaaattttccacaaagtgttcgtgatgtagtactcggaagtggtgaaatagtgagtttatcaactttgtgtcttatttttcacttatttaatcttttattgaattcacttttgacttttactggacagattgttgatgacatgaagtacacagtttcacatgttgtacaaccagtggaaaagggaattgcaaaaataaatagaacttttcatgagatatctgaaaacgttaaacgtcaccaggaacaaaggagaagctccaaggatgacacttaccttgtccctctgaattcatggaatagagaattttctgaagttcacgatacccttgttgaagggagtattagtgacagtggtttgtcgagcagtaagaaacagaaccagtctaaagcttcagcttctcgtggtaggacagcaagataaataggtaataagcaaattccataaggtttcaagagtttgttggcgttatttttaggcaacgtcgacacacttggtgaggacatacaaaattcaggtgtgaatctatctagtatgaaaagatggattccggagctaactcattgaactgaaatctcacacaggcaaacaagtaagaagtttctctaacctaaacactggctttagtgtatgtacagatgaaaatgatggatcagcaacttgaatagttgtttgaatctgatggaccaagtaagcattttcaagcttttttaaccatacagagttttttcggatcctgtaaagctgtgcaccgtatgtgagtaagtatgaacattttaactgcgaatttatccagctccaagcctttggtacataaaagcttctacattgttaacatttgttccttttttatttagactgctcggttcagagaactattttcctgttatcgtaagagatgttacactgcatgtgattaaattggctgaatgtttgttttattttaagttttacaacactagttcccaatcttttcaatccgtatcagttagtctccagcatgttcaaattaaatcatttaggtcttcaaatgtttttcttctctctttatataaaacaatatttttatttattgtgttgaaattataaatcaatattttaaggcaaaataccatggctctcactgtttttaccattggttgatgagatctcacaagtgatccaagctctccttccaaattgctgagctagtcagctagatagcacttgatgggggtctaggtttcagggtcactggtatgaatcatgataagtacggcttttcttactatgtggacatggaaaccgctagtggataaaaactgtttgtggggagtttttgttagaaaatttcaatgggagttgtctattggagtggtttggtttgttcacatatgtaatatggtttaattttcaagactaattttgtgtaaagtgttgttgaatcaatgaatatagacaatggttgcatgacattttttaatagaaaaaataattattaatttaatgtgatgtgttgggcaacttttagagttatcattattggagtattttttaagaaaatgtgacaaattttatgtggatgagagagtgaaaaaaataatatttaagggttaggtgtgtatttgacaaactataaatgttgttccctattggaggtgctcttatatatataatccaagtatatgaagggagaatttttggaccatgaatggtgccaatgtgatttttttatgtggaagatagattgtggtgatggaaccacagctcatgccattaccaatcaaagggtgccattaatggagtaagttgggttaaagatttatctcaaacaatcactgggatactagtaagattacagaatggtttgatgatgggatgagcaaaagaatcctgaatattactttccatgacaatgggataagtggatgtggattggagaaaaacatgggaggtttacattggaatttggttaaatacttttaagtacaaagtacaaaagttagtgaaaatgtagtattacgagttgcactctaataatcaacataattcaataatgagggtgtggatttcaatttccaatttgagttgtaggtttaggttaccataaagtttgggattaagttgagttttggagttggatagcctgattaggcaagccaaaagtgaattaacatcattttcatactgttgttaaagtgctctaatcttattggatagttttaagtctagttcttacactctataaggacatgtttaggtagggttagacaaaacttgatcaaccattttcacacttgctctaaaattctctctctctaaaaaaaaaaagcttctctaatttcaccaaaaaagttaatcaagatttgctaggattgattctctaaaagcttgaaatccgaaactttcatgtgtagaagccacaagcaaactatagtggaggcttggaatggagttcttgaattacatttgcttcaatgtgtaaagccttgcaagttttaatttgtttgtctcaatcaaatttggggagatctaaccctaatctcttcgtgtttatgttgtacatctaatcttcttcctcttatttatatattgttcgcacttattattttattactataaatatataatctttttaaatatcagcgcgactttatcaagtactagagatggatgtatacttctaaaatgcataatcaacttaagttttttggtggcaagtttttactttatcaagtactagagatggatacatacttctaaaatatataatcaacttaagcttttttagtggcaagtttaagttagactcttttctcataagttgtaatttagagatgcatgaaagattatgaatcaaccatgcaaggagggttagtcctaacattatttgggtttaagtagaaaagaaaaagaacaattacataaaatattatttttttataaattttttatatttttacaatcaaatagtttttttttttttttttttttttttttttntttttttactattatatag

SEQ ID NO: 299184 - DNA, 2095 bp, Cannabis indica
aaagcattggagactcgcgaagcattagtttatgtgttaacgagagttgtaactgcgcgacccaattaaggctatgaaaaagggccttagcccccatcttatctaatctaaagcacccttgtacaacttttgaaaggactgcgataaccttgccatcatgattcatgatctcgtatgaatgcacctacaccaagcttttttgcatcaaagtttaacttcaagccatttaggtttggtggcttctaagggacactttcttttggcatgtcatttttgagtgtggaggttgttatagttgatgtaggtttcttagcctttaggaaattattaagatatgttcttgcataagcagtaattgaggaacttgcctactcactgcaccatgaaaaactctatttcaatcactcagatagtccacataatacaaatgaataattccaaatcagcttgattatgaagagagaaaaaggtgcaacaagtaatcaacattaaacatacgttgtgcttatccataattaatagaaattttggatttagcatgtttacaaccaaatagtgtatgcacaatcgattcccaagctgatgtgcacaacgaacaagttgccgaatcaataattcttttcttataaagagaagcagccacaggtaggacatgttgaacaactttccaagtaaaaattctattctttggaggcaaattcaaattccaaaaatacttccaccaatcgcgttgaggatcaaaagtggaagaatctagttgttcctccaactatgtcaaaaccagctttcaccgtgcatacaccagctgtagtgtaatgccatatgagtcggtcatgggttgcaaagaaactcagaggaatcaacatgattcgatcaatatcaataggcttgaaatattaattcaacatagaaacatcccattctctactgtcagtgataaaattagaaacatgcattgatggaggtcctatataagtcagtggcctaaactcgttgtgacctgaaactcatgggtcatgtccgttagttatatgaataccattgccaactttgtatttgagccctttaataaacaatcaaacacattttgaaaaataatattttaagaaatacaattttctgatcacaaaccaataaagctctaaatttttattattttatttttatttaagttataaaacattaattctgttcccctttaaaaattaatgtctcatctatggtataagtggagaagggacagaatgcattgtggtctcttttattagttagccgttgaagtccctacccaatttaaacaaaaatgaagtggggaaaaggaaaagataaatgaatggtaagagagatgggaatgcttgtttatgtcctactcactcttgtcactttcttctttaaaatggggattatctatatttagaaaaatgaattattggtgtttgtagattgtgagaaagataagaacaaagatgcctcttttgcttaagagaaatgcgtaaggggtttaaggtgtgacgtattgttattatgtattttaatattggatctcatacattttaatttaataaataatatgtgaaaccgctaactaattataaagtgtcatattggtatggtgttgggtaccttaaagtattaaataacaatgttatttgcttaaattctaaagctaagaataatttaaagttaaaagaaagataaagagaacagtgtgtaaggaattatctctttcttgtgaaacctaagaatatctctgcaccaataaaaaaaaatatctaagttacttttaattggaatttcaactcattttcagcactacacaattaccaccataagccattataattccattgtttgatttgattttaaaactttgtatggcattattaaaagtgaagaaaaaatgatatgaataaactgttaagcaaaaatttcacatttaaaatattaaaataaatgcaaaacacaatttcacctatgctgaatttatagcataagagtttattaatttaagttcgacccatccaagattataagaataatctcttaattacaatccttttatttaaaggaaataccctttgattccaattacaat

SEQ ID NO: 299185 - DNA, 1929 bp, Cannabis indica
gctcaacgtgcaattaatgcagcgcatgttgaatctgaaagtattgagaatggtattggtcttgtaaagctgatgggacggtacagcggtgagtgctcatttttatttcatagtccgcgatactttaatggagttttatgttattgatttgaaattcaaatgcaggtttcatagccatgtatgctactcttgccagccgagatgtggattgttgtttgatacccgaatccccattatcttgaaggaagtggtgggctttatgaattcatagaaaaacgactcaaggaaaatgggcatatggttattgtgatagctgagggagcaggacaggagcttctctcggagagtttgcaatccatgaaccaacaagatgcttcgggaaataaactactgcaagatgttggattgtggatatctcaaaaaatcaaggtaaatttactatgttttgcctgtttttcttccttttatattgaggcagtgagataagcttgtgttactgcttgtcttgatctcgacctttcccaaattgcttaacctttttttcgggtttgttgatttataattttttgtttgtttcattgcaggatcatttcgcaaagcaaaataaactacctattaatcttaaatacataggttgaaagcatcctgattttccctttttttttcaccttaaattttcactccaatgaatatgaagtaaagtttaacaacttatttttcttggctgacagatcctacatacatgatccgggcaattccagggaatgcatccgacaatgtgtactgcacactccttgcacagagtgcagtacatggtgccatggccgggtacacaggcttcgtaagcggacttgtgaatggaagacagacttacattcctttcaatgtaaagttcctctctttcttccctactactatcaccattcttgaactttggaaattagactgaatgaatattattaatgtacattttgcaaaaaaaaaaaaattaaataaaaaaatgacagtgtaagtaaaagatgaaagttaatattctaaaagtttataaaataatatatacttgactttgtgttttacagcgcatcaccgaaaagcagaatcaagttgtgataactgacagaatgtgggcaaggcttctatcttcaaccaaccagccgagttttttaaacccgaaagctctgattgaagccaaaaagaaagaagaggaattcccaaaccagttggatagagaagattccataaaaggacctttggtgacaaacaataatgtacttttaacctaaactagactactgatgacacaactgcacagttgcttgttatcagtatatttttttgtccaataattgtgtaagcctaagttaataagacttgcagtttagagagtacaaaagatgaagtttttatttattatttaaagtttttcggtttaattattaataagtgtttgagttgaacttgaattttctcttaaaagaaccccatcttttatatgttatgtttctccctaagtttttatattttgtttcaattctcaaatctcttatggtcttttataaactatattttgccatttgccccaacttaattatagcaccaaataaaaatattttaaattacatgatgtgggattcttaataattttataattttagatgtttcatggatataatattgtattatcaccttaaaaaaatttgacaaacaaacttttaatgaaaatcaagtccaaactaaataatggtatacattaatgagataataagggggtgtttggaatgggatgatgttagcaatggaataataatgtgaattgagggtatactcttgaggaggataatgttgatacattaaaaaaatgtgagattaattatttccttccattatattaatttgaatagtattttttaattaataaataaatttaaa

SEQ ID NO: 299186 - DNA, 5181 bp, Cannabis indica
tattaattaaatatatattactgtaattatcgaaataaaatagtataccaaaaaaaaaacagtacataaatttgatataatagaaattatgctaaccatagatatatattaagttaattaaaaaaaaataacaattataatatgtacacacataaattacacaaaaacataatacacacttatgtgacaagtcacttataaatgagattcatcttaaataagaataattgtttataattactcgccaataaatgtgtaaattgtgtgtgcacatattattgactcggatgattatatgaaattctcttatatgttaattaataaatatatatatagttaagtttacatgaaccttttttaatgttgtaggtatcttcctccatatacttccttcctccccataaactacaaagatcaacaaaagaagattttgtcacatgacaataataacagtattggtggaagaaagagtttattggaatgcttcatgttctcaccactctcttatttatccatctttataattcttatttctataacggagagaaaaaacatgaaggacgatcccctcaacttcaatgtcttaaacgttatcatcgaagtaataaggttagttattattctactatatatttctacctacatgcactacacagctatacaggcaggctatgtctttacctagatccccacacaaagaaggcccatgttttggacaaaaaaaatcatatttttacatacataaaagcttctaaaattttaaaaaaatattactttatactaaaattttgaaaattaacatattttaaatagagtctctaacaactcaagtttgattttgtgtacatacgtaatgttatcaaatgattaatatttttatatataggttaatctttatcaacatatatacttaattgcagtgcatatggtaacgttggcttctcaactggctatagttgtaaacgacgactccatcaaggaggtgactgtgtagataggtgttatggcttttctgggaaatggagttctcaaggaaagtttatcttaatcattgtcatgttttttggaagacttaaaaagtttagtttgaaaggtggtaaagcttggaagttgtcttaactaattaattagctcaaaatgttactgcctttatgtattagttaaacttttatattaaactatgaaatattattgtgaatgttagaaaataaatttacaagtgtcagccccagttaacttattctgtccttagtgtcctactttgtatgattctgtgaaatcatattataataattgttgcatttaattttgttataatgtcagtatgatattttctttttgcaacaaacttttggtgagttatattattctaaaagggtatgtaatcgtttttctttgattatataaggtcggggccaattccataagctcattgagctatttttattaaaatcttctatgcatttcttaagttggtattagagctatacttggagccatggtgactagataatcaactctacctcatggagatagtgttggagttttatgtttgagcatccaggttgacatatgacatcaacctggatattgggtaagtgtaaaaacatataagagaagtactttaggatgcctaagtgatattttgaaatcccttagcctgtttttgtgttctggcaaagttggtcactacttcacagagatgttattgttcagtagaaatgagagacttgaaactcttcatttctgagtgagttttccatgttagaaatgagaaatgtgaagttgtgaatttgacttttctaacttcatggatcttagttattgtaagaaactaaatagacaattgaaactgaataagaattggataagaaaaacctagcgcaccagaccatatgtcaacctgggttatggataccctattcccgagctcctaggatcttgttttgatacttctaaggtttctgaacttcagaacgaagtctcctttcctgtttttgaccattttgaattcattggtcaaatcaaatttggtatttgagcaattaaaggtagcatcccaggttggttgtcaacctgggcactaggccaagtactaggtcaacctaagcactgggtcctgtttccaggggctcaagttttttgttttctccccgagtttaatgtaaagtctctagaaattctaggagaggctactaacaagtctgtaagagatagttatgaatgttggcatgctgccaataataagactcgttactatatgctaagcaacatggtcgatactctaaggaccaggtttgcatctgtagaaactacatccgatatcttagtaaagaaataaatcaaactaggtttgaagctaccaagaattttaccaatgctcatatgaaaccaacgcaacacagttgtgatcatcttctttaaataacatactacttttaggaatttgaactccatagagttattatattgatcaagatactcaagtgagtcctcaatagatttgactctaaattttctaccattcacctcaaactatgatatgaacaagtttaactttgatcaggctaaattaatcaatcaaatgtagacatttgaaagtttgatgggtgaaccacagaaaggagtcaataaagctctgaacactaccaataatcctaaaaatgatatggaaattcttgaagacaactatgcttctactggaaagcctaaccatttgaggaaaaggggaaaagaatataaccctaacctgcgaaagctgtaaaaccaagtcataaatctgggaagaataagaaaacaaaggggaggtgtttttactgcaaggataagggtcattggaaacaaattttccctaagttcctagcaactaaaaatctaggtatatttctagatcttttgttttaaaagaatgtgttttatagaacgatacatatacattaggaatataaattctagatctactaaacatgcatgtactttttttcagctactttattcgtggaaggggttagaagatggagagttggaaactaagagtcaataatggagcattagtatcgttccaagctagacgaaatgcccgtctagttttattttctagtaatgaagtatcattttattataatgttgtatgtatggaaaaggagctttatattctatgatctaataaattagttgctttaattaactctttattatagctaaacttagaacacataagcataaaaatattaatagaatacttgtggcatctaagtataaatcatattggctatgataggaaaaagtggctatcattaggatggtcctttacatgagttaactcttggtgagttaccaacttgtgattcttgtctaagacaaaatgactaagagactattctctgcaaagagaaatcatcagaaccaaataggtaaaatgtttaatgggggtggagaatatttaaatatgcagttcaacgatcatttaaatggacatagaattctatcacaactaaataccccagtaacttcataacaaaatggtgttgtgaaacgccagaaccgcactttgctagacatagttaggttaataattaactactcaactctacctacgtctttatcaggatatgctatagaaacagtgaataacattttaaatgtagttctatctaagttagttcccaagacacccctagaacggtggaatggtaaacaacctcatatccttaggaagaaagattcaaaacttgagtctcgtacgaaggcttgtgtttttgttggctattccaaagagactagtggtggactactttatagtcatcaggataagaaggtgtttgtctcaataaatgctacttttcttaagaaagactatacacatgacttcaaaccccacagtaagatagtattagaggagataatatcaaaattgactcctagaaatgttccttcaacatctactaaggtagatgattattctacttcctttgttgaaccaacgcaagttgttgtatatgaagaggaaaaaaatcaatgttactccaaattagaatggcacggtacttctattggttttatggtactaaatctggtacgcagcgagagaattttgtatctgattatcatcgtaccatagtccgtaggatctccagatgtatatacattaaatcaaaatataaattacatgaaaaatatatatacctcttgataactatcagggtatcctcaaaacttcttgtaacttggatccaataatcctctcactatagtcttcaaaatcgattcactatacacaaggagtagttttgggtactaagctatataaagtatataatttgttcttgttgaattctcaatacatgaccaagaacagtttgagagaaaaacaaaagttttccttttctttttggtatttccaaaataacagtgtaaaagcatcatttgattcttaatcaggcttatatttatcatagtcaatttccaattaattaaatcatatttaattatttaaataaatatctataatcgaatttggttattaatatattagatgagggaatattttaaccacttgagagaatatctcaactaacttggaaatatctttaaccactttttaaatttaaatatctatctaattaaattaatttatcaattaattaatccagaaaagataaaattaataggaacaccctactatagggtagtcgcctaccttgtcttaataaagacaaggatgtcgtcttttgtcctaataaatttttttcctattttattaattttaaaaattatttattacaaaaaataaataattactacttttccaattcaaaatagatttttttaaacaaaattatacaactttttatccccacccttcacagtgttttaaaatggtgatacgagaactatgaacctataattctaagctctaacaaactagattatttattgagtctgatcaaccaaataattatgtttattaattccatgattactccactataaatattgaattgaactcttagtatttatagaattatatttaatgagttttactacatcgtccattgatataatcagttctctcttagttttaatggctcattacatggcttctttgaaactaagaggtgcattaggtagggggtgttggaaattattttaccacgatcttagatatactcacaagtatgt

SEQ ID NO: 299187 - DNA, 5227 bp, Cannabis indica
tatttattttgttattgtataaatttaatgtgttttatatgtatatgcataaaatcagaaataaaaagataaataaaaaatatttacctcttgaagtctatcaagtgccattgccatctttttgtaagttgtatccaaggaacagtattgaactcatattttgatcttttagattttccaccttacacaaggatcaatgtaggttgattaggatatactaaataatcaagttcttaattttatctcaacatatgagcaaaaactctttttgatgtgaaatgatgttgtggctttcaaccattttaggtttataataatttaagattatataataataattaaataataacaaaaatttaattataaaatatttatttatttaaatattaaataataatatttaaatatttaaataaatacctataattcattctgttataaatatttattttgaatttatatatttagtttaaattgaatatctgataaccgattgctggaataactcaaccacttgaaaatatttttaacaacatggagacaatatcccaaccactttgaggaaatatatcaaccatattaaatatgaataactactttttaaattaaaattaaataaatattaaataaatatttattttttcaaattaattaattaatccaaaaataaattcagtggggcctatcattatccattggcgcctatcactatgttattgcacagtgagtagcgccaccattgtcttaactagacaatggtgatatctttgtcttgacaatactttgtctcccaatttttttaaataataaaaaaataaattattattaaaaataaataaatactattttactaattcaaaatagattttttgaacattattatttagtgttatccatacccttgatagtgttgcaaagtggtgatctgcagaccatgggcttataataccaggttccaataaattagattatttattgaatttcatcaaccaaatagtcttatttattaattctatggttactccactataaatatgaaataaaatcttagtaattatagaattatatttactgagtttaattgcagtgtctattgatataattaataccagtgattagcattccttatttcggttcataattaattttagttaaattaccattttactcttcttattatttcttcatcctttagtattattaattcactagtgaaagtataatttagatcaaatctaaatttatgcaaaaaaatttagctttagaattaacgcttaaatagaaccaacactcgatctgttagaaaagttaggattccatgattgtaaatcatgttctcagccatccacattattagtttcacaaaacagaatttctaaaaatcatattttctgagaaattttaacgagtgaatcaaataaaataataacatgaacaagagttcatgattactcaggatttaagtcgatctactaattgatcatcgttgtgatatgaattaggtatttatagtaaatgacttgtttgataaagatagcttaattatatattagtccttaatatataatctttatcatacacaacatattcccttagatgtcttcttacatcaacaatctgagtcgagatttcttgcatcgaataataagtatcggtgaactgtactagcaaccgttgattaaagattctataactttaatatgtagatgaatattttattcatgaccagtgatcttaattctctgtacaatactagtcacaatctcatatatgaataaagaattttctgatatttatatataaatgattcaatataaaatattaataatttaacattcaagcatatatcaaattattcaactaatatttatcataaataatgttcactatacttttagctaacgacgtcgagtcaattaaagtggtgagaataatagataataatttataataatgaataattaagcaaataagaacatagagatttatagaggtttaaccctatgattattgtaatagcctattctcctttttgttgtattgctttgaagaattaataagatcacaaggagctaggccaagtgagtttcttaagaattctcaagaaaagcttacaattattttacaacataagagctctcctataaaatatgatcttttatccctgaacaattgaatggctccattatttataggaaaaaaattacatcaatttgatttctcaaaacaattaagaaataaaaggggaaacttgattacttttctattttacaacaataatgtggggaaattccactgaaattggattcaattgacagaaggaatgtaattctaaagctttcgttcagccgcattgaccctggtcggtgtatgcgatcaagtggaagaatcaaagttggtcgaaccatcctatttaccttgtttgaatgttccaacttaatcttcaaataaattattcagcatagttaaatcactatggataacataccgaggaccgtactacccatccaggtcttaaatgttatccacgtgtcatcccagatgaatcccatgtcaccctgtgtaaaaattagaataacaaatgtctttacaggcatttcaggtcataaacccttgcaatctcccactttccctaaaagaaagttaagcatcttccttagtcccttattcattacatgacccataaaagattttgctgttagagtttttgtgaatggatctgctaggttatgtttcgacgcaatcttcaaactgtcacatcacctctttgtattatatctctgagtagatattacttcctctcaatgtgcttgcctatcttgtggtttcttagtttcttggagttggccaccgctccactattgtcaaaataaagtaccagtggtttttctacctctggagctacttccaagtcagtgtagaactttttcaactaaattgcatctttagctgcctcacaagctactatatattcaatttccatggttgaatctgtaatactagtttgcttaacgcttctccaaactacaactctaccaccaagagtgatactgatcccgatgttgatttatgactatctttgtctaattgaaaataagaatcagtatatccagtaggatttaactctctaataaaatagacaggcatgcgatctctcatactttgaagatacttgagatgtgcttcacagctatccagtgtttcaaacctggatttgattaataacagctaacaattcctactgcatagcatatgtcaagtcttgtacacaacactgcatacattaagcttgcaatagctaatgcatacagatactttctcgtgtcttccatctcatgcagagtctttgaatattgatccttgcataaagaaattctatatttagacagtaactatcatttcttagaattctctattgagaatatttctagcattttatcgatataagttgtttgagaaagtgataatattctcctctttctatctctatagatatagatgttgagaacatagctcacttatcctaaatctttcatttgaaacttttttcctaaccacttcttcacgtctgacaacatttctacattgtttctaataagtagaatatcatcaacatatagaacgaggaataccactacattacctttaatgtatttgtatacataggcttcatccatatttttcttgatttaattgtttcattaaaagtgatattccaagatctaaagacctgctttaatccataaatagatttgagcaattcgcgaacattttgatcttccccatctagcacatacccttagggttggtttatataaatagtttcatcaagagatccatttagaaaaacagtcttggcattcatctgtcatatctcataatcaaatgtgaatggaattaagcatagccgcatgagagaaggtttcatcattatcgatgccttctcgttgtgtgtagcatttgcctacgagccttgctttataagtctcaatcttccgttaatatttttcttcttcttgtaaatccatttacaccctatagatttaaccccttcaggtaggattacatactcctagattttgttggtgcggatgaaatctatttcttgatccatgacattgttccacttgtctaagtcagccccctcattggggaagatcacaccaaaccacatctcgagttatgcggcttcgttcataatctccctatcttcctgctactcctccattcagcgtttgtcattctcaacaatctttgccacctcatccgtgattatcacaaaaatagcttctcgcaccctttcaggcttggaggtgatccctcaaaacttgggagagtcgatgttcttgtggcgagaaatcaagttgacttcctgcaacttcttcgttgtcaccaaatccccgacttttagctatgccaaaggcaagttaaagtatattgactgatgttcctccaggaaatgagttgatcagggacgagaaataaaatctatgacacgaagataaagagaattttgggttagatgctttcaaaaccctgagataaggccaatggaaagcggagggatgacacttaccagttcgattaaaatcaagcaggagagtaggatgcttctttaaaggaaatccaaaagtaaagaaccagtactcctggatttcaggaggattactccatgtacttgtgggtcttaaatagataattttttattttcttattgatgtattatattgttgttattttttaattgtttttaaatacattgatatttttcacttctaagttgaggaatacttcttttttgtatccattaatcaaaaatacattcatattatattccattaaaatgtacccacttttatgagtgggttgtccaatatacctccactctctacttaagtctagcaaataatttatattaacctaagaagtataatgaagacatcatctataaaagtaactatattttaaggaatataaaaataaaaataaaaattaaaacaaacaaagttaaatggatatacaatctaatttggaccacgatgcaaaatgaccctaaatctaataattaagttaataaatgtccctttttttaaaaaattaacaaaatgtccattcagttaaaaattggatgataaaattataattataaccttgaataattaagtatttggcataattattttgcacaatagcatatcgtttttatgtgcaataatatattaaaaaa

SEQ ID NO: 299188 - DNA, 2037 bp, Cannabis indica
aaggaacatattgaatttctggccataatttgattttgaataaaagagagtatctaattttcactgtgtttagaccgtgcgtggaatattagattagcaacaagactcgcagattcttgattatccacccaaatgataggagcagtgggtagctggatatatgaagctcaaagaggacaaagttgatccattttatttttgcagcacaattagcaagagcacgaaattcaatttcagttgtcgaatgggctaccacaggttgtttcttagctgaccaagagaaaaggtttcttccaaagaacacaacataaccacctatggatcgatgatcataagggcagctggcccaatcaacatcagaataggcttgtagacacatctgtgagctggtttaatgagaaggccttcatgaacaatgccctttagaaatctacacaatcttttacatgcttcccagtgaagtgaattgtggtgggagcatgcatgaacttacttaatttgtcgacaataaatgctatatatggccttatcaatgtcaaatacagaagagtgccaagagtacttctgtacaaattgtgatcaggggaagggtcaccattgttaaggattagttgatgagtagagattgttggagaaggactaggcttagctccttccatgtgcaacttggtgagtaaattcgagatgtatttggactgggataaacacatactagaagatgttatgtgcacttcaaccccagaaaataatgtaatgtcccaagttttttgacaaaaaactcagtgttaagatcactgattaattgagtaatgagcttatggttgggtctagtaattaatgtgtcatcaatatagactaaaagaagaatcaaattggaaccggaaccatgcatgaacaaataattaattagttatcaaacatagatatggtgaaccctttgttgtataatatttgttcgagcttctcattccaagcatgtggggcttgtttgaggccataaaaggtcttgtgaagaaggtagacatgtttagaagggtccacaaattcaggaagttgcttcatgtatataatttcttgcaaggtaccattgagaaaaacattcaagacatctagatgttgaactgccagttgaaagatacaactaaagtgaggagtatcttgattattgttggttttacaacaagtcggtgtaatctattctaggtgtttgagagtaacctttagcagcaagcttggatttgaacttgtcaagtgtgccatctgcattgatctttattctatgaacctatttgttgccaattagggtcatgtttgggtgataaggtattaatgtccacgttttattttgaatgagagcatgcatttcctggtccattgaggcatgccatttggggttaggtagagcttatttaagagatcttggttcctttggaaagagagactcagctagagggtggctagttgatagaaaggcttttggcttgtgagtcctagctttggaacgggtctgcattggatgattattggtggtagggagtggagatgaggttattggggaagggatttgagtagagggtagaggaactgtttggtttattattggtgtaataagagattctgtatgagattctgggtgatgtgttgtttgggtttgtggggaaggtgttgattgtaacaaggcagggttttgggtaaatgtttgtagggaggcaccaacttgtgtattagtgtttccctcagaagaggatgacatgctggtggtatcaggaaaactagtgttatgggacacagaagcagtaaccacatcaataggagtagcagtggcttgaggtggtgaagccatcaattcaggactgttagaggtagcaacattgatgtctccaaataaagcagtactagtgtgaggaacaatggcaggtgtaacaaagctatttttgggaaccaactgttgggtagatggggttaccgttggtttgtggtactaaatcaggtacatagtggaaatataattctgattatcatcgtatcacatcctca

SEQ ID NO: 299189 - DNA, 3977 bp, Cannabis indica
ctaactaagtatcgggtcccacatagtttaatataataacttttagggattatcgctatccaatcgcaacgtaatatatcaagaagatactaaacaccactagtacctaatagcaatgctcttattattattattattattattattattattattattattattattattattataaagatatattgatctcatcataattattaaagcaaaaatttctttttgggttcttacaagtcagtattattggcttgttgggatgtctttgcttagctatatatttaattaatgtgtgatgatcgactcttaatatatatactaattaattcttaatatatgtcgtataactcttgaaagtaccctaattaattgttttctaaatatatacataaaaaaaaactgataagtcataatacgcaaactactacgtactattaatgcatataccaccaataattaattaatgtattattatttgttaatttgatttgtgtaatgtttctgcgacttctccataactgcctagctatacataattggctaataattaattaaacaccgtagacacatatatgaacacatgaatatattatattatataatatgtattaatcaatcattgaaggctatacatatatatatatagcttgcaaaaccccatgtgattgtaagcttgcattttgcatggtaactaaaaggtatagtatttgcatatataactacaaataattaatcaacttgcggaataatcattagtttaggtactgacacatacaacatcaaattaattaacaaaatatttacgtttctattctatgtatacatactagacttattaatattaatttatttgcatggcaattaatggcatatatataaatatcaaatgaatgtttaagctagaaacgcttttcattggagtagaactactgtattcatacatgtacatacatacatatatacactttatacaattgtaacctttctttgtggacaagtatatatgacattcaatattaccattaaaaaataattaccgcaaattatggataaaaaagaagctctaggcaattaagtagcatataattaaattaaaagtattggaataggagtgtctataaatacagatcaaaccgtttcaatttcctcattactaactactcaattctatcaaagcctgttaatatatacaacaaaaatagaaaagatatatatatattccaaatactccattattattattatttatatataatatataatcgattcatcatagtagtaagtagatgaaaatgggaaggtggtcatcaaaattggtggttaatattggtgttgtggtattgtgttgggtggtagggacatcagcaaaagcagtggtgtcgacatacaatgtggtgagtttgggaggaaaaggggatgggaaaacagagtcgagcaaaggtttccttgcagcatgggacaaggcctgcagttccaccaatcccgctgtggtatacgttcccccaggcagattcttgctcaaaaatgtggtcttcactggccaatgcaaaaacagagctatcaccttccgcattgcaggaacactgctcgccccatcagattacacaatccttgccaactcccctaactggatttcctttcagtatgtcaatggggtcaccatttctggtggaatccttgacggtcaaggcacttctctgtggaaatgcaaaaactcaccctctactaattgccccaccggagccaccgtacgtatttctcttcgcttaatttaattaataccatatatagatagataacataacataacatactaataatgacgtttgattgattgcagacactgggaatttcaaactcaaagaatgtaaaagtgttgggagtaacatctttgaacagccaaatgttccacatcgtgatcaacggttgcaacaacgtcaaactacaaggcgttaaagtgatggcaccagggaacagccccaacacggacggcatccacgttcagctctccacaggcgtaaccatcctcaacaccaagataggaaccggagacgactgcgtctccataggacccggcacagccaacctctggatggagaacttggcctgcggacctggccacggcatcagcataggcagcctgggcaaggacgccaaggaggcaggggtccagaacgtgacgctcagaacggccacgttcaggggcacccaaaatggggtgaggataaaatcttgggggaggcagagcagtgggttcgccaggaagattgtgttccaacaggttacgatggtggacgttgagaatccgatcgtgattgaccagaagtactgccccagaaacgaggggtgcccggggaaggtgtctggggtgagagtgagcgatgtgacttaccaagacatacgagggacttcggccactgaggtggcagttaagttcgattgcagcgctgccaatccttgtaacagaattcggttacaggatgtgaaactcagttacaataagaagaagaagaataataaggatgggattattaatactagtgcccaagcttcttgttctaatgccaaaggaagcgcttctgggataatccaaccctcaagttgtttgtaattattataataatatttgtaatttgtaatttaagttgcttgagcctgtggcgtctgtgattaattattatgatcataatcatgatcagggttctcttcttactgttgattccaccctcccctgctctggcctggccttgcactttaattacttcattaattaataattagcctatctaatttgatttagtactaccattttcttattaattttatgtttattctatatctttatattgtaaatgttttcatttcctagagggatatgtagctagctagcctagctgcagaatcaattaacaacgaagtgcgatagcaatggttgccattggaaactaataatatatttatataacaaattagtagaagttgggcagtttaatatcaaattcattaattaattaggtaattttagtatttcggagaatatactatttcggtcttttctgtacaagcttttttttacacatgaaggtgttgagacataatcgaatcccaaattagaagaagtcactgtccacttatgttattttttgttgaagctatacattgtaatatcctaattctaaaacaagttggaaataaataaatgtcacagtgttcatcttcagttttaagttaatcccatttagccttcagtctgtataaagagtcccaacgtatgtagtacgtactaatctttgaatagatttggaagattttgttacaaaaggaactgttgtgtcactggtttccccttagtctttctctctcttttcaactgaaaattagattaaaaaaaagtgaaagtaataacatgctaacttccttgaaggaaagcaatttagacttagaaaagttcaaagtcaagattcattgttatttccttggaaaattgaatctttctttttttttttttgaaagagtggaaaattgaatcgtatagacttgtaagtctaggtctagcccaaaaactacgttagaattgtttaattagtaacttgatcaattaattaaacctttttgaattatcaaaggcatttgtttattgacttacaaaagtaataattacgtacaacttactagttcagatcacaaaaccttttcgtgcttttcatcaaactcatcacttcttcagttatagatgaagatgttaaagtatttgaaagagggtgttgttagaggaaaataaacagcaccgaagtgaatattcaagctacacaagaacacctgcaactaggactgcgaatatttgtttagattggcaaatactcaaagtaaaatagggattaataatgtaaacaacatatatgtaagacaaaaaaaaaaaaggctaattaggatttttttcccccgaactttgacagatactaaatcatgtcctttga

SEQ ID NO: 299190 - DNA, 1984 bp, Cannabis indica
gagaaacacgtaggttacgccacgtagatataaatagatctgtgagcgcaacacataggcctacgccacgtagacataaataggcatgtgagtgtaacatgcaggtctgtgacatacagacatatatgaatggaattactgtttaaatagcatgatgagctactgtttaaatagcatgatgagcatattatatttgttaagatttatactgtcttgctgggcttggctcacgggtgctctactatgcaggaaagggtaagactgtcgctgatcaaccatgagtgcaggagctggacgaagaatctacatgtccaggccatagtagaccaagcgggttggggtctaccaatgatgtatttttgagactctgttttgtcgcttaggtcggctgaaataaaaaggacttgtaataatattttgtaaatatttttgggatcccgacttttgtaacttttagattgtaaagttaaaattattacaagttttattttcattccgtttatgattaaagtttaatttctgcgctaattttataagtaatcccgattaggggattaggggttcataagtatcttggttagcatgcctaattatttagggcgttacatgcattctttgaatagagcctacaaatactgatttactctaccccctactcgatgataactctggcagtgaaccctgccacaagtgtgcgaaagattgagtacaacagacctgagctaacttgcacgacatccttccctattttgtcccaccatctagtaagtacttcaacactttgttgattttgtgcaattttgaatctaggatagaaatcctaggttcaagctaggtttagtacatagtaaatgtttgatcaatagaatgttgtccgtagaaacacattgttagaattgaactacgcgcaagttcttgtcccttcaggttgtcggtcttatctgaatggactgagcagggtcattttcatttctgagcatgcttgcacggctccaggattagggttgagccaggttgagaatgcatttgaacaatcattaggctgtcttgattctttcatactcagatgagggtgcattgagggtcaatcctttcgggaggggtatctaacccttatgtgtgcacccattttggaatatgtcattgcatgccacataatcttcccaactttataatttttgattgattcacttatcttgtgttggttgtgcccgcaagtactccttaaagcaagaatgctaggcccaacaagagagactggttcgacaagcttcacaagtggatgaggttctgtaaggaaaaagaaaaggtaggacggtatgtgccaaactgtgtctcccagaggggatgatggtccccaacgagccaacatttccactccacctgatccatcaccatctacccaacaaccccatcagtaataccaccagcaacaccatcaacaatagcaacaccaacatcaacagttccaaccacgacactagcaatctacttccctacccgagattccttctgtgggttttaaattccctatgaagattatcccccttgatcttgctactatgcaaagagcgaggggggttgaacatgcctaggggaagtgacatgaggagaaaaggaggattctgtgaatgagagtgatgagtgcacatttgtacactcattgattcttagtcaattattagatagattagtatttatttttgtatagatttgatgtgttttctccaagtgtgtaggtttgtgctgaaaagacattttgtgttggactgaaatctttgagcccatgtttgacaatgatttcatcattttcttgaagagcttatgaaatccaaaataataaagctcattcccaactttccaaaacatgttaaatcatctcatttggagtccggacgcaaaagttatgcatgatttactgagcaaggttgaagtaaaaaaaaatggtgctaggcgctatagcgcagggggtaggcgctatagc

SEQ ID NO: 299191 - DNA, 1776 bp, Cannabis indica
actaaaaactagagaccaagtaagctcctgtacaaagtttcgagatacatgatagtcaaagggaaattataccgaagtggttaataaatgtcattacttcgatgtgtattgccaacaaaagtgagagcatcatcaaataaattcatgaaaacttctatggagaccatactagttggtagagtctgtcaaagaagattatccgtcaaggatattattggccaacaatcaataaagacacacatgagttcgtacggaaatgcgacgcattctaaggatcccaccaatagagctctgcatgatgacctcgtcctattcatttgctatttgaggaatagatttgattggatcagtacccatagggcaaggaggagcaaaatacgtagtggttgtagctgattttttcaccagatggaccgagactgagccattacttaagatcacttctaaaaaggtcctacactttgtacatgaacttccttgcctcattcttgtctgaaggaagtttgctatttacgagataattgatgatgggtgtcatccaagttggattggcatatatcatctccacatctccctccatctcgcatatatttggttcttcaattttttcaatgggagccaagttgaggtcactatattcagattgcgacgccaattcagccaaagaatctgcatcaacattctgttctcttgggatttgttcaattttaaatagttgaatttttcaaagttttttcaaaaaatttctaaatatttggctatttttattccctttgtctggtattctccaaggatttattgtgaatcactaaggcaatgtactgccatggcatttattacttctaccattctcagacttgcgagaagtgcttcatattctgtgcgaatttacacttatctccttacacaactcacatacacacacattagtgcacaaggccaattttgacctttcttttctgaattaatggcaaaagtttgacacgtatagttttactattttctttcttatctttgacttttcttcactaatctcttgtttgaatagatctttgaatgacaaaataaattaggacaaaaaaattaatcaagagtgaaggtttgagaggaaaacaactctgttcttaagctggtttagagagacatgcaccaacaagatgaagaacaaattaagtaaagatgtgaggataagagagaacaaacacagagcattttacaaggttcaccaccaaaaatttggggctacgtccttggtgagttgcctctcagaagctcagtcacaatccattataacgatcagcaattacatcaagtttcaaagctccaagacacattgatcggctggtagctcattttttcatctcaggtatgtaaatatctatcttgtttttcctctctctctctctctctcttggatcgaaccgatcctcttacttttctatctctctaactcttcttttgttcttattctttgaacacgagagtatctcttactggatctggatctccaagatcttcattctctggtttgaggagtcattttggagctgtaagtcttctagatttaatttccttctatttatagtagatgtgtagttaagtatgttacttaggaatcactaactgaatcttgaatcttggattgcaaccgattaggttagttaggctctgatctaatttaactaactattttaatttgctaatggtgactacttaatggttacattttaattgtaaccatcatggttacattttttttacctataatagcaggtt

SEQ ID NO: 299192 - DNA, 1580 bp, Cannabis indica
ccaccacctatattgccttactaaaaggggatagtagctgtttcgcctattgaggagttgctacaggctgaacccgaacaagtcctccaataccactttaaagcagttggtgttctagcagcttccgatgttttgattaaatgggacctccctacctgactttgaggctacatgggagacttactcagctattgatgcacgatttccagcctttaaccttgaggacaaggtgaaggttttaggaggcgatgttgataagctccttgtttgatgtgtctaccaaaggaggaaaagccataaagaccttgcataaattttattacagcagtttattaagttttaagtctttgttttaattgtttttggctgagttgttctttttgttttgggttagtagcttttaattaagttggtgatacggtaagctttattctctataaatagaaaattagaactcagtttcagataggtggaaagagtttagaattgagagcaatctcatgagagaaatccagccctcttgaaaagttagaatagaagaaaagcctctcgaatagctattttgtgtaattctattaataaaagcattctggtgggaaatcaatatttgtgtctgaattctttgttagattatttctagtctaagaaaagtctatcataacagcagaaaagtgtaatataaaatatatatatatatatatttctagtctaagaaaagtctatcataacagcagaaaagtgtaatataaatatatatataatataattacgagtttaaaatagcaacagaagttaaaagataatccaaagaagaaagaaataccatcttagatttcctaacttcaaaaaaccctctttgatcatatacataaaacgaccaggtgttgctataaggacatctactccttgttgtaaattttcaagttgagttttctgccgaaaaccacctgtcacaaccattgacctgaaaggaacaccactttttgacattgatcggcaattgaccaaaacctgcaaaatttacacacatgcattaagtaaaaatacaaccttacaaaaatgttcaaatgatataactctatttcttattttctctgtataaaagaaagagaaaaaaaattgtattcaaaaaagagcacagcctgtgtaaataatcttcagtacaattcttatttcaccatatagaaaagaatatggtttgaaggtactaccaaaaggagtagcacattggatgttaaggaaacaaaatctttaaagcaagtagtgagtgaaatgctgaaatgcagtctagagcaaaatagtcacatacctgagaagccaactctgcagttggtaccaatacaatcagtcgaggactctgcgatgaggccatgctttttccatcaatttcttcttgcctaagacgttgaattacaggagcaagatatgctaaagtcttcccagatccactttgatcagccaaaatacagctctttccctctttaacgggtgcaaatgacattgcctgcaattgataaaaacccacttaactaagaaaacatagtcagctgtaaataaaatccatgttgtaattatccatt

SEQ ID NO: 299193 - DNA, 2606 bp, Cannabis indica
cacaggtaatggccgatagtgtgcattttgttgacgagaggtggttggtgaagcttcaagggatagttaatgatggtcttgctcatcagcctgccctctggttgttaaaagagatcctggttcctactatgacaaggcttctcattgcagtttgtacaccctacatgcttgttagattggcatttactgtacttgggtatccctttccagtgaactcggccattcaccggtttttctttccaggatgttttgccttcagtatactgtggtttagttccaagattatatatgcattcgtaatttacttgcacaacaggatcagagacgaccgctactgtgtgggccagaggttacaagattatggagaaaatactgagaggaagctaattgagaagaacgcattagtattgcaaaatgaatgatcagaatcctaccaagttacttgcctagtaagtaactatttttgtacatatacaggttcatggtcatatcttctgtacagagatatctggatgataggaacacaaaaaggtacactatatataatataaaactaacattgggaagtagtagttagaacggtgagagacaatcttctaatggtaaagcttcaattgtacaattatgaaatttgtttgggatgaaatatatgagtaaggggtgaaaatggtattcgttggataattctttgtatagtaatagtagttttcccaacaaagtgtggagtgttatgcttgcttcactagttgtccaagttggttaaattataagcatttcccattaaaaaaaaaacattttattttcttcctgggagttccaatatctgattttacactatgttttgtggcatggaaagaaaattaatttatccaaattaatttatgagggatagaaaagaaagaaatgaaaacatatttctttatataagaaagaaaaaaaattggcatatagtaaagttactatatacatcattatttcatggcatggttgtgagtgacaccctcaaaaggaataggttaaagtgagatgcctagtgtagagatagaaaaacaatatctttaagaggattaggttcagaaactaaattaaattttaatcacaatagggttttttttttttttttacaaaaaaggagcagaccacctaaaaatgaaaaaggtggtaatgttaatctcctccaacatttgagtttcatgttccctttaagtctactccctccaattgtactctctttaactcaaactcacataataaacactctattaggtggcatttagttggaaggaatgaacacataactagaatatgaataacattctaatattttaaaatgaaactaaacaaaaaaatagaataaagttattttttaattttattttattacctcaaactaaacagcacattatttaggtagatatattattttggtataattttattttttttgtaaaaatatttgtcatttcacttcacttttacttatttgtaggaaacttttttctccattttcttttttctaaattgaagaagaagaaaattggtgggttcacaccatatttttcttttcacttttcattctctctattttctcttacaatactatttattcttttttctttttttttttcttcctacttttcttctcttactaccaaacatagggctagagtgaaatgaacaaaaagaaaatgtgatgaactatacttctctcaacaaaattacatcattatttcatggcaagattataagtgacatgctcaaaaagaataggtttagaccatctccaaccgagaggtaaaatcatatatataatgtgattttttccacaaagtactctaatggaattgcaaaatctatttttttttatgggagtctatagtgtctcactaacaataattggtatcgtagaccacaatattttttttcattttacttttcaataattaaataatactttttggattagaacttgaaaagtatttagtgctaaaataataaaataataaaataattaaataaagtaatataataacaaagaaatactttttagtgtaatttatattgtggttggaattcgaaaaaaattagtactttttttttttatattgatttaacatcaaatttaaatttcaccatgagagagttgctctaactctaagggaaatagagataattagaaaaataatatctttaatagaattttcttttttcagaaaaggtcctaaagaaactccaacttctcaaagaaaagactaagaaaggagagaggactcaaatttgtattcatccaaaattcgcatcatccaaaataaaagtttgaatacaaataggggacaccaaaccttgctaataatagtcgataaaacatatttagctaaggtatgagctgtgagctagaattaaatgtgaaggggccaaattaaactaaaatttaaataataaagggaaagcctgtagtacaccctcctaaagggttattgaggtagacttgatatcatgagttttgagcacattttttataggctaattagtaatttttctccctgaactttgacatgtactaaatcgtgccccttgaacttttttggccgttaaaaatttccccc

SEQ ID NO: 299194 - DNA, 3923 bp, Cannabis indica
aaaaaaaattataaaattgtatcaaaaataataaaataataattcaatatttattttattttatcctttcaactttattcttaataccaagcaacacaaggagaacaactttcctctccattcctatactctctattgtttctaaattcttcatccatactactccccctctattctaccatataataatataacctaagtaagaaaagaaaagaaaagaacaggaaaagataaagataaaggagtgaaaaaggtcgatggggcatgtaggaagtatagaaaagtaagaaagaaaagcaaataaaagggcatctatccatccactagcactagcgcagccacaaagaaaggttgagagataaaagggaaaggagcaatggagcataggtgataggtgggaccatatggatcacttcactgcttatccccacccacaccacatttcaactccacccaccacattggctttggctttggctttggctttggccttgggatttatgaagaagaccacctcatgagccatgcccatatacgacaaccaaatctttctcaaagagccatcgaatatgcctagttgacggtggagacaagcttttgatcctccaccattccttttttttctacttcatttttttttaattatattatatataaactattttgtttctcttgcattaattttctttactatttatattcagacatttcccaccaataatacttaaaagatagaagagtgacactagtattttagacattctagttataattttttatgtttgtttatctaaatttaatttgcaccaaccaaaccatttgagcattgtaaaaaaatactagaatataccgtccatgtttatattaaaaattttaattaataacattagcataataataatcatagaatttccatcaaaataataataataataatgacagaaaatacggtccaataataatagaaaatacagtcctctttctatcggatgagatagttgtattatagtttatcatagtactctttctgaccacatagataaatctcatccatgaaaacttaagatcacaggatattacgatacgacccagccttggttttatcgacgacatctgataagatttcaacggtcctgattaagagtttagtttgtcggtagtatttaaattcatgtgatgcccctgcgacacattaaataattaattcccttattattattattattattttgttattattattgtccgattgttaagtctttgtttgtttgtatttaataaaaaaaagcattcacacaaaaacaaaaccctaagaacgactctcccatattataaatcaaggaagcagccctcatttctccctttctattatctttctcaacatcacaaatcctttctcctaagtccctacaccctcgtataaccccttttggcgactttggtaggattaagtagagatgtctcgcacgtgctcccagtgcgggaacaatggccacaacgctcgcacgtgcacggagctctgcggcggcgaaggaggcacatctgccgcccccggcgagaacgcgattatgctattcggtgtgagagtcactgaagccaccggaagctccttcaggaaaagcgctagtatgacgaatctgtctcagttcgaccagcctcctcttcatcacgactctaacgccgaagccggttacgcttcagacgacatcgttcatgcctctggccgcagtcgcgagcgaaagagaggtatttcaatataataatagtatttaattcttctcaaatgatgtattgttatggaattcatttttcttttccaaaaatgaaataggtactccatggacggaagaggaacacaagcttttcttgttgggattacagaaggtaggaaaaggagattggagaggaatctcccgtaacttcgttaagactcgtacgccaactcaggtggctagtcatgcccaaaagtactttctccgccgtaacaaccataatcgccgacgcaggagatctagtctctttgatattacaactgatactgtatgtatatatataaatttaaatatgatatgcataatctttgattcgttatttttgtttcaaatttcattatttaccgatttattatttttaatttgcagttcatgaatccatcatcatcaatggaagatctgacaatccttcaggaatcaccatcatcactaccagtactgtctcacccaccctcaaccgtgtaatatcgggctctttccgatgagtatggcgcggccagtaattctaccaatcgctacagaaaactcgggagagagtacactggcattcgaatcggggagccaagggaataaaacagcgatctcaatgccaatccggccgattccgcttcacccggccgtacttcccccgccatcggcaaaaatggctaatctaaatttgaacaagtcgttagagccctcaaatctatcgctgaagctctctggcccttcatcgtcatcgacggatgaaaaatcgcagtccccgccgcctcaacgaccgccgcaacatccgcccactaatttccaggctatgccgaatggtgacagcatcattagtgttgcttgaagagtattaatcaattaattatcattccaataaggaaaaaaaataactcattttgatgtgtacgatatatataaatatatatatacacacatctcgctagctagctagctaccaagaaggaagtgggattaggacaaaagttattaaaaaaattggattgattagacagagttgaatgattaggttgtcaattagctagggtaattagtctttgttccttgtctgtaaagattattagcgattaattaagatttaagattataagatgggctgtcgttttctatgtggggatcctcggttgattggttgtctggttctttatttatgtggtggacagaatagcaataaaacgcacaacctggtctgcgttttattatttggtcacacatgggggaattttatgaagaaatatatattagtaataataagtatatatttctgtaaatgaatatatataataatatatgtattagtcggtttgtattagttatgataatctaactcaacatcctactccttacaaagaaaagctcaacatcctacttttaataatatgctgctccctcacattttagacgaagaatgtttcaggctcttattcttttttttttcccaaaaaagataaaaaagaaatgaacacaaaacaagtgttgtatttataaatatatatatatatatatatgtatattcttcagtttggaattagctcaatggctaaactaagagatgtaatgaaattcagatgaatacattagtgctggaggcttacggttttgaatttccgttggtttagtttgttgtggtgatcaagtttaatatcgactttttagtccgaagaaaaatatacaaagagctaaccaaatagtgagaaaaagtagaacttgaggtcacgaacacaattagcatagcatatataatttaattgggtgaaacagaaacccacgagtgttttgactttgacacaaagtgtcgtgggtccacacaacatctagtgttttcgtgcagctatggagctaatcatcacgtgctatatttgcaaaataagaaacaaccgctctttccgtgcggttaccatttatttttaataataattataattatatcaaatatcaaattttaatattattttacataattttattttaattatacgagtaactattttattattatttttattcttaataaatattataaaattataatttttctaattattttaaaatgtttaattaatttacactacaacattcaacactaatagcggcggacccctccgccgctattagtgtcctttctggccgctaaagggcaatagcggcgga

SEQ ID NO: 299195 - DNA, 3770 bp, Cannabis indica
gacatacaacagtaataattagatgttgcaagatcgatacctaaagtccccaattaaaacccctattaacaaagataatacttatttaaataatcaaaaactctagaaggccattccacgcgctgatggtaatatatatatttatatatatatttatatatatattatatgtgtatatatatatctcttcgaaaaaaaacattgactatatcttatattgattcatttctagctagggtttcgacaaagatcaagaggagatgagtgaacaggcggaccgaagaaaaaaatattaatacaacaaatcttttgtatgccaaagttgtcggaatctggttgtttttatccggcaacttcaatagacagaacaaagtcaaccacaccatacagtcaacgccggagcaacgtcaaaacgctgttgttaatgatgataatccagatcaggttaccatcgagctagggttttcctcctctgtccaatcaagtacttctccaccaccgccgtcgccgccgccgccgtctccggagaccgagccagccaccacatcctcatcatcaaggtctctgttagggtcttcatcaaattatataccctactttcctttctccaacagattaaacagctttgatggcgaatcaagtgttgtttcggtcgactccgaaatcatgagccaaccttcaacttcaacttcttctccttcttcttcttctcgttctattttttcaggtacaacagatagaaagaactctaatcatcacagttacacaatggcaaaagattcaaatggaaatggaaagaaggaggaggaagaagaagaatcagctagggcaacatttttaaatcaagagttacctaagtttatgttaggcattgctgttacacttttgattggtcttatgatgttacactttagtcatcctgaaatctatgacatgaaaaagacaaagcatctttgtttgtttatagccattgcttttgcagctctttggattgcgattattcttgggggtctcccattaccttatcctcttttgataattcggaatattggtcattctcttattttaggagcattttatggtatcattgctatttttctatggcatgaccctaatctttttatagttcctgttgtgacctttgtggtttcagttgcattagatacttttaaatttgtcaaggactttaactctagtccttaggtagctagtaactgtcctatataggtatatatataatttatatgtgttgaggaattgtattaaagcatgtaaggcttcttattcctttgaatctatccaagtatgtatgttgtgtgatttcacgatgaatgttatatacagggtttgttgtgtgttaattttcctctctttcatttttcataatatatgatattgtgtagtgtagtgtacaatttttttttttatatctatataattgtaatgcattacagatacagatcaagcatctccgggaaaccattattaattattttcttcaatctatatttgcatatattagagctctaggtctggagttttcggttgtttgattaatggcattaatattgattagggtcagtggtggtacgtatttggatattttcgtttattttctttggttaggctcagtgtcgatcgctcttgtaaaaattccgtactctcttcaatgtgattaagcaaaaaacaaaagaaaaaagctatataacaaattgctatctacatggaaacgctgtcaagtgaatatataatctcctaggagaattaaacagctcaacaccttatgaagccaaacaccaactggtgtgttacgaggggtttgcgattttttatattattatttattaaatcaaaatgtataaaaaccgatattaatttacaccaatagcggtatgtgcttggcaccaaggtgtgactttagcatctctccaatgtatatatactagctaggtttacataaggtgaattctaatcctcctttgacgtagaacatattataataataagctcctctttcacctataggcaagacgagctccattttttcttggcttaggaaatgtgagtttgatcaaatcttcccttatcctagaatttatgagttcatccttggcctattagcaagacgtaggagctccattttctcttatattgacctagaaaaaggtgaggtctaaatgaactctgaaaaacaaagtttgagcagagaaaaaagagagtagaaaatgtggaatgaatgctcaatcttgaataattgagtagctctattatttctactgtttctggatacaataacaactcaagaaaagagaccttaacagtcactaacaacctctaaccgattctaactgattttttattttaaacagtaacagaaataactgttttatataatctaacaaggtccattaatccttttcgttaccctagaaaatacgtgctccttattggcctatgcaatagacgagctcctattctttgccctcggcaagacaagctccatttttcctaattggcttagcaaggtgagcccaaatccttccttgtcctaggatatacgggattgatctccttggcatatatagacaattatcttaagtctagaaaaactgagggccaatctttcttagcctagaaaataaatacaagctatcaatatttacctaggcaagacgatcgaactcaattttttcttggccataaaagtgagatcaaatccttaaacctagaatatataagggaagatccaatcttggcctaggcgatataattgcaatgcactgtacgtacagatggtcctggagaaaacatattttttagctagctccatatatataatatatatacatttctccttatttatattttttgtgatttttatcttgtatatagttccttgagatattgagtgtatatatgtataaacaccattttttgttatactcccactaccacaccctcaacaccatttgttgttatgtactactcttgaatttcttgtcatataattgacagttccttgtttcattagtgtttagggtttgttattactattatgcatggggagttattttgctaagttactataagcatcaccaacaataataatccactacgtacgtatattatagtatcatttggttctagatgtatcatcaacaagctaagcaaaagatgatttttcaaggcctcgctataattggtggcaatcttaatatgtcgaaggaatagaaagttaaaatttggagggcaaattgtaagaaaattaatttagaaggaaaataaaaagaaattatatacaaatttttctatatatttatatattctgtggtgtgcaaactaaaaatactaagaacacaaaatggatttacttggttgggcagcaaaatcatcagtcaaagagatgagcaacgaagttcagtttggtcttgcagcttaatctacgggagaaaataacttttaatggctaaaatttattattaggattgccataatagagttacaaagttaggatcgaagtcctcttcacagttgctctttacacaacatcttatacttataagttctctcaatcgatcaaacacaccagagaataatcttttacaaactcacccagtttttttttccttcacctaattaacgttagattgttcggcaagattcaagaatatagattaaaatatcaagaagagacatgttatatattaaatataagattatatatcatgtgcttattgattaaattatataatatatagtttaataatata

SEQ ID NO: 299196 - DNA, 2912 bp, Cannabis indica
cacagatgctaagcccattaacaattgatcaccaacaacatgggctaacacagcaaagaactatccaatcaacccaagttttaataaaaccaataaaatttaatgtaagcccaaataaaagtctaacagtataaacatctaaaatggacacttgtgtgaaaagttgtggccaaaatactaaaattgatcttctcggtaaaaccctgcctggaagacccctatcgagaaggaccttttttgaaggaccttgtcctgaaggaccattttcggaaggaccttgtttagaagcttcctcctggaacctttttctgggcagcagaggctcaaaaatttcccattttcaggcccccaaatttaactcctaccttaaccaaaagctaccaaactttcaagaatagtatttggggtattctaaagataaccacaacccaaaagcatctaaaacaatgtgcattaaaattcaccatggatgagcaaagcttgagttcataaaactcaaacttcctcaaatattgctacaattgctactacttttaaaaactagtcgtaaacaactaaaatcaagctttaacagtttataacacaattcaaacataactaaactcctaatttcccaaaatcacataattaaaatcaatcttaaaccttgaaattcaaagagggaatggaactaggattacttttattcttctaagtgttttcttttcttaattcttacttaaatccttgaagaaataattgggttgaaagactctaaaatgtgcttgggtttctttggggtttcaagaagagagagattttaagtctatctttgcccttttcaaatactctaacattgactacaacatataaccatttaaactctcctacccaatttaaagatattccacaacaatccaccaaagacttaatcaacttaaatgaaaatatgagaattcaataaaatatccgtaactgagaaattattttcttaagccttatttttaacaataagtcctaattttttattgaaaagcataaactcgtaaaatattattttaattcttaattatctgttaattctcataattaagctatgcgggcggtcagtctataccaaagtatggatctagcttgtggtattagatagattgagattcaaatcaagattattcaaatacaatatatgtctagatgaagaatgtatgatttgtgaattggggaaggagatcgaggagtatttatttttaactctcattggagttttcatgtggtggctgaaattaaactgtggctgcatttgattattggttatcaatatccctagtatattgcatgcaatatattatggctttctagagcaaaaatcaataggttcaggccaagttttttcagcaacatttacgtacggcaacaatatatcatatatggtggtgtagaaataaagctctttagagcatgaaattttgtacaattgatgtaattgttaaaattaaagaatcaaatatgatataaaaagtagaatcaaaagtattatgcacagaaagttgtaaaacaagatttggtatggtttgaacaaatggtatataaaaaaatatagttggcctatgataattggtgctgctaaaaatgtaaaattttgtttgtgaaatattctttatctcattgacccttaaaaataaataagcttgaaataaaagaggtgggtaaactttttttattagtattattattattatttttttgtctaataaaaagtatttaattttgacaaattaaaccctctctcgtcttagtcctagtcctagtcctagtcctaagaccttagctaatttatcaagtgattaaagggatgtgattgatggttcgtttgaggttgatatgattcttaatcatgatcacacatatcagattatatactaaataatctgttgttttccattttctattttgtgtttaattaattatgatcttggccacgtgaagaccactaaccccatcactcttcttctataaagtcttaagaaaacgactcgaccctttttagtaggccaaaagccaattaagattaggtgcaacttgccaacttgacaatattattattaaaaaaacatataaagaaagaaagaaagaaaaagatgatagtatgtatggtatggtatggtacaacaaagtgtagctttagagtggagatatatatataaagagaaagagaaattattaataattaataataatgtttttatatatgttaagtttgtcaaagaatctttgcctagttcaaaggcattagtttcgagttttgtattggttgtttttgagagaaagtagtggccacaacccacaactatttataaatatttatataagcaaattattaggcctaccataaccataaccatatagccaatgaatgagagaggttgacaattaagttatggccctcccaacaagctattctcatttctcagtcccaccatactttctccaccttttctgcttatgctattatatcctcttttctctttctttttttcttttttatatttgtgtatatctatacatatattatttatatacatattcgtatagtagtattcaattattatccaaattaattgtagatatgttggctaaggtaaggatgtgtagtccttttagtcaaagatggaagattatagtcaagttttaggttaattaggacacacttctaatgtctagggtgggagcgtaagacacgataataggatttaaaatccgcataatataaatgggtttgaaatttgtattaaatggtttaaattatttttgagttatacggttaatccatttattaaataagttatttttgatgtttaacccaaaaatgacacgataataacttatgtgaaagtattctatacacacacttaagtttattatatttattacat

SEQ ID NO: 299197 - DNA, 3661 bp, Cannabis indica
ttgattgtcatctaaagtaaaagtgccttgattgaagttaaaaattggctgggctggcgggtaaaaactactcaattattaatcacactgcttcataggattgatcgagctcagattagcaagctaaggaaataagtttttcctatagctaaggaatgaggctttgtggaatcataatgtagctacaaagattgttattgtacaaagttagaaagttgtgataaagtattagtaaagatgatctgaaataggttgaacgcttgtaatgttagaatttattcaagcttcgtttgtaagtctttacaagatgtaattgaagtttgttgagcgatacatttttttttaagcaaaaaaaaaaataaaaaattaatacaatcacaaattttaataaaatacaaaccatattattcaatattatatgagaaatagtatatattaatatattacattgtactatttttgaacttagattgtattatatattgtggtaggacctaaagtcaaggtcggtgttcgagttaagattaaggttggggtcggggtcgaggtcagggttagggtctaactccaggctaataatctttattgaggccaaggtttaaggttggggtcttcatccctggtctaggctcggggttgggattggggtcagggttatactcaggttccaaggtggaatctaggtacaacacgatttggatcctaggttgggtcgagatcgagctaggagtcagttttggatagtgatttggatcccgggtccaaatttaggtattagagttctggtgaaggttggggttcgactctcgaacttaggtctgaggttgaggttaggatccaatttagagtttagatcataagtctaggtacaagttcgagtaatctatgttcttattagtagcttgtgttgtgatcagttctggtcgcggtcaaggtagctaggtttgggctccaaatcttggccgggtcagggaagtcgaggttggagtggggtggaggggtgtgattggatttagtatgacatatgatataaataaaaatatatattatatagttttttaattttcttaaaatcaatacaatacaatatcattgtacacaaagtatatactatattttaatctaaaatatattaatacaaatcaatacaaaagatgtattttataccactaaaattttttgtgtgagagaaggggtattatacgtttttcccaagaaaaagcaagcagagatataattgatgaataattaagacaggacgtaagatttttgttcgataattaatgcaatagggttaacactcacatatttgaacggcaaaaccaagtcaaaagtctgccactgttaatttggtcaaccaatgaaaatcatttctctcaaataatggttcccaatacctgatgttcaattccttttccccttgtatttgtttggtagtctcatctcccatatataactaatattatttcttcatatttaacaataaagggttctgaaaatcaaaacatataataaattaataatgatcaacatataatatataagcattaattaaaccctatacccttttcacactacccaataaggtaggtatgtagttaattaacatatatagaaaagcgaagaaaaaccttttttgcgtgtgtgttaattaactaaatactagatattattaagaaataattaatcttaataattaatttcctaggtattgaaatttaggtttatcagggtttttttttaatctaaaatctagcttcatcagttaaaactttttcaaaatgatcagacccttattatagcatgtagcaattaagattcattcttatagatttttactgatctaggagaagggtccagagacgtactacagatcatcatgtctctcttctctaaactctcttggtcttggccagtatttatttatttatctcaaaatcaaataggtgcacaatgagagaccatcccagctttaacttaaatgaagccattatcatccagttcatgtgttttatgaatttgaattaattaatacaacgtgtttgaggttgttgacaattatagcattaacattattcgtaatttcattttctatatgtaacattatattaatattcatgcctgtaaattaagtatatatatgcgtacgtgttcttgcttctcttccctagactttccgtacttaattttaagctcaaaattcatatgtgatcacattatacgtttagtgtagtgtaacaactttttctaatttattttttcaattaattaatggaacctatatataataatatctagtgtaaaggggagattaaaagtgcaaaagggatagaagaaaaagggaaacaatggcagctatataggtataggtagattgaggagaacagggacttgtgggggtaggtggaagcaataaacaaaagctttatgggaattgacaaatggaaagatggggtattgcactctcatcaatcctctctttaactcatctaaacattaattgttcacctccaaaagccaaacattcatttcatgggtttctagccaaaaatttaaaaattcgaaagcaaaaaaaaaaaacaattcatttcatagggaaactttaccaatggaaatggcttttaattataatccttttttataaatatataattcttaatttgaacacaaatatgatacatcttcgtaattatttaattcgatggaatcttttgaagtactcaaaaacttactttagaagaaataagacaacttctttttttgaactaatattacagtatttatttttctaatagatggggttcagtatagttgacacaaactcattccaagggaagtttctatatactatttaagtaagatctcacctaggaaggttgaactttgttttgtccatagatgagacactgagacaacaaagtattatatataattatttaataaaacacatgcattattttgtttaaatttatacaaacacatatgtacacacccttgaaacttataataaattaaatatgtatatatatgtacttttgtataataataatatcagcaatatgatgaagtaaaaagtcgtctagatgtaggtgccctttaatttcgatcgatctaaagtatctatattattatactgatcacataatttaaagtaaaaacaagcataatatattattgagtttattgggtaattctatagtaagggcgtatcgtatgctccaatcaggtctaagagcgtctttgttttgatactttaaaaaaaggaattgctataacttgtatatactacaattagtataattaaatatcaagtatcacataacttcttgagaaaataacttttaaaaaatatcgctaattgtgaagtgtcatccataaaatgtgttgggtaccattggtacccaatgctctttaaaaaattacaatacatataacttttttagagtaatttagatttttacatcctgaactttgacatgtattaaatcgtgctccctgcacttttcaaatcgttaaaaatttctcttagatttaaggatttttatctaatgtcattcaattttgctaatatgtcgattatccatgcaccaaattaccattctcctagaatgttgatatttacaaaatcatgtcctctgaactttaacatgtaccgaattgt

SEQ ID NO: 299198 - DNA, 4437 bp, Cannabis indica
acacactgcccgagtcacagagaagagagagaaacaaagaaacagaggaagaggaacaaaaattatggtgggaatggcctacgattgctttgccaaccctcttggggccgttcgatcgaccttcgacaaagccattgcttccggcgccgacccagcttccttcgccaacgctgactggggggctttagatgtcttccgccacttcctctctgatcagaatggcctctctcaggttcggattctcttcaactccggttgattttgttggagttagttatttatttggaaaccctaaattttagagtttcgaaatattgggtggaaattgttcagctatttcgtccttgaagcttgacctaaattttcagggtattgttcatggttatcttaatcttaagttttttttttttcttctcgtttatgatttgcaatgtgttaggtgccgattctgaatcacaaaaccataagtaggattcagcccaacactctggttcgattccgtggtatgatacaagacatgctggggaatgagttttacgtcggtgcttacaaggtatttatgctcttctattggttttttttttctgacgatccttttgagagttcagactagtgtagcttttaattttgtaataactaatttgtatgtttatttttaaaggatggctccgtgtggagaaccaacaagtttacggatgtttgtcaatctccaatgggttcttcttcagatatgcgaatttgggaacgacgcttggtctactgtgttccggtgagtcatacctctgtttctcaagctttgcccgtgaatttcaaagagccctaaaccatttttgaatttgattcggatatgtataaaccaaaaccatagcttgccttgccatgacttttttccttgtgttgtccttttatttcaggttccgggccagaattcatgggctgaatcgttttctgatgcaaacgtctataaaagcatggattgggcatctcctcaaagagagaagcgccctagattggacgaggaagctctggatagcatggatacacttgtaattccttagtcatttttatatgcatttactgttttgatttggatcatttcacaagttctggataacaaagtggataagtgtaggatagctgaaattagtgcagaatgttcattcagtgttgttttgttaggctccaaaatagaagtagctaagtgattcacacacataactttggaagtatgatttgcggaaatttgctgaatctagtcggcaaattgattttttcactgatatgttttgtgatcgtttatatagtttttttagttatgtattttatggaaatgtttcatttttctttcatgacaggactctgatgatgtgattgaaggttctagtaccaaaaagatggtaagtaaaaatgagtggaaccaggtttcatttgtttcttatttttatttttgcatctattttgagggatgttgagtttagggaagaaccaaaatagtgttaaaagtgattttatgtggtcgttcttcaagtttttgtttttaacattcattcattatcttttcatttgttagagagaagatggacatacttcacaggataatctacctcaagaattaattaagggcacctgctccagtgcaagtgttatacctaataacgagaaagactctcttccttgtcttgtcaaggtaatatttgcattattaattctcccaagctagttctgttacaactgaaaatgctcttatcttttcatatctgatggagcttttatttatattttagatatacgacacgctggagtctgacttaaagctaaatgaggtttttgagtttattggtgttatcacaccagatttagatggtatggtcgataaagttgagcatgatgacttcgaaaatggcttcagggaagatgatgcactagcgcatttacccaggagcaaggtattatctctattctctaccttctagaactttgtttttttattattattattatttcaatgttgctggaacctaattatttctctctatcttgtaactattgatatgaatctatttatgctattcaatttcccttctgacactagagggtagataggtacttccaagttagtatctaatgaatagttacacaatgttggtactgtgatttcctaaatttacttggcgagttgtatacaagcagcatgactaaaatgttcatttaaaacctgaactagctcccataattttgtttagttgtcttgccaacctcattttgcatttggttgcaggtaccgtacctacactgtttcattcatcggaagcttgctgttcaagactttctccagagttctcctactttggaggtgatttttttcccacttcattaaattttattataagaataagtttgggtagaacatacctgtaataagaattctagaaccttatgcatctttttccatcattaattcattgtgcagttttgtttaaagttgtactactgttttattgtgcagccaaagccccaggttatcaaagagataagggaagctctcttgaggcatctgacggatgttcttggcaatgatggcctatctgctcattttgtactaatgcatcttctgtcaaaagtaagcaatcctgtgcagtgttaactgtcatttttctgcttgttgcatttcatatttcatactttcctagattttcatttttataaatatattaactctgtcactatgagcacttttttgtctcactttaaccgtgtgcttatagttttacttgcttttcttgccaggttcattctagagacgacattgttactgtggggaatctttcgctaaatctcactggttttagcaaagaaaatgtttctgtgtttggcactcaacttagccttgcaataaagaacctcctacctttcactcattatatgccactaacagttgggtatctcaatactgcttctcttgctcccaagaaggattacgaggcaaataggtatatagatattactatttgtaaattatgattcaagttcacatgtagatttctactttattttgttggcagaagagttttcaacttttattttaagataatgctcacttcatatatttgctatgccaacattttttttccagactgataactgggagtctgcagctggctgagggctcacacttgatcattgatgagacccgattggatgcaggaaccctcaactatgttggggttgacaatgcaagattgcttaaacatttaatggtgatgcacaaggtgattttcatcctatcaaattttatatattatataatatatgtgaaactgagatgagcaggcttgtagatttctaatattttgcttcatgatttccttttttttctttttaaataaaattaaattttacatattaatgtaaccactaactatcatgaaactgatactaccttataatttgtatatcaggtggagtacgacttcaagtactacaaaatggacatggcagctgatatccagttgcttatattttcggaagggaaatcgaacatttgtcctgctgatttagttataccgttccagccttcttcagttgcttcttctcaagcatccacagaagcagtagaagcttggagatggtacttggctacagttagaacattggctcattctatagattcagaaatgcagagggtaagactgccttcattcatggtttcatttcaaaacttaaacacttttaattgaagcttccaagtacttaatatttattgtatacttttcaggtgatagaaaatgacttggttgaagcaaggcaagcagatcggagcttgggtagccaagattttagcaggttagaaaagtcccaagtttttaatatgcatgctactaatatcagtattatgaattgagtttactttatagctgtataaactctattgtggtcacagtttgctgacaatggcccgtctaatgtcgatgagttatggggaaacgtctctctctttagagcattggcagatggtgaaagagctagataggctgcgacgagagcggctcaagtgactgttctttcccaagtcccaattgatattttgctatctgtgtaaattataaattagattgatacaatgaatctcttttacttaacagggggtgctaattgagtttctgtttatttaatagtaaatacctttcgaaagctgcgggccaacacttagcctacttagttaattgatcgttttcgttcggtggttaatattcaatggaaaagttgataatttaaaggacaaatgtgtgaaataaggcaatttttttttcctaggctgatatattagtgatcttaccattgtggtgaatacatttcagaacacaatttcttgtcaatggggtttttttaattttaaactttaatttttttttttttttgtatttttatagaaattta

SEQ ID NO: 299199 - DNA, 2651 bp, Cannabis indica
gaaattagacaaaattctttaaactcacaatctcaatagttcaaggaaaatttttaacggccagagaagttcagaggtcatgatttggtacatgttaaagtttagggtgtaaaaatcctaagtagacttaaataaaagttttctaaagatcaaatcataacaatatttttgttaagtgatcaaatcataacaatgtcaaatctttttaataattaaaattttaaaaataataaattatattaatttaaaaaatttattgaaataattttttatttgttattaaattatatattataattttgttaaatattatttaacttctagagttattatattttatttacttttaaagttttaattttattaaatatttatttagcattattctttaattatgaaaaaattgaaaaataaataatttgttaaataaaattatagtttatttagtcctgtcctacaccaagcataatataatactaatataattcaatccaatttaattctgattaataattcactccaatttaacataccaaataataaaatattttaccactatactaaagtgtttaaattattattttgataataattaactcaaaatttaatttcattctcatatattttaagaccggtcccgaattaaagtcaagctaaactaattgggggtgtggaaccaaaaaaattaataaagtgttacaaatatcattgaagttgtgcattatttatttgaagatgaaaatgtgaaccatttcacaaagaaaaaaagcttgttgaagtgaaagaggtgatttctgattttgtaaaggtgaaaagtgtaaagtaatgcagctaatgttgccacaacaaaggatatcaatgtcaatttccagaaatcctgtcaaacaaataattataaaatcaaattatataaaataaatatattaaattaagtgatcataatggttcaattatagctagtaataataattatgttgattaatttgttatataaataaggggggttaatttatagagggagtgttactttcaatcttttattacaattttttagttattttttgtttttaaaaacacatgttggattattcttttttttcatggaggtgttcgttatagttacaacatcttttgtaaatttttgaaaaatttcgaattgtttacaatactgaaaataagtttaaagtttttgaacatagcaaaaactttatttttggtattataaactatttaaaaaattttaaaaatttataaagacgatattataattataacaaatgtcgttaaaaaatttaaaaaataatatatggtgtataatttcagaagtaaaaattgattaaaaaattataataaaatattgtaattgggtgtagaattacctgtggattggagatgagtattcccattacataacccattaaatccataattgattgaagagaattctgaactcctcccaccacacaacgatccctttcagctacaccatcctgtacctcttaaacaaattcattcattattcttattttatttataaaagtaaacataatttagggtaagtttagagttataccctggtaaagaaatatttcggtatactttctatctattcaatatttaagtagcgatttattggaatataattgtaataataataatagaaatagtaatgaaatgtaattgaataattaatatattgaccgtccttattttattttttgtcaattatatttggtaaagaggtaagagagagaagggtattaaagtcttttgtaatatattggtaatggtattcctcattcatgagtcatactcatgagaattcatacaagtagtgtaatactcattataatgtaaatggattataaatgttaaaaggctcaactaaatattgtaattataatctccattccattctaatttgattataccaaagcaagcatgctcttatatattagttactatttaggacatgtaatttttttgagaaaaattggatagtttataatggtaaaaataatgttcaaagatttgttgcacctataactatttttttaagcaactatttgaattttaatttcagtattgtaaactattcgtatgatttttttaaaaaattcacaaatgatcttgaattactacaacatgtaattatgtaaaaaaaaaataaaaagtttttctaaatgctgaaacaaataagagtgtaacgaaacagtatattaggagcaaatagtatagatttttttcaaataatgtgtgtatgttattggggtattaactcaagtcccacatgaaaagagcaaacaagagtttcttttaatataactgttccatctacttcgttgatttgaggcattttggaaaaatgtctaaaacaaaaccgcgaggatttagtcttaaaacagacaatataaagttaaattgaggtgacagctctacaaagtagaataaagaggtgtgacagtcagtagtcccgtgatccgtaaggagaaataccgggtaagctgtgcaatcccacaccgcctggggaaggtcaagtgggatgattcggagactgtgtaggtatgggactacacagttgaaaagggcttaaatggattgattggtactacctatatcaacaaggtgcatcttgtttttcggtagcccat

SEQ ID NO: 299200 - DNA, 2531 bp, Cannabis indica
atttttttgttctaatatttttttattaatataggagttaatccattacttttaaattagtattttgtaatataaattaaaggatcatttataagctttatcttcctacaagggtcaaagtgtgacctttgaccacccaagttatggatattaaatatctatcacgacctaaggctcgggtcgtgacagcaccaacacaacttttaggatatgaaactgaacagggtaaggcttggcatctaaaaaaaaactccttatagcctgtctcaaaccttgttcctcaaccccaaaaatagaagcctagtgcaagggaggcacactggttgcataagcataaaagagaaatgtttgccacctgctattaaatgtccaactttgcaagtgatacttctgcaatctattgtacaagttcttctgaaatctttcaaacaatctaacataaaatgaccaagcaaaaaaagcttgagtaaccgattggatgacaagatgtggcaagcttatgtagataagccacaactaacagtgacgagtgcaacttctttaaatgatagttgtatccaaattgtagagtgtaaagttagtggcaacatggagttatctcttaactccacctgactattcttgtccaaagctggttctctcagttttttgatcgttattctcaaattaatatttatagaaatttggtgccacagtccattctctcccactgacattgctggtgaatgtctctcacgtggaccaagtcgaagttttgtgcttgaatctgtccctggcagctaagaacttctacccaacttagagaagacaagttgagagcatctctatcacaagcggtgttcaaaggagagaagagcttcttctccgacggcgtctctagctattggttcttctccagcactatatcccacaaatctttcctcttaggcagtgacaacaacgtctcttccttctccagctccggtgcacaccgacaatgctccgatgacattttttttcgggcctcattgtggtgtatggctgggaaagtacacattactatgctgtaatcttttatatttttttcttcacctctaacgattctatccatcataaggctcatctcctgaaagcacgacacaatctcaagttgtaaagaccgcttaacgtggatatggtggaatattaaataattaagatttaattatgaaattaagttattaatcatgatttacgcatttgtggtgatttatttaaatttagaatgtgttaattattctatatatgtgaatttcttgttttttgtgtttttgtccggtagcagtgaaacgcaacgttgggtggttagagaatcacattttcatatgatttagaattttattgatagcgggacatcattgttaggcattgaaaacattgagaaattgtcggggtttggaaatgaccaaattacctttagatgtcattaagctttttgtaaatgttaaggggcatattagtttttttactatgggatttttgtcttttgtggacattaatattcagatttaataaacaaatttgattaattgatattagattaacataaccttagaaaaacctataatttctctacaactctctttctctttcgaatcaccaagaaccaacatgaaagagaaggattttcagctgcaattctagggattatagaaggatttaggtgtttcaatctaaggtataccattatagcatatctattccttgttttcttaagttttagttgagttgcattaattttgggtgttagggtgctatagtgtcaattgatgtttggacttgtgtttagaggttaaattgaggttatttaggttgaattgtgctagtattgttggttgtgggaatgcttgagcaaggtttgagtttgaaaactcaaactttgctctctaattgtgttttggatttttgagtgaattgttgaggtttattgcttgttttaagtttattatggtatatgcaatctggaagttgttgtgagatttggggttaaattgagaagttgggcgtgattttggtggatcctgcactgagccggaattctagttaaggggggacctgtaggaaccggtccaccggttggtcccaaggaaaccccaccgaaccggaatttcagttggggaaccggcctactagttgggacaattttgtgaactatagttttttctgtttttgttatatttagggcattaccatgttattcatcgataaggaaatcttgagtttaattttaagtctccgaaaagtgttttagcatgtctctcataagaactacggatattgtgatatagggccctataaagcgtcgagctgctgtcccactcaggctaaccgacacacttgagcacggaaacgaggtaagattagcataaaaatatatgtgaatgtatgaatgcatgttattactgtttacagtactaacactagaatagttgtagtactaagtgtgctagtacaattgtaatacccggtaaaaatatacatatattttaaattttatttgttatacaatttgt

SEQ ID NO: 299201 - DNA, 3142 bp, Cannabis indica
atttatttgtaactaaaaattaaaatttatattaattctagtttaccaccaccaccacgccaactcattaaatattcaattttttaaatttccatttttacttttaatttttcttttctatttttgttgtgttgatttggctattgtaaataagtttgaccttttctgctcagagaatctctactgcgaagttcagtacaggtttctttttaatttaagttcaacaacgtaaaagttctgccatcttcaaagtttgtccaattcaatattgaaatcttttcaaagttttcatcgaaaatccagcttagacttcccaaccgcccaaagtaacacctgtcatattacaaaatcaattaattattaaataattgacagccaaactaaccaacgaaataataaattataatgaaaagaatatacctggcataaacagaaatggtaacgttggtacgtaacggacaaatcaacgccacacacacgtaacggaacggtgataaagcgtaacggccaacggaaacgtcaacacgttacgacgatgatgttaacggaatacacattggaaacatcccaatggcggtaattgaagcattgctcatctgatcagatcggagaaatgagtctctcttaccaagttctggattaaattcattacaataataataataataatggagtttaatttgattttagtttttctttttttttcaatttttttttgttgttgttatggtattgattgctagtgcagaattatgtcccgatcgaaaatgtgtgcttctatagcaaatcatatatacaaagggagttctctttcactcgagtcatgtcatgtcgcaataaaattctagggtttttgagatctccaacaaaaactctatccaatcgaatcagcaacctccttcaatcataatcgccagagctgaccaagtctctgccgcagaatccaacgactcacacattgcaactcaataaaatacacgccggattcggacatatttatcagccggaatctgagatgagaaaagtacaatactgaccagaaaatgaaccaacctgcgggaaaccaaatcagagatcatccgccttggacatgatcaaaagacgacttcgagtaggccgaaatcccgctcgcctcctctgctgatgtgaagaaggtcggatcaacgcggttaaagctcgcttcacccattcgccttcaacgccaccgattcgaaccagcgagttcgtcatagccgatctgcgcatgttgagacgattagaaggataaggcaccgtactttgatttcaccaccattgtttagattcttgtgaaggctgaacggaatgatccaggatgattagttggagagcacatacaagtcttcttcgtcagagaaactggacggctttgcttggatacggagatggatcgattaggagagatcgaacggtactggtcaatggagaagctaacggacgaagatcgagaagctgagttgttgtaattaatgttgactcgagttggagaggacggacggtgatgatctttctggaagaagctggaagctgaagggtagaagctgaaacttgaagaagaagcaaaagaagaagacgaagatgattgtgaagaattggatggcggggagtagaaacgaccgcagggtgagagcgagcgcaacactggtccactcgacctggtttttctagaagaagaataagacgtcgacattgatgagaggtaagagagagaaaaagagagaaagaaaggagaagaagaagaagaagaatttccctaaagggccccctcggggattggtttggcaaacctaatgagtctccaaggcggaatttatagatggagaaaacaaggggcagatggtaattattcagacgtctatgggctattaattaaatttaagagagataatccatggtgacacatgtttaaactattcttgtttggatggttagattagcaaaataataataatttataagagtatttgcggccaaatctctttaatatttataattgttacacatataattataataaaaaaaaaatagcggcaaaaatattttattttacgattttattgtagtcgtaccatttatttgtcattaagtgtcaactcaaaaacacttggcgacatattattagactacatattaagggctcacttggtacgccgtattgtaatgtattgtattgtattgtgttagattgtgttgtattgtattatattatattagtattatttaacacaatacaatgtttgatattgacttatattcattgattgtgtaaagttataatatatatttttaatacactcaatcctaacaccaactacgtgtcccgggtctgggtccaggatcccgggtccgggttcgagtcccagggccaggtccgggcccatgcccggggtcggggtcggggtcggggtcgaggttcggggttcggggtccaggcccgggcccgggtccggggtctggggtctgactacaagagaaacaaaccacaaaccccatcaccagcatgactccggcgacctctctccggccatcgtctgaccccatgtgtcagaccattcaaatcccaaggtgtcgacgacctcaaccccaaccggcaccgcccctttcgccaccattagctcaggatcgcaagtcaaagtttggaggttcaaattttcaacggatttttcagccacctccggcgtccgtttgatgagtcatcttcaccattagactcagctcatcgaggagaacaacctacactaagccatttcgccaaactcactactttttttcggtgacgtttttgtagctctgcctctttccggtgatatcatgtactgttttgacaaatggttggcatggatgtgatctactcgtcgaggtggtcattttgatatacactactcctatttttagtgacatttccggtacaccaatttttaccgccaccgatagttaatgtgcaccgcttaagtgagggttcgaaactccaaattttaaatatagtcatattatatgtcattggactcaattttgaaagtagaatgcaatgatgataattatttagccatttgatggtacaagtgagagtaatatctaagattggactaaataattagagttttgggacttgagagcttaagat

SEQ ID NO: 299202 - DNA, 1617 bp, Cannabis indica
tttgtactattttagaaaatacaggatctattttatcatttaacaaaatacaagatccaattaataatttttgtaaaacaggatatttacccttaataaaccaaatgatcaagtttttgagtacaataaacatgtttcaattttcttcggtttctcataaatgggcagttgaataaggatcgaataggaggtaagtgagtggggtgcctaaaaggaacctaattgtccattttgaattgaatatagttagagaatatacctatatatattttatatttctttctttcccaaattgatcgagtgagtcgcatcttatcctacaatgcattgactcgcagagtatcattactaatatactatcgctagctactgtattattcctattgaaaaatacatcaaataaattaataaaaaaaatactgaaaattgacgtaaagagagtttaaaagagaaagggaacccattcttctcatcatgatgatattactcgtcttcgtcgtcgtcccattaccattagttataccatatatatcttaatccaaacgcgttcccattatatatacaaatcccagatctgcaaacgcgggtgataatcacgtgcgacacgtatggtctcacgtgtccgaaccgcggcatcgccacaagctacgtgttaaaacctcacactgattcctttaatatatattgaattattcaatctcattccattcatttcaattcaggaaaagtcaaaagaagaagaaaaaagaaatctctttgtttttttgtttgtgtccgaagaagaggaaaaacgatgtcgttcttggagaaggctaaggcgtttatggcagagaaggtggcggcgcacgtgaagaccccggaggcgagtgttacggatgtggatctcaagcacgttagcctaaactccgtcgagtacctggccaagatcactgtcgataacccctacggtgtcgacatacctatctgtgacattgcctatctcctcagaagtgctggaaggtacgttcgacacttattaatttaattttatagatctgtaaaaacatattcttaattttcaatcgaagatctctttcttgatttactttgctccaagcttaaactcttttgtagttcaataatcgatcgatttaacattttaattatgtgtataatatgaatgttattaggacctcttttgagatcaatcgtagagtcagcgattaatttgtttgttttgatagatttaattaattaaattaattttgaaatgaaaaacagagagatagcatctggtacaattccagacccagggtcgctaaagggacatgacaggacattactagaagtacaaatgaaggtggctcacagcttactggtgagcttggctaaggacattggtgccgattgggacattgattatgagcttgagattggtctcaccattgatcttcctgtaatcggtaacatcacccttcctctggagaggaaaggtgagatcaagctccccactctctccgatgtcttctaattattaattcatgaatgtgtgcattttatcaattaagccacatcatcatctcaaaataaaataaattttcttagctaatttcatgtttatacatgtattattaatat

SEQ ID NO: 299203 - DNA, 4097 bp, Cannabis indica
cttaagccatgcttacacttttcacaacctaaaaaattagtagaaagaaataaatgttttacctttagataagggaaaagactaaaactttcgcagaagacacataagaaaccaataaaaaaatttaataaaatcgaatcaaaaaaaataaaattaatgaacagcagacatatgatacgaccaaaagaagaaacaaaaatcaaagtacaaacccccaaaaaaacgaaaacaagagcaagaaggttcggtattaaagcttttgattatgaatagacaacgtaccaatgatgagaattgacagaatcacatatatctatgttcatagtccaatcaggacttatcagaagatcgctggtcgccttctctacagctactgtagctgaagacgacgaagacgatgatgatgaagacgccatcggcaacatctctctttttcgatacaactgaaactttttctctgtattcaaccaaaaattaaacgtacaaaccgattgaaatcccccaactccttagtttcgcggaaaatacacgcgcgccattactgtgtgtgtctgtttggatggaaggaaaattccgaaaccctagaaatgaaaaagaaaattaaacaaggaattttcttcctttctttctttctttctttttttctcttaataataatataaaaataaataaatattattattattattaataatttattttttcaaaaaatattaaaattttaattattattagcgaaaatttcgttatttgctttgtttggctttagtttcgattttcgtcttatgactctctatccatttatgaaaagtgtctcttttagtattctctttatgcgtgacctacacgcgcccagagatgaactcgatgactcacgtataagagcgagtaggttgcggtgctcaagtttagcgcgtggaaaagtctgtttcctcttttctcacgcttttcggttactttttttttttaattaaaaaagaaatatttgtttatattttacttttataaattattgttttatgtgtcctagaataatatcgatgttttatatgctatgtttaatttaaatttatatagattaataatagttatgttttaaatttttttggataaattattgttaagtagttaagtattattttttattaatatattttaattaattattaaaataaaaaaaattaattagaagttgtaattatttaaatttaaatttaaatatatttaatatttatgtcgcatattactcattttaattatttttaactttatttttttagacaattaaattaatttttttttttttttttttgaaatggacattgagatagattgacaacataagaaattatgtttgggaaatttaaaagaaattataataatgtattttgagtaggatattatatttaataaccactaaagttttaattaaaatagttagggattagaattaagatagagaggaatgataatgtgacagctgtgagttggagttttgtatgacggtggtgatgatagtgaatagaagaccaactataaaatattatttatgagtggaatacggttggaaatgaggtccattttcacaaaattattattaacatcttatgttttaaaataattgtgtacttaataattaattaggtagctaagatagtaattacaagtgaggggaattatactattttaaaatataatatatatttaaatgtcaaatagtaattgtatatgtattttatttttggtgtttagtaaataagttagtaattacataatttaataatattaagtatttaaaaatagtgttgtgggtgatttaatcggtcaggaatgatatggtttggcactagcaaagaaagagtgcgttggatgttgagtttactgattttagttttggttaatgggttaaagcttaaggtagagaaaatattcttctgttgcgtccgctagcgacaggtgacgaaaaagagttttggacgaaaccagtttcaggcatcaaaataaacatcgatgtgactatatttgaagaagaaaggaagtttgtattggctttatcgtttgggacatggctgggaagttggtagtagctcaagctcagtgtaaagtaaggagggtagaattggtgttagctgaagtcttggttgttaaagagactttgagttggctaaaatcgggtaaatattcctcaaccacggtaagaaccgatagcttggtggtggtggagtctatacgaagctctttgtcgataggctctccgtttgggttgattattgaggattgcaaggggttattgcgtttacttcgtaatgtttctttattttttgttaagtaatctacaaattgagctggacattttgccaaaaactctcgttagttagttgatcgtatgttgacaaagaattgtgatcctttagatttattgtctattcttttgagtgattgcttcgtttaatgaaggtgaatttaatttaaaaaaaattatctaaaaaatggtaatattgtataattacacagtataattacactcaattctcatgagatcgtcaacattagagagtacaattgaaactccttaattacctcaaactacatagttacggtgtaattacatgcttgaacaaacacggaaaatctcgtaattattctgaatacactcaactccaattacacaataacttttcaaacgcgccctagatatgaggtggtaattacttatgaaatcacaatatcttgtttgacaaaatagttagtaacactcaattctcacggggtatgagaattgaagtgtaattaaggcctctcaattacctctaattacacagttacgtagtcagataaacatacaaaattgtgtacttacttttaattacacctgattccaattctctctcgactttccaaacgtccttaagttgttgctagtcattcttctgcatgaaactcatttggggagaaacacttaagaatgcaacataaatcctgaataaagtatcaagtagagtattagttaaaactctttgtgaactatgattgtggttagactagtagtctaacataagaattgttactaatatttcgagcagtaatatagtcataacacgtgtaaggaggctggaaaacgaatcagctcgaatagtgaagaaatgaatatgttcaataattcgtctcgaaaaaaacagatgatagacgtatctaagtctctccttaagccattaaggataaattatgaatactaactaccatttggtaagaccaacgagatgaacaaccaacagaaaataagttcatctcaggatacataaagtaaaggaaaaataaaataagtatagaatatataggagcaagtcgctaaaaatggtagataataaattttttaagagcttgcaacttattgatccatatactcgtgagtatattgaaagactaagagatatgagtaaaatgctattcagctcaagatattcatgaagaacacgagaagagaagatctcgcgaagcatgcttagtcagtcctaacatttatggaaagacgcgagaagcattttggatatgatatctcagtaaaaaaaaaattgccttcaagataagcacaaaaaaccggttgtctgtatatgctgcgaggcatagaaacttagtcaacataacaattttgaataaagacaaaatcaattatagcagttatctatttattccatgtcttgtaaatatgaaacatgaaaattttgcatgtttcatgaacgattatgaggataagatcaaaaagaaataactatcatccccaaatacttataaataggggaagaattcccaaattggaggatgaccaaattaagaatcttaagagaagataaaagaatattgtattattaacaccctgtaaactcatcaaatcacaagaataagatagactcgtggtatgatagtcagtaatcccgtgatccgtaaggaaaaatactgggtaagcttgaaatcccacattgcctgggaaatatcaagtgtgatgattctgagattgtgcaggcatgagactacacagttaaagagggcttaaatggattgattggtgatacacatatcaacaaggtgcatcttgtttt

SEQ ID NO: 299204 - DNA, 4837 bp, Cannabis indica
gggcctaacccgcctatgcctagagccggcccttatggcctcgactatattagcaaataatcaaagccataaggagctcttttgcctttgattttcttcgaccctttccgatttgcctgaaatgcttacaattttcttaaaaccagatctaaacgtaccacccaaataaccgaagctaaaggaggcttttgtagtagaattaatttttaaaaaataaaaaatctatcattatacataaatttacatcgatccaataaattccaactaacattatataattgttcaaaaaaaaaaaactacaatatataaaaataattaagataaaactaagtaaatttacatcacacttttgttttcaccttaacttacaattctaaaattttctaaaacaagtatctcaaatctttcataaaaactaaaattaatatctacacaatattccaaatccccttatatttaatttaaaaaaataaaaaaaataaatccttccaatgaaaaaattacttaacacattattaaaatcacttaattagagaaataacgaaacaaaaaaacaaaaaaagaaccctaacaataaagatgccatctgtaatttgtatcaatattttatttacataataacaaacaaaataagtatagggatacgacttggcaaagagtgaaagaagttcgaaacttctaatctcctatagaccagggtactatatatataatactaatttacttggtcatttcttgttccacctcacttatgcgttattgattattcttgatcaaagaacctcactcacactcacaccaaaacaaccccattcaccaccataatcatcatctaataaactctcattattatcatcatcatcatcatcaccaaatcatatcactaattacttattatgacaataaaaggaggaacaacacaagcatgtgctgcatgcaaataccaaagaagaaagtgttcaagagaatgtcccttggctccttacttcccatcagatcagccacaaagattccaacacgctcatcgattatttggggttcgaaacatactcaacatcttgaaactcgtcaccccttttcagagacaagatgcaatgacttcaatcatttacgaatctgatatgagaaagaagttccctgttcatggttgtgttggtataatcaatcttcttcaatctcagattgaacagagccaagaagagattcatgaaattcattccaaactcttcttcctcagacaaccagcaacaccaacaacaacaacagatcatagctactgctgttgctgctgattctaatgatcataatgctgttcttgatcaattccaacgcgttcaaatcgatcataataatgatacagtaatgcctcatggtgcttatttttctaattatgattttcttgctgagggaaatgatgatgatggtgcaaatcttgatcatcatcaagatcttggtcataataataaggaaataattatgaagatacataatcaagaagatcatgctaatttgattgatatgaatgaaatagctcctcatcctcagcaactcagacagactctgtttttttctccacaagatcatcatcaacaacaacaacaacaacaacatcaacatcataatcatggtgattatcaagaagtggtggatctttgttatgaggatcagtgtactgcggcgtttgataccattgttgatgatcgtcaatcttttatcgaatcaaaggacccttgtgagtcaaggtaaatataattataaatctctctgttttctctgttttttttttaatttttaattagaagtaaattttgttaaatttgtagtgcggagtcatcaatgaagcatgggacacagaataataatatgaaaaacgagcatcagtactgagtaatttgtaatgaaaaaaagaccatatttttattggttttggtctagtgatcttcctcaacttttagcctacgtacgttataattccataattacagtcgactttcacatatacatatacatatatatatgatgtactctctttttggaaattttggtagctatatcagtcatgatgagagtatatatgtatgtatgtatgtcttttttggtggggtttgatcgactgtaataattagttatagggagacaattttgttttgtttttgatttctgggacatctttgattttttcgtattgtttaggttgttttccttttttttttttctgctttgcttgaataataatacacataaaatagccctagcgtatatatgatgttgttgttctgaagaaatgctgaagagaattattggtgtcaaacaaatttataacaaatcaatttaaattgagatcatatatgaaacttgcgacgaaattatttgtatcaatatatcatgttgttgagtgttacactgtaaatactttaattttaactttgagttgttgataaatattaagttgaatttttaacgtaataatctctaagctataatatactttattaaatttaaatatttatctttaattaaaaattaaatgtaaatatttataaaacaaattactcttgctctctgaatatatattttacgtaagttttagtatatttgctcaaatctaattaatgccaattaaactgagatgttatgcatgattgaacgttagtatatattattcatattttcatatggaaaaatactaaggtgtcaaacttaacactaagagatgagatgacattattattaatatatttaaatattgcccacatttttatgaaattctttaattatcagtaaaataattttataaaaaaaatttattaacaaaataattttatataattgaaaaaaaaaactataaattatattgtaaagctataaacgatcattataatcgatcgtaaaactatcataaattttgattattgtagtcacataaaataaattaaataaagttattttgtaaattttagtatttcattattaatttagcaaattactcacaatttttatagtgtatatggtcaagtttagcttagagaatgatttattattatgtatatggaagaaatgtcacatagttaattgtagatatcctatatatggttatgaagattacaagttatttgatcttgtagtaattacttattattattattattattattattggaaaggacttctaattgtttcaaattctttatttgtcaattaagttctttcaaaaaagtaataagttattgatcgttatgttaatacatgatttttttttaagttataataaaagaaatacatagaaaatctaataaattataaacttctctcattgtttagattttctttttacttgagttagctttaatatatgtgtttatattagacttgaggtttttgttacatctatttcttcataattaatgttctttttttcttgtttcttcaagaggatgagacttgtgaatgcatgaaaagaatagcactaatttactttcaaaatttaattttttaagtttgtaattttggttgataaatttcaatttaaaattatgagttgtttttaataaaagaatatgattggaacacaggtactttttatatacctaacttatattggattagttataaataatgttatcaacaataattagttatgacgtgagacaagtggttagatgcttctgttgacatccttttaaaaaatcaaattaaataaagattattacatttgtcattacaaatatatattttccattatttatttcataatattatatcaaattaaaattatttttgacttggcctttttatatttttaggaaggaaatgacgtggtgtcatttcaaattaaccgtcacgtagagaaatgtaacagtaatatagttatataaatagtagaatctttatttcaattacattttagaaaaaatgtaacagtaatattcttttgaagtttattgtaatttgaattaataatttgttcaatttcaagtgtaatttttttcaccatttcaaaaaaaatgtaagtacattttaaaaaaaaaaagtaaattttcgaaaacgtgaaagagaaagaaatatctagcttaattaaatagtattgacaatgatattataataaataatttttttgaattaataattattgtggacattgttccacatggaataaatggtaaagaattgagccatatataaaaacatgggctactccactcattggaaattgattttgagatggaccccatgattctcaacaataataaataaaaaaatttagcttgtaggattttgccaccttaaattgttttttttttttttataaagttccttcaaattaattatggaaataattgtaaatttttcattgggtttgcatgtcatttatttttttgagacaatttattaattaatgtaactatgatacatgtataattacaataggagagtctatttaattaacttaagttaactataacaaagtatatggctttataattctaaattttattgttagaatactatctagagtatattatttggaacgaactttttaattagcactacacgaaattaccacaaagcatgacactacataaaaaaatatgaactcaagcttggaacaacacaaaaatgtatagattttcgtaacggtatttgcggtgtggatggtgcgagttgtaatattattttcaaatcaatccgcgcatatatgtaatttttgtaatttctcaaactgcaaccgcaccatcgagatcttaaaactacaaaaatgtggtgtggtacagtttgaacggtttatactgtattatcattataataaaaatttaaaaatcaatctaataaagtttta

SEQ ID NO: 299205 - DNA, 5088 bp, Cannabis indica
gagtatttgtttatttatttttggattaacagaaagtatcgtaatatttatttatctttattatttttttttttaaaaaaaaagaaattaagtttgttagaatttcacattgttcatgtgatcagtatgtatagtactctccactcttgaaggagaagactcccattcatatatatccaaaaaaataataataaaaaaaagccttccaataaaaaataattatatttgtcatgacaccatatgtataacatatattaattatattggattttctacctacattaaaaatatatataattaacttaatatttaccttatcaaatttcttgaggatttttacaaaagcaaccatgttcaaggtgctgccaaaacaatatcaatgaatttaattaggtaataattaataatatgaaattaagataggtaattaattagaaaagttataatataattatatatataaatatgtatacctgtaagtcttgagcaaaccaaggcctctatagagctcaacaaaagctcctctaatcatcttctcagcacactgaatcttcttcctattgatgtactctccatgcccttccttcttaggattgttgactagatcttcccaaagcattgaagttagggctgagattgttcgagtgggtgttgtgactggaatatctatcctcatcgccatttttggctttcctttcttggttttggtccttgttcctaagttggtgaaatttataccattcttctcaagacttgctatggcttctgttgtttctgatatgtctattctactttcactattattactattattcattcttccaattccctcgttatcattttcactctctgcatatattaataattaatttatgattaattaattataatgtaatgattattaggtggtgtacgtacgtatacgtatagcacaattaatctacctacatctatgtgtagctgacaaattaaatcactatcaacatatatacatattaaattacaaaacccaattgtaagtgtgaaatagagagaaatatatatatatagtatctttcttactaaacacatatactcaacaacttaattgaactcatcaaaaaataagacaactataaacagtatataataactacttaattgatttttgaggtggggacactttgaatatgtatttatcgatccttgatttatgtatatacataatgcataaatttatatagaaatatagatatatataggcagatatataatctctgaattataaaacacataagatgtaaacatatatatagagagggagtttttgtcggtatagattaatcattggttttaagctgtccaatattgactatattgtaaagataattaagcctcaaaaaaagtttccatatgtttctataatatatatataaatatatatatatatatataccgacaccgacctcatataattacgtacaactcttttttctttttcttttgaccgataaaatataatttgtatacctatctttcggccggtaatattaatttgactcatttacaaagtattgttttgttgcttaatattaatatttggctatatatatatatagatacctaagttttattaaaaaacacattaattaaataaataaatatactactctatgaaatgtttttattattactttaattcgtacataacttacagtatgtcttacttatttaaaaaacattgcatatattattgacaaccaaatttaataagcatgactttctacgtacttaatctcaaggtcaaccgccgtaatcaaaattcaaacactccaatgttttttttttaaaagaaaaaaaatattgtaaacaataatatctcgctaattaattaagaaccaattaatcagtaatcctaagaaattaaaatattatagtttatataatattcatggatttcattaataatagtgaaatagaaatatttaatactttcttttaaaaaaataagaaatatgtaatactaaaaagaaaaagatatatagttaattaattaaataattaccggtgtaatcggaggtccggggagaagatgaccaagaggagggaggatttgccgagccgagcttggcggggccggacaaatttttacggcggcggtctttgagaattagtttgaggtcaaccaaaatctgaagttgtttgttaagaatatctcctctctccgcaaactcatcttcttttgtcacataaaattggttcactttgttaagctcttcatctaatttctcgaaaaatgtcttcacctacaaaataacatataattttattttattaaatatatttttatagaatcattacatagtaattaattttatgtactatgtatacatacctcatcttcttgagagaataattgagcaagctcagtttcataaatctcttgatcctcttcaccatccaagcatttacgcttcacctagtgagtgtcacacatcatcatcatcaattaattaattaattgataatacatttattttatttagaaatacaaataatatataaaaataagtattgctattcagcacgtctaatactcgatgtttaattatactaataataatattaacacgtatataagagagtgctagatatcattagtagtgcctttaaacatttcttttttatatttttaccttttggaatatttgatttcttaatatatgataatgttttgttttgtggtatagtatgttattatttatttttattattaatataatatatttgataatgtcacgatgagttcgtgtacaaaccgtttcctttttcgtatatggtatttcgtgagagaataacaaaaccttccaaagttattataaataataaaaagaaaaacaatttttatatattaaaaggaacaaaagcagcatttgataatgattcagacaaattgcaaaaaagaaaggacaaggaaaaaagaaaacaaaaaagtctttaattaattaattcatatatatagtgacaaactccaactgtccattcacaaatgaatgaccccatttttagatgctttgtctaatacctcctaatattaatgaatcaaatcataataataataataacaaaatatatttactagatttttttaactatgcttttaaaatattctcactttctatatacgtttataattaaaaaacaactttatatattggtcacatggaatggccataagtaagtactaattaaacattttacgccatggttgtatgttattaattaggatgatatacatgtatattatttgtgaatttagtatatgatattatgatgatgagatatatatatataaatgggatccacgcatatacacacacggtcatatataaatatatattcaattcaaaacattcacggcacacaaaacaaatagtatatagttgtggatctaatctaacccccaattaataaaggtggcaactttaattaattgggaccccttaggtaaaggccggtaattagcctaaccatataccataattcatagtaataaaaataaaaaaaacaaattaattatgggttgggttgggtacctacaaaactcacttggacataatttcatgatcatgaatatatgcttataaagagaaacagacttgtacgtaagcataaccccactcaaatcaaaattaaactaaacaattaatacatatattactataacttaattagctacttaactagctagaactagaaggggttttatgtatataactacttataaagttcccttttattttaccagaaattgacgtcataaatatgtaaacatagatattttagaaaaatctgaaactcgtgaccactgccacctatatatattcatgcatagttttttcataattaattgttaaaaaaattaagaaattgttaattgttgggtttagaaaactacatttaatataattatatatttaaatacatagctttaatttgaatcagattacactaaaatataagtggtgtgctctgtactcgccggagaatcagaattagaaacggatgagtaattaataaataaaattaaatccaaaagaagaagtaaaaatataattaattaattaattatgattgcgtacgtacctgaatcaagtcagttttatggtgttcagaattatagacgttattagctgatgaaactaatttgttggtgagaaatcgaatggggtcgaaaatggatcgaccaaaatagtaattactattgttgttatgatcatcatggcactcattaatattaatattcttttgagttgattttagaaccttaatcttcttcacttgcttcttcagatgccaataatttacaaaagcttccctccattctggtattagctgagcttcaagctcttttgagaacttaaccattcttaattaattaataacaacaaattaaattaatttgttatatattattaattaagaacgattatttgaaagccaaaagccaaaaggcaaaggccagagagagagagagagagagggaactaataaggagatagaaagatatggagcttaccaaagggactcccaacctttatatttatacacctacccacctacaccacacacacctcttatattattaatttatatataaaaagaaaaacaaaaacaaaacaaaacaaattcaatttatatttttttatttttattttcttataaagtataaggaagcaataagaagaattaaagaaagaaaaaccggaatgagaattgctatttcacatcttaaggtctccaattacacgcgtatagtaatattttataattggcaattaatttcttatatcatttattaaagtataaataacggccataagtacttaaagttttgagtttgtaagtgtcacaaactcaatgtttattttagcagcattagtacctaatatttttttaatttcgtcaatacaaactctgttactatcttaaataggacacacaaaaacatgtagtatatcagtttgtaacgtcctcgcttcaagcctccattgggtccttacacccacagaatgaatgactcttatacacgagtacgtcactttggct

SEQ ID NO: 299206 - DNA, 2396 bp, Cannabis indica
aatactcttattaatttttgttatttgtatattattttttttcttcttaatagatggtttattaacattcatttagcattaataagttactttaatacacttcttttaataacaatattactactatgttttttaaaagtatatatttaatttattcattttcattaatgataattactttttatcacaatttacatcttaatatgttattatgtgttgacaacaagaactcatccactaaattatggctacaaaattaatttagaaattaaagtttaaatgataaactataataaaaatttaaaaaagatgatgaagtgctactgttatattcatttttgaatatggattataatgaatgatttttcaaccctttttttccatggaggagggtcctatttatagtggcactatttgccctaatatatatatggtcacaagcgtttgaaccacttgtaggttgcacccttcaatgttattgtcaagtattggcatctcgccttcctagatacccttttgtattttcattaactcattgaaagcgtcgaggtggtattttgagtccgtcgtcttatcgtatggcaatacatttgattctttgaagttggatgggggcggttcggtttggatttctctggagaatggtgactctgtatcaaactcgtcattatcccaattacactcctcggatgtggctgatgctattctcatgcgtaggtcctccatttctttgtctagttgcttcttcttcatgttgagtttctcctagaggtcctacgatacggaccctagtttccccggtcttccgagatgccattagaggattttgctcccctgcaacgcgtttcacattgagtttctcccattggtcaggcatgactccttttgtcaaggtttttggaagcagggcaaagcaactcgaccctccacgaatcttgtactatggtgcagatcgtggtgcaccgcttgccaaggatttaaaggtttctttggcttctatcgtttcgttttaaattaccttagtcctacacttgtgtagggggcatcgaagtgcccttgcaataagtcatttagtacctcttgtatgtttgccataatctcttttaacctctggttttcatcttcaagccattcatctgctccataaaagagcgagtttgcgaactagaactcacgaagtacatctgtatttcttttataaccagctcttgtgggacccgtgttgcggggtatcttatgggtgacgaatattttgtggttattggttaacctcgacgagaagggttattaatgtggtggtcccatctcgttcgtccatgccttctcctgttataggagctcaattttcttctctggtggctggaggtacgtgcattccttttgtaggcagctcttgttatccttgattgtgtccattaacgctaatctcgcctccattaccttcttcatgatgattctcgccatgtccttcgttcgggttggcttcaccttaggttactctggcagctggagttgtggggctccctctcattaccatcaattgattgttatctaggtggatctcaatgtcttatacccgccttgaacatcttggcatggcaaaatgttgatggataacccttcaagagaaaaatgcagttgtagctctttctttcccacagactgcgccaaactattgacagtaagaacttgtcaactaagttatggttaaaaaatcaacttagaaatcaaggtttgaatggtaaactataatgaaaacttagaaaagatgatgaagtgctactgttgtattggtttctgaatatggattacaaagaatgattttccaatctcttttctcatggaggagggtcatatttatagtgacaccatttgccctagtatacatgtggtcccaaaagcataaaacataccccgacttgtacccaaggaattaacattgcaggtgggtagtggaggtagtggtggtcacgtgtcagttcgaactgacacctacggatttggtctccactacccttccaacgcccactacttgcttagagcttgcagtagtctgcaggcttttaggctggtcccccacacatacgtggtatgggatatcttttgtcttgcatcttcatgccttgtatcctaaagtttgctatgtataagagtatagggacctcgtcatatgtcccttggtgagtagataatagcaagagacaaggctcttcttgattcaccctctcttattgttacgtattgaacaagagcctttattcaacgaaggtcttcatgtgacaggatctctcgtgtgaatgaggtcatgtgtgcgataggaagactccctccttgggtcaggatgtgaggagagaccccctgtaacaccctaactaacataggcgtattacgtgatt

SEQ ID NO: 299207 - DNA, 1135 bp, Cannabis indica
ttttatctttttctataatatttttactcttcctttaccgctcttcatccacacacatctccttctactcctaccaaaacaaatttacaaataagttattatttccaattaataattgtgccacgtgtcaagttattataagagacttttttgatggtcaataaaaagggcagatgattaatgcacatacacacatcatagggtgagaaagaaagagagcattcacactaacacagtagctagtacatttatgtagcaaagaagagacagcaaataaaacaaacatcatctccaaccataccctttcaatatacttttttagctaactatatatacaaatttaatgtgaattattgttggaaatatctaatattttatgcatttttatcacattaattcttattattttgttatgtgagagcataataaggtagctcattacttagtaaaatttaatgtataggatatttttttttattaaccatggatacttttaatctttgtattgctcaacttaggtgaggatgcttcacttggttgatgagaattcccttttttaaaaaaaacaaaaaatatataaattttcttaaaataatcaattttaaccaaatagatagtatcattgggataaatatctatctatctatcctatcattttacttaattttgccaaaaataaagagtgactttggtggttggtgatgctctttaacaaatttacaacaagttcttatttatttaattttcttaagtgattaatattttgtaaatagttagcgatattttataataattattaaattataaattattattattggaacacattgtaattggttaacaatattcttttaaagagcattgttattgagcagcacttagtatattttttaaaatttattttctaaagttatatgagacccgatacagacccgatacttaattacaatatcacacttaagagggtactaaacacttgtaatactttttagcaattctcttctttaaattatatgagtcaatagagaaatgctaaaaggtgtgccaagtgtaccctctaagtgtcatactctcggttcgaaattttttgcagtgcggttgcggtttgatttttttctaaactgcgcagtgcggt

SEQ ID NO: 299208 - DNA, 2040 bp, Cannabis indica
ttagaattcaaatttcccttttttttttgtggcaaaatctctttatgtttatttttctttgcaaatttgaagcatcagttaaatatcactgttcaataccaattggatgactactatgtacacctacgtatatgtgatttaacgacgatatttaactgatgtctcaaatttgcaaagaaaagtaaacttaagagttttgccaacaaaaaaaaaaattgagggggttaagtgtatgtatagaaattaaaacatgaggaggtttcgccaccaattactcctatatacatggaaactacaaaatttatgattggaagaattttccatggtaaatgaggtgggtactttgttttgataagcttgcttcattttctttgtatgctcaacatttgcagcttttgagttttgaagaaccttggactctgattttggatgatgcactatctaattctttcattgcaccggtcactgatgatatgaaagatgaccatcagttaacatgtaagtttctctttgctatatcgaaacttctgttttgtttttgtttctgcgttcttttcccctttacccaactttattaggcctcacttatggcggaggaaaactgtagaaataataaaaagtaaagctaaaaaagaacatattgagccatacatcaaaagattgctgtcggcgcgcgcctaggaaagagtacaactccaatctctaagaagatctcggaatgataaagtaaacaaactctttagttctcaacacccatgttgcaacccagaatttgatcttctcccttactttctttatcttcaaaggttctttttttcctcatttcttttacaacacacaccaacccaaagaaagcaagtgaaatggccttatcttttgcatcacttcgtgcacattcactttttgtagtgcaaacagccatccaagcaccttgatcttagacggaacgcaacttttccacatccaaaaacaaaaaaaaaaactaacagggtattcatcctattcgatccccactattttgctcatagtgtatctaatctgcattaagtgcggattttatggattcaatcttatatttgaaaggatccagaccatacaatatgagccataaaagcgtgaagactagcaagcaattataaatacttatcaagaattttcaaaatgtgttaaaacatccaaaagaaaaatactacaaattatcaataaacataaaattgaaactattctcatcaactttgtcacaaaaatattaaacatttaatcttacatattcacttattttagattaaactaatacaaattaattcacgaaatactttttaccactctgtcgtaagaaagaataacatgtccaaattgattgaattttttgtaatttgtataatgtgtttattgtttgttgtgattaatagttgaggattatgagaggtcttgggagcaaaatgaggagttgggtttgaatgacattgacacctcttcagctgatgctgcatacaatacaacagatacttaaatactttagtttagatatatgaattgttcttccactttttcctacttttctgggaaaatttgggtggactaatttatttatttaagacttatttttcatgatttagtataagcttttcttcttatatacaaaataaaatagttatgtataagttctattgatttagtatgtttttttttcttcttataattatagttttgtttggtttcaaactactaatggcattgttattttggaagagtgatgctatttcaaaatgaaagatttttgagtgtagaagttttttctttttgttaggatttgagtgtacaagttgaatattctactcaatagtaaatttaatcacatattgcatgggaaaaccactttaatcacttggtactcaagtgacccaattattgcagggttattattttatgggaaaaataaagaataaaaaaaaatatggggaatatagtttagagtaagtaactagttatttcggtatcttatattatttttctcaaattttctatttttttttttaa

SEQ ID NO: 299209 - DNA, 2725 bp, Cannabis indica
ccctcaagggcgcagaaggccacaggtgcttttgagcccggacaaccctatgaccctagaggcaaagacatgtcacgaggacaaggtgcaaaggtacccacacataaagggcgaaggaaccaccccagcgactcggttaacctagatggtagaatagccatggggcattttgaagacagctggtccacggtagacctttgacggcgattagatgccaaaagtgagaaagcaaggccacgtggaggtgaccttaagaaccatctgagcaagaagatgagagggcaagacctccctgaaagtgatacaaaaaggttggaagaacaaatcgccgctttgaccaagttggtcaataaataaagtggagcattatcagattcaaaagatgaggatccagaaccctacataaggaggattatggaaactccacttctaaaaaacttcaagatgcctcacatcgaattatacgaagggagaattgatccacgagcgcatttggtgaaatacaacaaaatcatacaagtcgctcgggttagcaaagatgctatatcttatgtttctccctaaccttgactatgtcagcggaggactggtggaaacggttagctccaggattgattgacagatggaaagatctacaatgagccttccgtaaacaattcatcgctgcgcaagacaaagatatggaagttggttcacttaccaacgttaaacaatagtacaatgaaagcctgaaggctttcattcaaagaatgattgaggcagccgccaaaacaaaagtcagccatgatatgaagttgatggccctctaatctggattggttgtaggctctctattgtggggagaattgcagaggaaaagagctaaaattctgagtgagttcatggaaaaggcacaaggcatcaccaacattgaagatgcctatatacaagcttttggggttcctctgactcaaactccttccacaaccgctctgaattacacgcctcagattttcgctccagatttgccaatacctagagctcagcttacaccaattgtttacagacctaccacttctagtctcgcccttacacaaacccacttttccaagtacatagtggcacagaccggatgtagcgtagcactaagacaggaaaagactgaggtcttggagtccaatgcaagccactcccagaataagagagggggaaaaagccataactgtaatgattcttcgaagaaattgaggaaagaatatgacccaaaatacactaaatacacaagattaatagatacgcggcagaacgtctataaagcaacctataacatggtccactacaggaaacctccgcgtatgtcacaataggtgtgaccaaagcaaagagtgtaagtaccatggagagaagggtcacaccacaaacaagtgtgactacttgaaggatgagactaaaatgctagttcgagcgggacatttgggacagtgggtccgtatcccaattatttatcttagacagggggcacatggacatatgatagttccaagatagtagagcactgtaaatcttccgcagggggtaggatgctctcaagctctgggattatcgttgcctgcccttcctgcttcgtcagctccagctgggtggcattacttgccctgggaccgagaaccccataccctcccagactagctctaccatcggtagacagagatgttgcaataatctctggtggacctcatctcgctggcagtaccctcaatgctcaaaaaagatatttgaggaaaatagaagatggggaagtgtatgccctggtgcactctccaactcaatgccccaagatgttgaatctgcccatcacctttaccgaaaatgatgctaggaatgtgtgtttcccccataatgacccactcgtaatcggtgcacagatcgcaaacaagcgagtctttagggttctagtggacaacagaagctctattaacattctattaaaatacacattctaggagattgggctcaccgaagcagatttaaccccctgtcacattcagatataaggtttcaacggccgtgccttaatgccaacgggtaaaatccaactgcctatcactctcaagggggaaaatgaggtgagtgcttttaagcattcgacctttattgtggtagactacccaactgcatataatgccatattagaacgaccaattctcgtggattttggggcggtgacctctattcggcatttgctcatgaaattctcgtgtgataatggatgcattggcacgataaaaggcgatcagagaagcataagaaattgttacaatgttttgacgaggatcgtgttcatggtttgagaagaaacacttgttgctcttgaaacagaagacttgatggatactgaaactatacgagaggagtttctagatgagttagacccaagaggaagtgagtattagtgaggaagacccctcaaaaaccattagagtggcaagaaatctaccctcgtccataagggaagatgtcataaatacggtcaagaggaatcaagatgtgttagcttgtagccattctgatatgatagggattgaccgtaataccattttccatgctttgaatatctgagaagatgcgatcctagttccccaaaaaaggtggcccttagacccggttagggctgaagcagtaaagacgcaagtggacaagttaaccgccaataatttcctccaagaatctgttggaaatattttac

SEQ ID NO: 299210 - DNA, 5724 bp, Cannabis indica
tctctatctcttgttcttccgcaactaatacaatgtacaggtgtcaaacaatagttacaatatttataagccatcatttccaagccaatgccccaaaattgaagctcaagaatgtgatttcttttctagaggaaaacaaaaaggaccgtaaactttcattttgggacttcacctgttgaaagtgttggtcagtactctatttttgcatttgctatttttcttttcccttcctcaataaaagaaaattaatgctatattaattttgctttccactaaacacacaactatacatgacatataatttgcacgatttggtggctcctattaattatgaaattttgtagacttaaaacgctaaggcatataaaattgaagacttcaagtaaccttagtaaatctcagagtaagtcccattgtcgtattcgttgtggtgctacaaatcaatgatgccccaaaataatgtttttttggttcaagctgttcaaattctccatatatgtactaggcaacaccaataagcacatgctcaattgtttaataacaaaatagaccaataaaaaaggagactttacaactttttcagggttcaatagtgcgcgcatgaatactagttttgcaagttaaattaggagcatgctaattataatttcaaggtaaagttaatcaagtataacaatggttatattataggaaaaagaacaaaccaggggaagtataaactagttgcaagtagaagtatatataacattccaaaaaaaaaaaagactaacaaagggaaagtataaacataatgtagttctcatagccgtaacaaaaaatattttttgattacataaggaaacttatgactacataaaagggaaaaaaaaattacactattgataatgtctctaaagatggtgcagcccataacatggatttcctaatcatcaactttctaaacaaccgaacagtcgttaccatcaaatgcttcacatcaggcaaaggaggaggacaggtcgctcttaactcgtttggaattatgatagcctgcacatatttagcaaagcaaaatatgaaaacaaatgcaaggagtgaatcaaattaaattgcatatgtaaatatatatttaccttttcatagccagaaaatatggtcattttctttgtaccattgagttctgaaagaaaaactattaaactgttgtaccacttattatcaaaagtcttcttctcaaggcctccacgaagtacaatatcaacattcaaaagatttgttgcattcatggaaattagacttattgatttgctagcgtagcggaaggaagctaaacccggggcattgatggagattttatgcaatgaactaccaccattgtagcgaaaggatactaaatttggggtattaattatagcttccagcaaatcaaaacgccaaccagagtccttgatataaatctctttcaactgttggttggtgattttgacataaaccccatagcaatcatgtaaagtcaaactctctaggtgagaaagttgaggtaccaattgctcaaaccaatgatcagtcaataaccaagctttagtgaacttgaggtttctaatcaaagcacagccagtcagattgatattgcaactgccactgtatccgtagtaaacgaaagaatgaagattcttagcttcaactttgactgtttgaacagcccctaattgaaagaattccagggatttcagactcgaacttacaacttgaggttgttgcaaaccaaaacagtttaacttaagcttctcgagacaaggacatcctagaagtaggttgttcaaagtttgatcatacgttactacatttacaaattccaacactaacaaagatggaaggcttactaaaaatataggaggagagtctatcttcaaatgtaagccacccaatttgagagcagttaatgttgttaggcacagtaaatcatgtgataaggtgctgtatatagatgttgttgggctgacactaatgtcaagttccttaactcctttttgtaagggaaatcttaaccaacgatcgattcgattatggcctccatagaaatctacgtgaagcttgaatttagtaatggttgtaccttgaaaagggtttttcaaacaattggttacaagcttaaagaacttgttccggtccctgttattgttgggttttctaagatattcaagatctcttctgtcgtaaaagtctagcacgtgaattaaagtccacatgtgtctccatcgcttggaaaccatactcatcctaaccacgaaaatggtgggaagaaatgataatatgtgaagagcaacagcatcaggtaactcagatattcgatcagtggacatgatggacttccattgctttgttccatcattctctttgactcttttcatatccatgatgataaaactaagactcgatcatgaaactctgtcaagaacattaacaaaattagtgaaatacaaaacaaaacaaaaaagagaagaaatacaatgattgattagatcttgcaccactggatattagcaaaccataaattaatgtgtaggctcgtttattttgttgtactcacttatatgccaaatgaaatgtggcaatgagaaagagaagaaaacagttaccaaaacaagagagaagaaaacagtaggttttttttctttttttcttttctcttccttattaaataacagctttattctatcctgtaacatgtgttggatttttgagtaagtgtgtgtatgtaacacgtacccacgaaatggaaagatcagtaaaagtaggaggactcgtcggtttctctcaaaatttagttagaattattttttaatttgaaaaattctccaatctcaacaaaaaaaagaaaaattagaatttccttctgtcaaaaatgtaacattgcatacaattattttaatatttttatgtactatttttttttttatcaagaagtgatattcattaatctaaagactctatctacccaaatggtataaactaacctagtcagttcagtcttgatgttcctagactgatgagccgttgcccaacgagtccaagcatcaaaatcacttggccaacatgcttctcctagccaaccactaaccctctccaagattttatacattcaaaaaacagatgatgatgatgatgatggctctcatcagccaactcacaaactgggaacttaagggtctctaatgtcaaatttctcttagccaactgatctcgtgtgaggagatgcgaatgggaagcatgccataaaatgaatctatgcttaggagcccccaacctgcaccatatgaccttgtagtagtctaccttagcattatttgccaaaaatgctcacataaacttcttccaataccaaccatcacatcagatttcagctcatgaaaaaccaaatatattgacccttcaagtagatgctattgatccactttatccaaagcacatcttagagttgtgcatgggttaagtttggtggttcacggtattttaatgagtcaacccaattagatcggtctgaaaaacggcaaaagttctcaaaaacttaaagttgatgcagattaatttccaatctcgaaaattagcggtaatagttttcaagattatttttgttagttcgttagtctctagttaaatgatccgcgtgtttatttaaaaaaaatgccccgtgttgacaaactatttgtccaagtcataattttaattcaaaataattattcttttaagaaaacaaataaattattttaaaatttaagtttttctcttttctttttttattttcagccccgaccctttttcttctctccccttcgttttcttccatttccgcataaacctctatagccaccatggccaaaagcttcgaccaccctttgagctccacttctctcaattccattcgagttagactaccccaatatcacaacgtcgtccccatgcttcctttcacacgccgttcttctcgttgcacaaatttaaaatattttgaacaaaatatatctttatagaggtttaaaaatgcccctattctagggaatgtcccatatgtgaagagggagaggaatcaacattacatttgttctgggattgctactttgcaaaggcaatatggtttggaagtatgtgggggaatgagaactgattacttagcttgtagctcctggacagagtggatgacttggttccatgacaaaaatcatagaccacggcatttgtcgtttgatgaatttatgacaggggctctctgtattttcaaagtaatctgggaagctcgaaatgaagtaactcatggcacgagacttcgccctataacggagttcatcaactcagtgcatcggtcctacaatgatcacctatccagatggaaaccgaaaagtgagaagagtggttttgcgcggacttccgaagcaggatggtggaactgctgtactgatgtgtcaatccagccaaaccaatcgtttggagcggcagtatttagagatgatcaggacagagttgtgactatttattcggagaggctttctgctatgaatcctctgttagcggaagcgaccattttggctaatgcagctgagtttgcaagggggaaagttgcttttttctgtgataacgaagttgtggttgcaaattgctctaacacttgcaacaccaaccagtttattgacatcaagggagtaacagatcggttcaagagcacggtcaggctattggacgattccaagctcaggaaaattgataggaattgcaactttttggctcacaactctgcgaagtgggctgcttcagtcggggctactggtgttcttgatttgggaatcatggatgagaatattttctctgatgttcgtgaatggaccactgattaatgttggtaaaagtttaattgcctttgtgtggagatggttttttctgttggtagtttttaatgtctagtttagtttaagtttttgtctgtttagtttcttgtgtctgttgaactttatcggcttggccggttttttttttaatgaatggggtttataaccctaccccccccccccccccctctttaaccaaaaaaaagtgcccctattctcaaagtttcagtagtcattacaatggtccaaagtccaaacataaatcttaaaactattaaaattatttataatagtaatacagaattccaacaaaagtgctttgaaacttagcaaaataaatcaatatttctatctaatggaaattaagctcattaatgtcctaaccacgtaaaattttttatcttcttttgttgtaaatcatattttaagctcaatctatatcttaattggtttttaaaatctcaataaatagatatttatattataaatttctaagtgaacctttttttactcgttgctgaaatttaagaattattgtgtacacattattttattttttgatacttattgttatacctgaaattcggctacacttcagaaggtgatacttgtcaattagtggaatatgaaccacttaatataataacgttatatcatttaatgcaaaaagtaataactcattaaatatagaattaatagagtatattcataactcgctgactgtatagtcttaggcgagataagaatacaaaactattaatatatgtattaatgagcaagaaagagagaagcaaaagagaaaagggctatttacaaaaatatgagaaaatgaagatatgttttgatatatatggcataaaaactt

SEQ ID NO: 299211 - DNA, 4900 bp, Cannabis indica
cataccaatattaccatatatatactaatcaataattattaccatatatatattttaataaaaattgaaaaaaagtttttaattatatataaaagtgtatgagaaaatgataataagttttttttgcacatattttgtaattaagtaaaataatgtatacaaaattgtaaaatgccctaataataataaaaagttaataaaaaatccatgtatttgctaaatctaaaccttgcattgtctctaattgcacaaaccccaaacttctttatggaaggtagtacaattacagatcaatttatcaaattcctatgttgacaaccccattcagattttatttttctcttttagttgggaaagagggaccagaggttcaattattaagagagataattagcacttaattatcatctttatggtgcagcgtactctaacaaagtatttctttttttttttttccatacaataataattttgaaccaaatagtgacttaggtacactaaatctttggtttttgagcctaaagggaaccaatagaagaagccaaaatgctgacataactagttgtgttacaacattaattaattattttcattaattaaaaccaagcctagcattttaagtgtcattaagcgttgaaaaattaaattaaatgaaattggtgggggtgtagttgatcttcaacctaggcccaaacctgtcagaatcaggtggattttggtagtaaagctttgtttataagatttaacacctctaattacctgtcattccacttgaagagaaaaaacccccaaaaaataataataaataaataaataattaattataatcttttaatggtctaacatggagcaaaattgcaaagcaattcacctaacaaaaacaaatgtatcattatccaaagtttggggggtaaagtagtgaacattaaaataatatcaccttaatcattttcatttgttttatagtaccctataatgtgtatagcttgaaaatgttgtgaaagatacaaaatgatgtgatagatggaatctgtgttgttagtaaaataaaacaatgaaaaggaaatgtttgtattttaattgcatcacacttgagagaaaatgaagaagagaaagaaaaatcttagttacaaacaaaggctataattttactcaaagacactctttttataaagtgagataagcaatacttaaaaaaggtctcatataatggggacttggctttgttcccaagcaccaaccaaacttaatactctttttttttttagtctctacttgactacgcctatagatatagaatatgcagaagaagacccttttcttctctctctctttcaagttcaacctaccactcattatatctctctcaaaatatttctagctattgcttcttcaatcctgaatttctaagccagccagtttagaggggaaaatattatatatatatatatatattaaaaagggttggaaagagaaagtgatgatagtcacgtctcaacctccaaaacccttccttgaatcaaactccaactctttcattcattcattcattcatatccaaatcttggttttttattttttctataacccaaatagtcaaaatcataataaattagggacttgaaacaaaactaaaaactaaaaagactctttcctttttacattcctttcttcacaaactagttttttttttttttgtttggtccccaaaacatgactgaggtacttcaatccccatctcattttccttcaacctcaagctcttccactccatgtgttccacctacacccaatgatggctcaatctcaagtgcccttattaacagtcccattgtagatgaaagggtccaacctcatttgggttcagagctagaagaagaagaagagggaagaagaagaagaagaagaagaagaagaagaagaacaacaacaagaacaagggaagtggggttttgatgtgggtttgataggaaaaggttagaaagagatagagaaggagatcaggtctctgttttggagcttttaatagctgcttttagaaaatctttaattgggtgtagtcatactgaaagagcgaagctttcttcatcttcaatggagattgggtggccttctaatgttaggcatattgcccatgttacctttgatcgctttaatggctttcttggtttgcccgttgagtttgaacctgaagttcccaggaggcctcccagtgccaggtctgttcatcaaaatttcttctttcttttgtaattaattctctaatcttttctttaattttacaagaatttttcatctctttagggttatgtgttatttgtttatgttttattatcaagaattggtttgaattactgtaaattgcgtcatgggttttaaatatggaaacttttgttctgtgtttgttcaccgaaaaaatcctataaaggattgggttgttgattaggatttcattcatgttctattatgggaattttctttgcatctctaaacaccatatctcatacccgaattcttatgctctagttcttcaagatttgattccaaaatttgattgtagcaattgaaaatgggcattatgggagaaaaaaataagaagttaattttctgacatgcagttggtgcattttgggtggttggttttgacctttgatgaacttaatatataatattatgttaagcccaatattccttatatggaaacttattcttattgtttatgctagttcaagtttaacatcacaactcattgttcaatcaactgacattgttcaatttttcttaatacttgaagtgcaaatgtttttggggtttcaactgagtccatgcagctttcatttgattcaagagggaatagtgtccctacaattcttctgatgatgcagaggcacttatatgcacgagggggtttacaagtaagtgtgaaggtttcaatatttggtttggtttggtaagtcaattccagtagaaaagacatttggttattaagactttaatctactttcaggctgaagggattttcagaattaatgctgataacaatcaagaggagtatgttagggatcagttaaataggggtgtgatacctgaaggtgttgatgtgcactgtttggctggtcttataaaggtaactattaacttagtttcattatatcaatgctaattctgctgttatagcaatttcagtgaaaacccaaatcagtttttcagtttggtttagcttatttttgagtactcggtgatcgaaatctctttttgtttaggcttggtttagagagcttcctactggtttgttagactccctctcgcccgagcaggtaatgcagtcccaaacagaagaggagtgtgctcaacttgttagagtccttcccccaacagaggctgcactgatggattgggcaataaacctaatggctgatgttgcacagtttgaacatctgaataagatgaatgcgcgcaatgtcgccatggtgtttgcaccgaacatgactcaggttagtatcatgttaatctgtgttgctatgagtttctcgaaagaagaatttagtgatatctagtgaacttttggtgatgactgtcttgttgaatttttgttgcagatggatgatcctttgactgcattgatgtatgcagttcaagtgatgaatttcctcaagaatcttatcgttaggacacttcgagaaagagaagactctgtggtagaaacatctcctcacactcgcgtagagccttccaatgatgatgggcaccagagctcttcccacccatatctggaagaagccaaggaggagaccaacttggagaatgaaggcgatcaagccttcgtcgctgaagaaccagctttcgatagcccttgtcactcaactcaagatgaaagttgtacatcgggagatggagctcaaagtttcctatcttccatcgagaatatcatcccgggaggaagttggtctcttgttgatacctgtccttgtgaagttgtgtcccaagttagctctttacagaatgttctccaggaaagctccacaggtcatagtggagatgctcaaaagagcttgaataagaacaaaacaggtcaatcaagcacttcaaatctcaagaaaggttccaagaagttgagtgagcagataatcatccagagcgctcgagctaatgagaagagcaagaaagctggaattctcggccgcattaattcaagaaaagagctggttgaagcttggcgttgaagcgaaagtgttgacgattctatttcgggtaaggaaatggaaaatgggataaggcttaacttgtcaagtggtgaaaatgttggcaatttgtttcttttcccgctgttatgataaaatgtttgtgtatggttttcgtgtgtgttttttcacgtttggttttatttgacattttggtaaagccatgttaaccaaagtaaagattctaacccaattttcatggctatatttgtcccactctcaatccactctcattatataaaatcatataaatatatttaataattgggataatgatctgtaaaggttgtatttatagctttttcatggtaataacatttagtctggctcctcaaacatatggtttgttaggctgggtggaaaagggagagaaaatttaagagagaaaagtgaaaatgagtgtatttgattgaagggaaaattgatgacaagggaaaagataataagaaagaaaagtgataatgagtgtaaaaaattgagtgacctacctacactaacctattgcaactttattatcaagctactttttctacaaattataggaatttcctaatatttagcattgtatccatctcattaaagtcatagaatatgaaagggaaatttgattttctatacttagaaaatcaaaaaatttgattcctaaaccaataatttaa

SEQ ID NO: 299212 - DNA, 3953 bp, Cannabis indica
caagtttttggcgggtacacgtccaagtcctacttctatttcccaggtccctatcctgattttgggtcaaggtcccagttattatgtgggtttgggtcccgatctaggttctgttcgagtacccaaataaaatatgttgtaatatataaaacacttaaaatacaaaaaaaaatattataatttatataaaaaaaaaattgtatgtttttttctatattgtttatgggtgagtaatttatagtgtttttgttacactgctaataagctttaatatataataaaatttccagtaattgaataaatattgtgtttgatgtttgtttcatgggataagaccagagtatgagattggatagtatagtccaactccatgtttggaaatatttttaagctttgaaggattatataaaattatccaaagtttttattttatcccaacaaaaggttagaatggtaagtttgatttttgtgaggtgattatgataagtttggttggtatgacttgtatggttagcttacataaattacaacaataatgttcttatatattgaactaggaaatatatatatatagtcagttttagttttataaggttaatatgatcagttcttttgtcttgtacggttattatagtcaatcttcgtctttagttttggtattgtataacttgtaattgtatgattagttttaattttattcaaaagaaatatctaaaacttttaatagttttcaaaaaattatgagtattaaaatttaaatattttgttatatacgtaactattttttttatactagtaaataattatttaaaccttaatatttttgacattacaaagtgttatgaatttttttaaaaatttatatgtgattttaaataataaatttataattattaaaaaaataaattaaataactctcttagatacacaaaaagagatagagaatgtactaaagcaatccaaaagccttcctacttcaaaaattaaccaatattatatcattcttaatgacaaaccaagtaattatttattatcttgttgtgttaccaaatcatacatgaaaggaaatttaattatcaatttcaaaattcaaagtaattacatttatttatttatttttgtaggagcaagtatgttggtaaattcattaaaaaacttaattattgttccttaaaaaatgttgaatattcattggtctttattatacatatacaaaaagcttatgttgtaatcacttcaaaatatacaaaacttaatttgacatattctaatgtacaaacactacatcacatattggatgtagattttttgttccatttgaagtattcattatatatatttattttttacataacaaaaattacagtatattaaattttgatcaaactacattaaaataaaatatgttatacattatattactttttataaaataaagacaaaatttcattgcctatgtataatttactacttttttcttgttttatttggaggctaataatgtcacatacacagtttgaagtctttttatactcttttagtcttttatatttatttacaacttatatgtaattttttttagagaataacattgttatgaagtactcatggtgttaaatattatgatgaagtgttattttataattggttagtaatattctatgatattaaaataaaataaataggatccgatattaaattacaccaatagtaatattacatgtcataaagatgatagataatagatatcataattaagtaccttttagcattttttttaagttgagccatatcccttgcgggcaagtgattatatccgatccgcacctatacagatagtgatcatgtccactctgatatggtaatacttttttaacttcacttttatttgcaaaattaagccacatgttaaatctcaaatgctaattgaattactactgtgtacacgtgtcatgttctcattggtttccaagttttagtgtcacatgtacacaatacgatagtttcagttgatatttaacagtaaaatttaattgacacgcatcaaatttataaataaaaataaaattaaagaagtattgctaaaaaaaaatcaagagcttatataaaaattaaaatatacgaagaatttactgccaattactcaaaaataaacctattaatttgtatcatactacctaaaatatatattgatgagaaactaaatgatcctccttctcatgagcaagtttaataaaaagagtgtgtaattattaatttgttggtctttaacaaaaatagaacgatataatcataaaaattattacaaacgatatctttaaataagagtggcaataacttggagaaataacaaaataaaaatacaaaatctcacagaacaaacaagttagttttgtaaattaatattctatagctacaaattacgttcatattactgtaaaatatcacactagtataataaaataaaaataaataaaaacacacatacacacaaattttttatacacaatctcaataattatttcagatgttaataatctacgggatcatacccaaaaataaaattcattaatcagattttataagtacaaagtaattgaactaaataaactccactataataattttgatgcaagtttgatgtgctctttttgctaaatgaacatccttaagacaccaagatttgaaactcctttcaaatcgcttgataaatacttattttcttctgatgcaggactttaataaatcttctcctaaaggttattcttcactttttcacttcaagaatttactaacacatacttacaaagacacacgaaataccaaatgaataacgacacaactatcttttacaaaaaagacattcttctaaaaatataaaaaattaagagatcgaagagataacctaaaaatgagcttttggttcgtatttatagatataatacttattcaaagtcaattttacacaattctaaacagacaacattcacaaaggaaagtttctaaaaataactttcaatcaaaatcaatacaagtcaaaattatgggaacaaacaacgattttgcattgcatctacaaagaaagctcgaatttagacttcatcttggtcaattttctctctttaattatctttgagaagttaccaatttttgtgcgactgtaagctatctctagattttatcatatatgatcatgtttggagaactcaattatatgagtcataattttttgcagttgatgactctttgaattggtttatagtttataagtaaaatgctaaaagataccattagtatttagtattttcctcagtattatattattattgatgtaattaagtatcgtgtctaatataacttaagaaaatagtttttagagaatatctctaacaaggcatagcctataagaattactaggcaccaagggttcattggaccatatccaatttaggcctatccagatctgattcaattatatattggatgttaaattttaccatttgatctgatccaattaatttcagtcatccaatcgatccaacatccattgaatgttggattggattggttctatccgttggatgtatttcatatatatttattgatttaatttgggtttattcaatattgtagacctagtattttttggatcggatcggatccatcaaatattatagatccagtatgtattggattggattggattcatctaattgaaaaaaaaaattaatgttaacttttatatacacatatatttgttatgcataacaatataaaatctaattactcatttaaactaaataaaaatactaatgattttgattagatgttagatgtattggatttttggagggaaatttgaatttctatgcttagattaaggaataattttttccctaaacttaaaatagggaatattggtaaaatgggataacattttcttaattcccaca

SEQ ID NO: 299213 - DNA, 5452 bp, Cannabis indica
tgaagccttacttcgggaggaagtaagcactcacacttcaaagacgaagggagttcgggcttgaaggtgtttcaagaagtcagattcataaagtggattacaaaggattgcggcaatactttagagggagtctaaacttgtttaagtcaattgtctttgtaattttgatactttattaattgatttcattctctgggcgtggccccgtggactaggagtgttcgggagaacactgataccacgtataaatctcttgtgtcaagttatttatttttctgcaaatattttatattctgcctgttcagttctgctgtagcagaattactttctgctgctgcaaacgcgtacagtttttatattttcgtatatacaactgacatttgcaaaaacacggtttttcacattaaaataagaattaacgattagtcacataaaaaatatactattttaaaaaaaaaaaaacttagaatgcaaaatagaaatgacctctgatgaaacttggaatttaatttaattttataaaaatcgaccttttaagagtgtttttccttttagaaaaaaaagataaaataaaagaaaaatgttatatccacaaagatttgaccatgcatattgaatgaacacgtgtcattatcccattcacatagtgtttggtcatcttcgagctccaaagacaagctttccttccagttccacaatagtcagagacatagaattcgagctccactctctgcaataacaatggccgctgtagctcaaatctctgcctctctttccgtttcaatccgaggtaggtacccctcttctctttctcaccccattatataccaactcttctttacagtaataatattcatttctaaagattttgaatttaagcagatgcatgcgcttttagcccagcaccaattccttcaaggccttctctttccaacttcgcccaaacaaggtccttctttgcaaccgggtctccacttggtacttattctgaactcaaactacttccttcttcttaactttactgttaagaaatcataccctgtgatactgtatgactctggctccaaaatccatgtaagcttattttgtaatatttgttttactgtttcatacatggtttttttctttgggtatacatgaaaactctaggtgaaggtagatttgtaacaagttcatgaattgttgcagctagcaattaggaaaatgaaaaaaaaaaaaaattatgaaatggggattacttattaggatatgtaattaaccattacaaatagttttatcttttctgtgaaccagacttattatatgctaaaaaaagggtttttatccatttgtgaaaataccccatcagtgtaatgttttgtttattatctgtagtctagtgtggtaggatgggatgcatcacttgtgagaattgagccttaggattggcctagtctcagttttccaagaagatttgtgttcctatgtaattgattgatatattgtattttttctaccacagttaaggaatttcagataattggttgtgtctttcctctgatcattatacaccatgtcatttgtaaagaggttgtaaagttaatttagaaaagaaaagaaggatttagatattgaatcatttatgatttcggcctgtgttcttgatacttctacatacatttgtattcaagttcttagagttttcatttcctaaaaattccttataaatagttcaaagtatgaaattatcagtttatcacttagtgaaatgagttgcttgcttttatttctagtactaaggaggacttcttgtcaaaagaaatatgctgcgagcaaagcaacaccattttcaatcaaatgtgaacaaagtactcaggagagtggcttggatgtatggctaggtcggttcgccatgattggctttgcagtcgctattagtgttgagatagcaacaggaaaggggcttttggaggtaaggcacacgaattgtatttttcgctctaagcttatagaagcggtttgctttcgaaattgcaaccattatttttatatcttaagagtttgttatcattacatgtttatattttgatttttgcagaatttcgggctctcgagtccactgcctactgttgcattggctgttactgcactagtgggagttctaacagcagttttcatcttccaatccgcctccaaaaattgatcatacttgatagctttgcattatttgtatagttagtaactctgaattatactttcaagttacattttgtattattaattttccctatgagcatcaatacttgagtatatacattggtgatgaaatctttaattcatttacctctctagattgattttcacttgaatttttctgttgactcttgcttaaccaatgatatggtattttggtatccacacaatgtaatatcctataatggctctagattaggagaatcttttagtttacaattcattcaggtaaggacaaaagtggaaacaattttcaaggttcaattacattagtttcactgtcaagaaaccaacagagattcggctagactcagttgatgatgttatgtgaaagcttcaattggaccagaaaaaagaaattcctgttttgaagttcaaagagaacaatgaacttactccatttctttatgtatagaattgattctattctcttgtttgcctcatccttacactaatattccagctggtgttagcttgaaaccaaagagatctcctttttctatattctctttggtctttttaacacaaaagggtatttgttcttctctattgatgaaaattgcttctctgcaactatacccttttcgatttgatttttttcttttttttcctttgttatgggtggaagaatttctcgacttgcaaagaagttttttccgaaaaatcaagtaaggatagtcatggtgggtcttgatgcttctggaaaaacaagtattctctacaagctaaaactgggagatgttgttacaacaattcccacaataggtatctaatttatgaacacttaatcccagaaagtttgtggcttctgggtcttaagggagagagagaggttgtagtgtataagcaaaatcactaggcaaagattttctataagcaaattcactagtttataagatttcaagttatttgtcaaatttagaaaggtggttattgattctttttgtttttgctttcttttggaataggttttaatgtggagaccatagagtacaaaaacattaacttcacagtctgggatgtgggaggacaagataaggtaaggtggtaagcttgaattcattttcctttactattcacagtacattttctgatcaagaaaatgcaaagcctagccttgtgatgatcttccttgtaaaacagataaggcccttgtggaagcactactttcagaacacactaggtctcatttttgtaatcgacagcaacgaccaagaaaggatctcagaagcccgtcatgagttgcatcgtattttaactgaggtaagtttggataaaggattgaaacaatctatggagttatcattataattgtttacttgtcttctgtagaactagatttctcccatttattatggtttaaggcaggctccttttttgtttcttcttttagcatgaactgagcaatgccacactattggtctttgccaacaaaaaggaccttccaaatgctatgcctgtgtctgagataaccaatcaactcagcctgcactcgctcagtcatcgtcgctggtactcactgcctttatcttacgaaaactatagacaattgactaaattgaatgtaaaacttggttttaatcttttccttcattggtatatggcatagatgttttgattggttttggtaaaaaaaatttgtacaggttggtccaacatacttctgcaacttccggtgagggactctacgaaggtcttgactggctagctaacaatatttctaacaaatctaacaatagttttaataaagctgcctaatatttagattaaactacagttctttatgcttacacttacacacactagagattcaagtcttttgtgtaacattcaatacaagtctaataaaactattgttccaaaagggcagttttgttctgtttgattctgaagtttgaaccttttgtaatttacatgttccctacttcaactatagattgatgtaaagtaaaatgttggtaggtaacatctaacaaaattagttagaaatagcaaaacttacaatcaaacaaatttgataatttgtttttgactcataagcacaatgctggtcctgcaaagtggtcagttaacatattcacagattcaggtcctgttgaagactttgatttcttattctttttcttcctcccttcattcttgttcttgttcgttttctttaacttctcttctataaccggctgcgtgctctccaagtgttgagcgagagcagccaggggatcagattggagtgcaggattgctaagaactgtactcatttcctttgcttccttcaatctgagagccaaatgaaacaaccacccaataagcacaattaaaaagaaaattacattatgaaaggaaaagtaaattcttcaaaaacatttaaaactaacattagtttttgcctagatttacagttcagcttgaactcggctagatttacaaactcatttgtaaataatatttttttaaatataaattatattaataatatggtgttttatcgcgaaataagtgatatgattgatgataattgataagtagatgcaaattaattacttttcacatttattttacattaatgattaaaaactaaaactaaaaatatgaattgatatataaaaaaaattattttattattcattgacataaaaatagtaaaaagtatataatttgtattcatttatcaactatcatttactatgtcactcatttcgtaaaaaaaattaaatagagtgtgatggaaggatcacgttaatataatatttatattttgaagagtattatttacaaatcatatatcctaaggggcataaccataacttagaaatgaaaatgaaaaaaaatactaattatttttatttatatgataattgctaaaagatatgtcagttctcattgggtgttcattggatcacatccaatatttttaagtccatccagatccgatctaattatatattggatgttagattttaccatccgatccgatctaattgatctcagtcatccaatcgattcaacatccattggatgttggattggattgtttctatccattggatatatttcatacatatttattggttcaatttgaatttattcaatattttagactagtatttctagatcgaatcggatctatccaatatttttaggtccaatatgtactagattagattggatccatgcaatccaagaaaaaaagagtaaaattttaatgttaatttttatgtat

SEQ ID NO: 299214 - DNA, 2182 bp, Cannabis indica
agattttcgttaacaataaatgaagccctgaaaattaagtattaatacttatagttaataaatatatgtagagcacaaagagtttttcacgtaatgttgtaattaaatctacatactttacgagtcattcctatttctgaatatttcttgggaaagtacttttattacagaggaataaatatgaatattcactcaatctcacaaggtctttccttccaaaaaatgatccatcatcttctcgttaggttttgtccctatttaaaggagttttctatgacagttactcttttcgatcctatataagtaactattcgtgaaacgtggacaatctccacatttcacatttacaacatgtggattaaaatagaataaccaatgtcaactttcttttgattttatttggaaacagtttgcttttacggagatgacacattctggttgtggctcgcattattcgacagtgttagagggatagctggttgtattctgcgagacgatagttaaaattgtttgtcctcgctatagttgaaataagttatattatgtttatttccttagtctttcaatatattaatgagtatgtgggtcaatgcaagttcgtaaagaactcattatctaccctttcctgcaatatacttcaatcctttacacccgagaagacttttattgttaccatctcgccatacgttgctcaattcctagtcttattgccaacgcgtaatgtaagactaacattgcttgttatttaattatctctctaagacaattcatgtatttatgagtttaccataatttttgtgtctaaagttctatgtgtcatgtccatatttatggttccaaatatgggcataataattacccctaaaaagctctttctagaattggaagaattttttaaatgatccaaattgagaaaattttgtcttttacctaatttagtaatgagtacattcctttggcagttttactttctttgagaaaaattaatatcatattaattaaacatcctttctcctggcagatttttaacacgtctttttattttttgaaataaacctagccctttttatccacttttgaaattagattaatggttctccatttagatataaaaaggagttttttttcaccatttgtcttcttctttaccttgttcgatatacaaaccagagagtaaaaaatccatttttactcacgaagttcttgcatatccagcttgtctttgactttcttccttcgtgtgatcaataccattttttttcaacctcgtttttgttatatttcggacccttggtataggagattcccaatcaaaaaccttcaacatttctagtataacccagataccggtaagtcactaaactttgccctaaattctctccttgtcatatatttgtttttattgtgggttttttgaaacattctttataatatttttgcttaaaatagataaggtggttaatattttgacgattcttttccctgaattatcttcccgaaaattcctaaacttataggatattttgttttttgtacaaagaatgtttacccctagttagaaatttttgaattcaaattttttagaacaagaaaacttaaaacttccttccttacctttcaaatcgcaattagaacattcaaaaacaatattaaaaataaatgatgagagaattaggttgttcaatgagaaacttgatcgagaagaaacctctgcttgatttaaatgttttatagacaaggttattaatgggaaatcgtcgctttttgcgagatgcagcttggccagagtctcctagtttaacaaagtaccccttggcaaggttatcattactttttccccaggtaaactaagatttgacatcatgtcgtagaaagagcgtaagtttgaaattcctcagaatcccacagttcaatttgaggcacaatttattgaatccaaagttaggtcaattttctcgtatgtgggtccatttctaaggtcttgcagcatcaaaaatgaaaaagaatgtcatatacgttcggtcgtaccaggcaaatttagttgttttcccccatctcacttgttgaatgatgaaatctacagcactagttgttgggttttgtgccctaaataaaacccgtttcaatataatcagatttactagttaataagatcataaataacattttatgttgcatggtt

SEQ ID NO: 299215 - DNA, 1156 bp, Cannabis indica
agagagagagaggaaatctagaaggttttaggtggagtgagggctgggtcattccattgccatggccaatggagctttgagctcctcccaaggatgggtcatgtccatgtatgtgcttgcgtgtgacagtatgaggtcacgtggtaaaagaagtcacacttgggcaatacaggttgggcttactctagtctaaagtctcatctcattctcagccccaccaaaattaaataaataatcctcacatgcaaccttttcttaccttttttttttatttttcatttttctagactatacaaaaatgaagacagcatttctaaatttatgtcttttcttttcccttttaaaggaaaatttatgacatttaatattttggaacgtccgtttcaaaaaaaaaaatatatatatattttggaacaaattttatgttcatatcattattcatattttcattactgtctataaatattttggaacatttgtaaaattatattgtattatacatattttcataagttgtccgttttctatttgattaatttaatatttcattttcgattacttgtatattgggtttgcagaccgcagctgtattattctgatttaatatataaaatataaggatgaaattgattccatcaaaattataggacaaatcatgtaattaggacaagttagtatattttctaaaacaaaaataaaattaatgaacaagagatatacacaagacaaatgttaaaatgtaccatgtttagcattcttttagatgttatattgctctttctgttattaaatatcgagttctatatatatatatatttttttttcttaagaaaatactcaataaaaacaacaaagccagaacaaaaatcagttccatatatatttttaagagagtgatctaaatcactatgataaacgtcgacgcagataaactttcagtcaacaagctaattgtctagctaaaaaatatacaaagtcagaatatgagttctacaaataaaatgatttatataagatcaagttatctcgaaaatttagacaaaacaatttgagaccaccttcaagaaacattcgatctaaagaaccaatttgaccaaaattacctacaaaataaatagataaagaaaagtgaattaacacactatacaacgataat

SEQ ID NO: 299216 - DNA, 5540 bp, Cannabis indica
aaagaaaaagaaaaaaaggaagaacaagaagaaagaaacataaaatcattttattttgaaaaggaaagggttacgattatatcacatggcgggaaaaataaaagcgtaccgcgcaagctctttattccttttttatatgcgttttatttaatatatatataattaagggagccgaaacgggggcggaaaacctaaccgttgtctcttcattccaactctccgtcgtattcggtaatcgctatagcacactcgcctgattgattcccgagttaactcaatttctcgctatataaattcccacacaacccaatgagggttttaaggtctcggataatcgtttcaaccgaaaccacacccaaatccaaaacccaaaagactagacaacaaaaccacaacttggagccttctactccagcccagaacaaggagccctctgcgctttcttcctctcgctcccccaattctcacccaccttccgattcccctgcagtctcaatgggcccagaatcggattcggtgttgtcatctgggttaatgcggaggcatacccgacgactctcttccaaggtggtggagcccgatgaggcttcgggtcggaatgggagtggtggtggctcgaaagaagatgaggaagaagcggttgatcacggggttttgggtatggatgtaaataatgaggggggttttacgttgattgatgagaattttagggttgttgaggatggaggtgaagatagaggaggcggtgagggttttggtgaagttgggttgggttcggatacgggaaattctgggaagagaaagttgggtattgatattaattctctgcctttgggttgtgaagaagacggtgaaggaagtaaagggtttttgaatttgcggtcaggaaagaaagttgggaagagaagagcagaaggagttgatgaagaaaatgaagttcaagatatgggtgattttggtaaagaaacaccagaaggaggagagaaacgaaagagtaagttggccgatcatggtgatttgtcgaattgtcttgatttaattgtgctggattcggaagaggaaacggagagtttagatgtgaatgtagttgagggtggcagtgttggaggaaataggaagggcaagagaaaaatgagttttggaagtgaagatgaaaatgtggaggaggctcctactgccattagtaatgatactcataataggataaggagattctgcattaacaaaaaagggaagggaaagtggattgaaagtacagtggacaatgcggtcttatatggaccacggaaggttgaaaagtttgagtctattttaatgctggccaatgcagttgcacttgttcaagaagaggataggattaggaattacagagaagatagagcaaatatgtacagggaacggttcagagaaatagccaaggaaaatgctactcgatttgcttattttaatcgcgaagaggaagaagaaatgcctgctaaagattttaatgaatcggatactgaagattggcctggtccgttttccactgccatgaagattattagagatcgagagagaacaagtctgcgaagatcttcttctgttgggagcaaacgtgctcaacttatatggacgcccaagaacagtaaaggtaaagaacatgagtgtttgaggccccgggttcctacgcttaccgaattatctacaatgtgtcttgctgacaatgctgattcaatcacctctcttgaatttatcccggacgggttgaagcaccggcttagtaagttgctaagtgattctcgaaggatggatggtcaattttttagattgcttgttcaagggtcgcctactgaggttcgtttatgggattgttcttggctaacagaggaagtgtttacagattctttggagaactttgatccgagcaatttagcagtatgttttctgttttgttatgaatatttcaatctaccaagttacttcgcttatacttaactgatcatgtgtccttacaaaaatcaaaagtaacaattgtcaatagtcatcacatggattaaatggcaatgtgtgtgagcctaactttttctcacacatattggctcagctcctctgccaccggaggatcaacattgcactgattcatgtcttgttatatgattcttttgatcattaattcttctagttctgtcattcttgaagttgaacatgattgaatgaaatatgcttttcatttaatcgtcattgtatgtttagtatatacagtatattgaaattaagcgttttgtagttgattctttgcaaaagtcttatgatgagtttttactttattttttacattggagccttaaaatagtctaaacttagaagatacttaaatttaatgagttttcccctaaaaaaggagtttgatctgttttggattgaaggcaatttagtatattgccatgtcttattctcaaatagtagcataataatgctatttttatacagaagcagggtacagttatttgaatgttagcacttgattgtaattcctactaatatctgttactcttgtgtttacctacattgttcttggtttgtttgacatgctgtatatttgttcttgcaaatacttgttcacgaaaatagtttcaagattctttggactacattttctagtatcatcagcaggatgttgaaaattaaagtctgttggtttgtttatttgtttgaattttttttaagctggatttttgtgtcttgaatcaggtgcttcaacttgatcagtgtggacgctgtctgccagattatattttggttgacaccttagccaagtcagcaaattatttgcctgcactagttactttatcaattcgtggggcatgccggcttacagatgttggactaaagtttcttatttcctctacaccggcacttagatctcttaatatcagccagtgctcccttctcacctcttctagtattgacactatagccatttcgttgggttcagttttgagggaattgtatcttgatgattgccagggcatagatgctatgcttatgctgccagcagtgaagaaccttgaacaattagaggttttatctttagcaggcatggaaaacgtttgcgatacatttatcatggaatttattagaagtcggggtgataatataaaagagctcattttaactaattgtgggtaagttgctttacatatttctttcatattgctcataattctcttcactttcatttaagttttcttgtttttggttatgatgttcttggtttggtgcagaaagttgacagattcttcagtgaagatcatttctgaaacatgctctgggttacttgcaatcgaccttgggaacgtgtgcaaactgacaagttcttcattagtctatcttgcaaatggttgtcagaacattcgaagattgagactctgtcgcaattctttcaggttgttagtaaatctaaataattatactggtttatatagaattctgtagctaattaacacttaagcgtgactaactgtgcatcattggatggctgactgggaaaccccagtcatgttgtatgtttcttaacattttaaagaattttgaggacctataagatttatccacttcgctcgcacattagtacttcaaggacaaattctggtgttcaatgtttaatgcatccattgaattgttgtatcatgtatgatgtatgaaagttggatttttaaatcttggatattatttcccagaacttgtctttcttttcctgcttacaagatcttatctcattgtaactaacttgtggacactgttgatcttctcttcctaactgactaataaaatatatttgttaaatgaaaacagtgataaaagtatagctgccttcctagaatcatctggactgtgtctggaggaactgtctttgaataacatcaggaaggtatttataatttttttctctctttctcttccaacgcatatacacatacgtgcaagagttgtctatgcatatatttatattgcatgaatcaaattcatggctgctcattactaaactttttggtttttgcttcaattttttttttcaagttcttaaattaatctacccttttacattttgcaaatatttgaaaagaaattttgaaattcgctcaatccttgagtgcacttgtaggtcggctgccagacagccttatcaattggccgcttaagaaagctgaatagtctggatttgtcgtggtgccggaatttgtcagataatgaattgggtttcattgtggatagttgcctatctctgagggtgcttaaactctttggatgtactcaggtaagcctgtgaaacagaattacctgttatatgctcatggaccagttttctcttcccagattttctattcaacagattgtgataattctagattaaatttattggttgggttatgttttcttttctatgtagattacaaatatttttctcgatggtcactcaaatccagatgtacagatcattggcttgaaaatgtctcctgtgcttgataatgtttgctgggcacatccatatgatgctccactgcgttatactagtgcaccttcatcttatctctaactggaggtatgatatcaatgacttggaaagatggaattcaactgaaaatagtttaatcggatgagcttatgggtaaatcttttggttttttttgtttttaactcatagaataccctgcacaaatcgactccttttgcaaatagaatacaatttgaaagtgtccaaccttacattgtacaagaactcggaacatcagatgttttttgttggttctggtggaaatgggaagaatagcaaatttttggacaattcaccaatatcatgtttgacaaggatatttttttttacgtatctcttgttattgttatttggcactacagtaactacaagttctttctttctcataaacgaatgatttaaatttggtagatcatggctacaaataccaccaaccaaacagccttgacttagaggtaagggcttgaatgggggttcctttgaaagtcttaaatataaagtgtccatcaccatcatgtcactggttggagttgtttcttcttaggggtgcacaaaatgtagggtgacttattcaacccaagcagtgttgatcttattgcattactatttgaatgggccgttaagactctacggacaaatgttaaaaccggatttgcatgggttggccaaggattgagaattattggtttttctcaaatattatgtttattaatgtaataataaatagttatgttaaaaatatattttttaattaatcttttcaaaattaaaattcattttttgtatacaaatatcaacatgcaataacccaatccttctattcttgtaaaatgtagggttgaattgtacggtaaaaaaagataattacataaacaagtttctttaaatatatttttacggcatttatataaaataacaaaaaaattataagaaagtaacataaaaataagaaatttttacactaaaaatctaaaatgataaatttattacattaatatctatacac

SEQ ID NO: 299217 - DNA, 2523 bp, Cannabis indica
ctcaatagttcagggagtattttaacgactttaaaaattcagaaagcatgatttggtacatgtcaaaattgaagggtaaaaatcctaattaggattgtttttatttactaacaagtattatgatcattgttaaggggagaaaaaaacttactttgacctcctcaaagttttaacttttaagcttaatctaatctatttcaacatcttaagctgactttctaaagtggacctgaaaaggaaactccgtttgtgtatatatatgaaagttatgtatgtatgtacatgttatatggatggtgttaaatcatgtctttaagaacccaccaaaaagcttttaatttgattttattttttaatataatagtttttcattcctgtattcttattatataaactaacaataatagtcaaaaatctgaactaaagggacctttaccatcattttagttttggccgggttccctctatttgactttaaatgactcgtatgagtaataatcaattgagataaatgacaatttggtgatgtttactgaaaattgatactcggctttgtggggcccaaattcagttattatgttgaaaagccctaaagtcttattaggggaggctaaatgaagactaagcttgcataagcccaaagggtttaatccttaaacaaagatttcaaccacttcttgagtttggtatctgaattaatagtggatttgggttcacttaaccctacaaaacaaggagatttttcatttttatgtttttttagcatagtttacacaaatatgataattttcaaaaaaaaattattttgtggggaaaacttaaaaaaatgttaaaaaaaaatatgggagaaatattttagagtaattgtgacaagataattcgaaattagaaagattggaggaaaaaagagtaaattaataaaaagataaatatacatataaaagataagaaggttcgaccaggtaactatcttagggtaacgggatgattagccaattacagtaaccaattaacttaatatgttgttattaaagataacttatggaaaagaatgggagattctccaacaagtcagcttacttgattcaagtcttacagagggtggtttattgtgatgttgccccctcactttgaaataaactatggaatagtaaaattctagagcgacataaagtcttgtagtggtgtattttgtctaatgcgttaccgatctgctcgattcttaataaaagattctgcttagtggagacaaggtgtccaatttgtgggatggaggaagaattaatggaacatctttttctcacttacaacttggccttccatccgtggaggtcgtccccttagggaatttatccgattgcacgcactgttagttgcatgtgggactaggtaaagtttctctggggtttaaaagttcaaggcatcaacactgatgaagttttttttttacgcttcatcgattgtcaacaccatatggcaggttcgaaatgacaaggtacacaataataagttggataatgctaattagtgcattaactctattcatatatcttttacagattaccgtgcttcactgttccctaatcttgccccgattttgttggatgactggcacctttctctccaagagtgattcaaactgaattgtgatgttaggataggactgaaaagcatgtgtattgcagtagtgacaattaaccattttggagaggtgctctgggtgcatactaaacagttggatttcgttgatactttgtgtggggaagcagcgcctattgcttagcgttggatgttgctaaagataaaagccataagtttgtaattgtggagaacgactccaaggtggttgtcaatactctcaaagaaaaggatacttgttggaggtttgttgattatgcctcattttgtaataggttttttccgttgtattatttccaatattagtagaataagtaattttgcagcttataatgtggctaatttacgctataggctgtgttaagcatgcttctttgacagaaaacacactctttttccatgacaacaggactggactataaagggcggggcggtaagctctctatctttaaggataattatacttgtaacttatggtataagtaaattatttttgaaaaatatgcaaaatataattaatgaaaatatttgtaataatttttatattatcgaaaaaatatttacaataaaaaaattaagaaagataaatgttttggactttggtaattaataattaataagattgggtaataattttttttaggaaacaataaaaacaaataaatttttgaaaggattaataataattcaaaaataaccattgtgaaattattattatgatgtaattatatgaaaaataataaataaagaaataagtcataatagttggcttttgttgcaaaaaaagcgcattggcttagaaatagttagaaagaatgaaacaattacaacagagaatatggttgtttgttaagagaagaaagaagaagaagaaccagagaagaa

SEQ ID NO: 299218 - DNA, 1135 bp, Cannabis indica
ttgtcaaaataaaatttaattataatctgatctaaaagtattatgactaaattgtttacatttcctgtatctgttcgtattaagaattattttcaagttgattatattaaaaagaaaagttgtcaaaaattaagctcagggtcctatttatactattttagaaaatacatggtccattttatcatttaataagacacatggtccaatcggtaacttttgcaaaatacagagtccaaaatagtatttacccataagtatttaattatgtaaaactataatttattttatatgatcacctaaatattatataaaaaagtctaatatgtttatttgtgtgacttaattttctatcaacaagtacttatgcaagactcataatcctcaaatctatttcttaaaaaattcttttagtggttaaagatagaaaaaaattggaagaaggtaataatacctaattgaagtaatagtaattttcattaatctataatcaacattgtgagtaaatgattatattcttctcatacgtgttatataatatattcatctcttacattttttatatatgtatgtttgtagtgtattaatattgttgtaatatatatttaaataatcttttatattgttcttctattattttataattaaattgtaatttattcaatttatgtaataaaatttctaacagtcattgttcctaaaaagaaataatttgttactattgttataataaataaaaacctaatgaaaaagaaggacaagattatcaaactttttatattgtcggatatgtggagagaatttcaacctaataatttttgtgcttgaaatagatagactagtacacagaaccttctctaatattaattattattaaaatttatatgaccagctggtataacatgttttcccattatagtagggtcaaagattttgggctttattttcaatgaagttattcattgcttaaaaaaaaaagattttgggtttaattgtaatataataaattttgcaaaactttatttatttatatatttgtaatgaaatttaaaactattttaagtgggttttgtttttttttaattgactcaaatcggtatctttattaattaatcaaatcgttaaaaacaaatagaac

SEQ ID NO: 299219 - DNA, 1931 bp, Cannabis indica
caaaagaaacaaaacaaacaaaataataaatattacttaaaaaataaaaaaaaaaaaaaaacgggtcgggcctaacccggcccgattatctcgggccgggcttgacccgctaggccaaaagaaggagtcgggccgggccgggccgggccaaagtgatgtcgggccgggccgggtttgtggcgggccgggccgggccgggcccgactgacattcctgtatggtacacctagtattcaataaaatctttgtaattgataaattatattacttatgcctaattctgacaataggacatatttttatactagtgcacatataatcataaatattaaatatcaatttaatcactaacattctggtaattatctactaatttctatgtctaattgtgtggtcattacaggaacagacactattcaacaaaaaagacgtcggttacagttgatcagccaactataacaaactatttataatcaatggcaaagggttaccgaccccttaggttatagtccctatatagtcgtcgattttcaacagtcgggaagttaatactcgactatttttaaccagtgcatattccaccagttttgtatcagttataggagctggcgactataatcgacgaaaaaagtgtacttgactgtttaagactatcggaaacactttttttttgttagtagtacctatatgttttttaatagaaataactcaacaaaaacaagaatattataaaataataaaatatttaaagtcaatcaacaataatatattaaagtaacatcaaaagatgccaaactagatgagaaagtcatgggaatttaaaattatgtcaaccagcacaataaatactctacatattaaatattgttgtttttgaggcatcgtacatgttcggaatcaatataacatatatcctaattaggttacacatttaattattctaacaaaaaaccttatcgtttcctaattaattattgacatgaaatgataaacaattgtaaaagaaaattaaactcaattagaaacatatgattgatctctaggtagaaaaataaaacaggagggaaaaggaaaagatatatataggaatatatttttaaagggatttggaaaagaccccgaatgatcaagtgatatgtggaaaaagttttgcctttgagaagtatatgattattacattattaattattttattatctttttcaaaaaaaaaataatgtacttttaatatctctgagtatttaagatccttgattcatgtaatagcatagattaatcacttgtcttagtttactgacaaaaagaaaccaatattttagatagagaaaggacaaaaatccaatattttaatttttagagagagaaaaataaaggaaacccaaaacgttcaacacatatatacgaaatgacctctttagcctcatcttcttaagatcttcaaatctccatttctctagatctctcttccaaacacacttattaaaatctaaatcgacaaacaacgaatacaaatcaaaatacactcgccattagtggaagattgttggagaaaactaaattggcaaaatatggtacaacactatagagtaattctggaaaataaaatacccaaataaatttcaacaaaacaagactttttataaactccttgtaaataaaaattcttttaatctctgccattgtcggcaacaaaagctgatttcagcttcaaaggctttcaatgtgagcctccaacatttatggagagatgagagaagttgaaccgtttcttttgttgaattatatttttagatgatttgcaagaattttagtatattttctaacttatttgtgcttgcagtgattctactttgctaatccagtgttcagggccggccctgacttttagtgggccatagaaaaaaaaaatattttggactcttatttagaaa

SEQ ID NO: 299220 - DNA, 1986 bp, Cannabis indica
aaccatgcaacattaaatgttatttgtgatctatattaataaataaatctgattatattgaagtaagttttatttagggcataaaaccgaacacagcccaataagactgtctccacaaataaacataaccatagcttgtacgcatcttctggactctcttaggctaagaacttattcagaagtagtttcacgttcacattatcgggcgagttgaaatagagttttatcaaccggtctgatcgcgagtgggcacttttctcctcatctattggcccctatgtgtagttgcggcttgtaatcaatgtaaactcgaccacacaaaatcttatctcattcagtccaatgtaaaattgcgtttctcctgtcttttgaacatcaactttcattatgaagcatcagttggtgaaataatactgaagaaaaggataaaggacaagccctctaaaattgacctaaagggctttctttcgccttatcagtcaaactgtgtttatcaaatgttagtttaataatcttattaaatatactgctgtgtctataagtcaaatggcatgtaaaatgcttagataatagaactataagcttcaaaggcatctgcaaaagaaataaaaaaaaaagttagcacaacaaaactatcgataaatcgttgagaaacaatcgataatatgtcgatcatctatcaataaacacaaaattgtcaaaaattaataacaaccacaatagtaaacaaaactatcgataaacaatagataaaatattgatatcctatcgataaatgcacaatttagaaaaatatggctacatacaaaagtcataaactataatgtgtcgttataccattggtaaacacaaacttgtcaaaaattaattaacagccacaatacaaaataacacaatcgataaaccataaataaaatgttgatatcctatccataaattcataatttggaaaaatatggtaacatacaaaatcatcgataaactatagataatgtgtctatataccatcgagaaacacaaacttgtcaaaaattaattaacagagacaatactaaacaaaaccatcaataaaccatggataaaatgtcgatatcctatcgataaatgcataattaaaaaaaatgtggccacatacaaaaattattgataaaccatagataatgtgtctctatactatcgataaatacaaacttgtcaaaagttaaataacagccacaatactaattaaaaccatcaataaactatagataaatgtcgatatcatagtgataaatgaataattgtacaaaataattaaggcaaaccagattctgccgataaattattgataacatatctatatcctatcgataaacatgcataatgacaatatgaaaatacaactgatatcctatagataaactattgataaacataaaacttcaaaaaaattaaataagctacaacatagcagtagtcctatcaaatatcattgatatcctatcgataaaccatcgataatctaccaataactctgtaaaaaaataacttcactagaaacaaaccacaaaatcaacaagatacacaaaaatttgagtaattccacaagaacaaagaaaaattcacattcaaatcacaagtaataaagtaatctagcaaaatcaaaagaacaataaaaaaactaattgttttttaaaaaaaaatggtacctttttcactcggttcggtggtggtgggtgtcgttggtggtggacttgacagtggtggcgtttgaccgagagaggaacgagcgagaacaactaggaacggggttggaccgcagtagtggtggcaccgtttaggaggggttgacgttgctactcaagaagtgctagtgtcgtggtggtggctttgcagtgagggaggtcactactaaaaaatgggtttctagcttcccttttttcaacccattttataaaaagggaagctaaagggtgtaaaaattcccggttattgaaaattgacctt

SEQ ID NO: 299221 - DNA, 8878 bp, Cannabis indica
cggggacgagaaaaagaatagggggcagggacgggggcgggaaatgcaatttttgcactgccccatccccatgtgcatccctagccacgagcctatagctctgcagaatcaactggaatggaacaatcctgacttctaccaagaattgggcaaagtagtctcttaatgcgatatgagctcttgctttgatgtggccccaactctaagctccaaagtcgttcacacttgagctggccttcttctcctttagggagagcttgttccagaatagacaaggatactttaaagtctgcattctttctccacgtcttccaacattcaataattgcaaaactttttagcaatgtggtccatctcccaacgagactctttgacttttccctgtgtcgaatagtcatcctccaattgattttattctgcctcttcaatgttttgaaggagctcgaaaagccgtttctcttaagtcatagtgagaactaaaaaaggagaagccaagtagttagtaccaaaacaaatcaaacagtaagggtacgagagaattctccccgacaactgctttgagaggttccagccggaccctaggtcctagagttagttctctagggaacataattcctggacaaatgaacgggaacataagaaagggaacggaatgtaaccgtattatggaatggaactataagggtcctgaacctagtaagcgggacgtaacagggtccttagggacactattagtgtccaagagatcaacagtaaaaaaaatccacaagaactttcctagggcaaggtctctacgtttagtttttccctataaattcctaagtcctcaggcagacagaaagactaaaaccaccctacatagtggagtcatagtacatattttaagaaaataaccataaaaatccgaaaattatggcatcaccctacaatgcactccctagagcctatttacaaagaaaatagcagtgccaaaatcacaaaagaaggtacttaggtggtatactcagagctggaagtgttggattctgggaagaagcaagattcttcacccaaaaatcacttagcctcttgataagctcgtcaacgtccttctagaagtctgacggagtcgatgctgtggctagggtaaacgaagtagcgttcagatagatttttgattggaattgtagaagacgaccatgaagatcagtgtaaggatcgaacattcaccaaacttatgggttttggataattttctctctaaaaatttgaagaaaaatggaaaaatggttaaagtgccaagcaatcgatttctctcttatttataaggaagcaagcaatacgcgtgcctctgatccatgggcctagattgaatctgtgaaagtgcaaatccactggatctaacgctttacgaatgccaaaggttatcattaatgtgatttatagaattaaggacacatgtattactgataatattcacctcggacaactcactagcataactagtcgttagtccgtaaaccgaggcaacatgtactttcgcaagccgcatgacatacacgaaccaaagaatccactaatgaaatatgaaggttcataagcttccatgaccttccactttagaatatcaaaagacttaaatcattcatggccctaggtactacaatgaatttggatgatagttgcaagcctctatgactcttgagtcgcaaaggcttggggggtaaatgctatttgtattttttggataggtaacacgtgtaaatttagatcgacctacttagcctaacatgcccattcactgggcctaggtaagtgaccacccgatccatgagtaaggttggacgaggaatccagattacaccactacttcacaataactaagttgaacgtgtagtcctagaaggaaaacacttgttttttcaacaagtatctagagaaatgaagatggatgcccttaggggtcatctgggaagcatagtcgaagaggtatcttggagcgaatgagtgtttgggaaccatcctttgtggtatgcttttcataagaatactaacaaattaggcggcctttccctatgtcagaccttggaaatgtgcactagggggtgttcacggattgttttggttcgaattttcaaattttttttcaaaccaaaccagtattatcgtttttaaaattcaaaaccaaactagaccaattaaatgatcaaaacaaaccaagccaatcctctcaaaaaaagattggtttagctcaaattcatggtttgtatttcatagttgctctaaatttttgttacagtaattgttcattttttctgtatttttttttaactttataatacataaataacaataaaaagttattatcataataatattaagtcaatttcaatattctacctaaagttattcgtaaatatcaatatttcatccaatatatatatatatatatattaagtatagatgtaataattatacagattagtttggtttcaaccgttattaagatttatgaaatcatgatcgaactagagaattttaaacggtcctaattgaataaatcattcaaaccagatttatttggttcgatctcaaatagtttggtctgcatttgttggggttcaaaaccacggattacgaattatataaacacccctaaggcgcacatgaaaaagaggatcaccttttttgagccaatgaccactactttgacattctcacaatagatcgacgacttatgcccaactgtcaccatcatccgtacctccgtgtaactgtggacctcctcaaattaacccaaagtcaaatgttttaatgtaatttatcccaccagtgaacttttttcaacctacaaaccctaatgggtccgagttagcccgaccattagccaagtgtttatcgagatttttagaaactgattaatgaagaaattaatcttaaagaagaataaattaaagacaatgcaacacggacttttacatggttgggtaatgagccttaatctacgagttaatattattaatcctgaaaagctatcgagtattcttacacaagaatgttattgccaaagtcttagaaccttaatattttagcccttagtttgtgaaatgaatttctaatcctttgcatgaagggatcatgttctatttataggctagagtcgagttagtaggtaaatctagacctgctagggtttaatttgtcaactaggcccactgatgggtcacaatacaaattatattgactttggaccggttttgtaaggcctagaatatgagataacggtcgtcaatacagataggagaccacttgatggtgacaggtgtgatgcactgcttattgtgtaaagtaaatgttagagaatatggcaatggacaaaagttatgtcctttttggtggtgcgcacactccccaagtctgaaagtaaatgtcagagaatatggcgatggacaaaagttatgtcccttttagtggtgcgtgcactccctaggtataggggacaaacctttgatttggtgggattctgtatcaaaaggatgtcgcataggatgatttgcagatgtttcttcagttgccccatttcgaattaccgcatgtattcgtataggctttgtcagacttttcatcttttaggcaactttcccttccgggactgttaaggttcgactttattttgtctgtaaattggaccaatttccaaatccggagatatgatgaggatccattgagagctgacccactagcttaattggacttaaaaatgggcccatctcggttaattttaggccttagagatacacgtgtcagctatccagaaacacagataacaccaaggagcatataaatatggaactttcccttcatgcaaagggttagaaattttgagcaagaaagacttgtatgaaaaatactccatagcttaagagctaataatattgactcgtggactaagttttattaacacctccaaccatgtaaaaaatctcttcttgtccattttactttcttcaacttaatcttcttttaaatcggttatcgaaaaacttggtaaacataaagaaatacaaaatgattgtatatgttaatgtaaaattgtggtaaaatatggtatatttgaaagatatctcataaaaaataccgggccagaattttggatcttatctgtttgaaaccctaacggctaagcccaccagtactacaagaatccaacccagcccagcctatcccaaatgacccaaaagttctttccacttccaaggactcaacatcatcgtccgccctcatggtgcttcctcggcaataagcacaaaatataagtacatttttccacaaattccctgttacagtcttttgttctgctcctaaaaccctagtaaccattatcatcactattaaccatcggagctttctctgacctctattatatccccaatttccgatggccaacccatcggagtctctcgtctccatcgccgggttggtctctactcagtccacctcgattcgggttcggatcttccgatatgatattcctgccattgtcaagaattcaggttacgctaattcttctccccagcttcaatctatttgtatttgtaacttatccgttccatggccgagttattgatatttttgaatttgagtgagtgcgctttgtcctattgattgaatttgattataattttatcttttgttgttgcagagattaattcggagttggcatctagtttagtagatgtaatatttaagacattgtacatttatgatgatcgagtttcaaggagagctgtagatgatgtcattatcaagtctctgggtgagactattttcatgaaaagctttgcgggagctctcgttcaatcaatggagaagcagggaaaggttcagtcatacgttggttgcttaaggcttcttcaatggtcgttatatctccttaccaagagccagtttgccacagtttcgaagaatgcgtgttgtagagtagccacagcacaggcttcgttgatccatctccttatgcaaagatcttttcgggagagaagggcttgcaaacggacgttttttcagttattttctcaggttaattccgcttaactttatatgcattatgtattattccttattttttattttggtaaaggtcgggaatttagacctttaatgtagttgcaattagccaagtacgacaactctatgcattttatatttacattttgggaaaccttctcagctaaattcttaccaaagtatatatcttttgcagtcacctgacatctacaaaatgtatatagaggaattaaagggcgggcggatcccatacatagatagtcctgagtttatagggttattaatggagttctcgattacttcaagtaaatcatcttctttagttgaacaattcaaggtaagaaattgttggttactttattttcccttcccccttttttgtgaggagctatatgtgctttgtgtgttcaaagtgaatgggaaaaacagtccactaggccttttcatctaatgctgctagatggtaatactgaagtgatcatattgaacttgcttatattgggtcagttaagacttgaatttctgtttttctcttcacagccaacatttcttgatatatacgttaaagcagtcctaaatgcaagagagaagcctgcaaggggtcttagtgaggcatttcatcccctttttacacatatgttgcatgaagattttcagagtactgtggttccagcttttcttaaaatgctgaagcggaaccctgagattgtattggagtctattggcattcttttaaaatcagtcgacctggacttgagcaagtatgctgttgagattctttcagtggtattgccacaggctcgacatgcagatgaggccagaaggattgaggcattggcaatagtagggtgtttgagcaaaaagtcaagtaatccagatactttggaagcaatgttcaatgctgtaaaatctgttcttggaggtctgactttaccctatcattatgtttcattaaaaagaaggaagataagatctagttggtttggcttttgaagaatatgaagcaatatattatttttttaactgtactgtatctaattcttcttctaagctacttttaactctagatatcaatttcaacaggctcagaaggaagacttgcatttccttaccagagaattggactgatcaatgtgctgcgagaattgtctaatgctcctgatggaaaacacctcaatagcctatcacagaccgtatgcagcttccttatgtctttctacaaggatgacggtaacttgttctatcctctttttttttctttttttctgttacatgttacattccttttgggtgaaaatttgagtcccttcagtttatctttatttgacgatagtttttcaatgtcttgcatttatattgttttaatttgacatggggtgtttttaaaaggtaatgaggaggttaagttggcaactctgtctgcgttgggatcttgggtagcgcactatgctgatgttgttcaagctgatgttgtttcattcattgcttctggtcttaaggagaaggaagcattaagaagggggcaccttcgctgtctacgagcattatgcaaacatgctgatgctgttttgcgggtttgttggcagccatagttttatttggttgtgcttctgttggcttgtattttataggattttccatttgacctatatcgtgattatgaatttccagatctcctcattgttggtccctcttatccaacttgtgaaaacgggtttcacaaaggcagttcaacgtttagatggcatatacgctttacttttagttgggaaaattgcagctgttgacatcaaagcaggttctcatcatcttcttcttttgttttaatttctacatcggtgagcatgtacaattgttgtttgctccacctattccctcttttgtgtattaattttattaactctgcccttctaaataaatctatgctcagatgaaactgttgtgaaggaaaaatatggtctttggtttctcaaagcgagccttctcttgtaccaataactatggtagctacttaaagattctttgttctttgaaattgtgtttcctatgttcctatttttctctcctttgatgtattataagctgagtactgctgcaggcctcaaagttaacaaacgaagattgtatgacatgtattgatcttcttgaggttctggtggtagaacattttcacaggtgctgttcctttatcttgttaggaatatgcctattttattatttaatagttaatattgactattcaatcttttgtttctttactatacaggattgtagataacttttctatgagatcaattttacaggtgaactgaatctgttggttgcaagactttatctttttgttttggttatgaagttcaatctggcgctaagagattttttgtgtggtgcagtttgtaatctttttggtatgccacccaagttgggaagttcgaagaagggcttatgatgctgtcaaaaagatagttgctgctgctccacagttaactgaaactcttttatttgaatttatgaattttttgtctcttgccgcggaaaaactcttgattactaaaacaaggtacacattggttttaagatcctcctcttcgtagttttgctttttaataatttttctcttttggatgaggggtgtttgatatgtatgtgtctatatatacttatatatatttattcaagtggtatagagggtagcttaattatattatgttcttttctcaaggaaaatacaaaaccagtaaatgtctatgtatataaaatatactttatatacatatatatatattcaagtggtagagatggtggcttaattatattatcttctttctcaaggaaaatacaaaagttgcattttcatatttacaacttttactattttagcttctctgtacctgctggttgtctcttcttgctaaatcttattcatcacatcatttgacaatagatcataagatggttttcacggtaatgattcgtttatgtattttgcggaacaaaatttgttaggagggtttttatatatattaatctcgtatgcttttaacatttgtgtatagtacaatgtgttctgtatgtcagaagaaaacatctgtgcccctctgctcatctttattcagttattgtataagcttaggtccaattgtttgcagcctgatgcatgttgattcgtttttctattaattgccattctttgggtgatctaaattcgtattgctgtagtgacacagatagttcattggacgctcaagtgccctttcttccatctgttgaagtttcagttaaggctttaatagttatatcatcagcagctctcgctgttgatccaagtgcatccatgcaagttatgctctgtgcacatcatccatacattgttggcaccgcaaaaagggatgcggtttggcgggtaagtatttgttcatttattggtttaaaatggacttttcctttattttcatttcaatgtcattgttaatttcatgtattaaagctcactggtttaacctaatatgtagttaaaggattaattataatattatatacattaaataactttactacaaaatatgtgcataataaattcattagtttagacagtatatttagtgaaaacttattttcattttcttatactaagtatataataagaaagttttcttgattaattatgaatatggactatttgataataaattgataattacaaataatcaataattttaaataataaacatgcactgactatttatcttttcttggtttaacatttcttggtttaacagaatatacttaagaatattctgttaaatttaacgattaggtttgatctcccgtt

SEQ ID NO: 299222 - DNA, 5690 bp, Cannabis indica
gaatttaagtttaaaactccggactttcgtttagtacacaatctaaagttataggaatttacaaaacaaaaaaaccacatatttgtatcaacataaagtatgtctcacaatttgcattatgctatagctgaggggctacattaacacttcaaatatgttttaaacaaattgtataccatatttccaaaacatgtataatcaattacaaatttatagaaattaatatgatctgaaaacaagtcacctctgaaagaacacagctggattctccaagaaaatcttgatccttcaaattcaacatctgcaagcaagggcgaagctaatataaatatctaaatgggaggatagtacactagagaaagtcctaaaaagtaggagtatcatgagatgacatgaaatagtaatctaaattacaatttcatttaaagttgggtttgagtgaactattaaaattttatattcatgttcatcttttttttttttatcaatgcattcaataattcaaatttataaatttgctaaatctgacttaacattcttttacaaaaatgttcacgatacgaaattatgaagataatcagaaactcatactgaagaaccgtatgtaatgaaagacaatttgaaaaacataattaataaaatttgatgagagagagagagagaaatctgcattgaaccaacttgaaatgcgacactaaagcattccgtagtactgagaacttaaaagcaaaaaacgaaaaacaaaaaatacctttacaggtatatggtgatattttgtatcaacatcatacaaatgaaatctgggaaaaacataaaaaggaaaagtaaagttaaattctgcctaagaaaatttacaaacaatatacttccacagaactatatagaaaattgaaataatatttaaaaggacttacattaaaggttgcactatctcgaattggtatgtaactgtaactttgcttatccatgtaggatttaaagtattcagtatcacttctgtacgccctacttcctcaagtctaccatcactttttttaagaaagacaacagccattggatcactctgcaattaatgaaaatgcttttcagcctaaatcataaggtcacattctttaaatgaatagcagtttcatgtgacacgatatgacacttcataggttctgttcggcacaatttttataaaaacggttaaaaaatagattattgaaaactttatggagaaactaaattggtacaaaatttatggaaaaactacagctaaaacctaaaactggtgttaagtttaatatatatttatttatactaaaaatatagttacttatttattatatattacaaaaaaaaaattaaaataagtacaaataaattataacaaaaataaataatctttaaatctcttattttttattttgtttcaaaaaaataattttatatttcatatttttattacattaacaaaccacatcaacctaaaattcttatatatttgagtttctaatttatatttttatacatgtgataaaaatataatttaaaaatgctataaataatttttattagatacatataaatttatattttggaaaaaaaactaaaaatatataaaaaataaaaatttatataacataagtttgtttaaatttaatattataatggactatattataacattatcattatcgttataatggtatcttaataattcaaaatactttaaaatttataatttatcaaacttacaactcaatctttttacacaattttgctgcagctgtttttttttacagcacagttacagctgcttttccccacagcacaattgtgctgaactggcccatagtggtgctataagtgcactttagcatttctcaaatcataacttagagttctaacaaaaattaaaaaaatacaaagagcatcaccatcaaataataatcaaacgtccaaagatgccatattagaacagggaattgttactcaatgctaggtgtagcgtgccgacaaagatggcacaatacaagggccaagtggtggcgcatgttgacgtgcatgctggtggcatgttgatgcctagtttgtacgacagtgatattttcgtaaatatcttcaatatttttcaaattgggacgggatttggtatttgccatttattttgttctaggaatacaatagcgcaatcaaatttgaagaactttgacaattggtatatgttgatgaccatacgtctaaagagcaaaatcatatatgttcctagtagaaggctaaaaacttagaatgctccttaaagggagagaacctaatgtcagctctccaccaccacttggcacctcggtgctaagtgggttactactcaacaagactagtagggctggcatatgaggaccatgagaggactcatatgtctctatgagttggagtactcatggacattatcaagccgtttctgtagtacgtttggagatgctgccaaaggttagctagtacgtttccattggcttttcggtatgcagcatgcatgaaacgtgaccccgacatatattgtggtgcgcctgggccatgagtctcaacacgagatgacgcagtagtcattcgtgggcaagttggcgtacgcacatgagacggatgcaccatgctagaaagagtcagaggtctgatgtatgctactacattggtggtttgtctcgagggcctgccaacatgcgtggaggcatggtgccttgagaattagaccatggacgtatgagagtccttgggccatgagagagactattcaaacagtatcatatcaggcatgactaaaggtgtcgacacgtcatcttggtgttggcaaacttggcatctggctacacatgctaccttggtcacgagtgactaggtaagtgacagtgttgggattttgccttagcatagtgagaacttatgaacaatgtgagtatcttggctaaagcgcctagacccatggacgcactcatagatgcttgtgagcatgacttagggagagttatttgagggacagaagtgtgcataaggcacacggtcgcgtgaaaaatgagcttgttattactcagatggttggaaggctgctacttgaaaaggcgagcccatgacaattagtatcagaaccatgctcatctcagtggtaggtgaacttggttgggctatcctacagatgatgtaggcgtgaggaaggatcgagaggattcgaatgcttaaacaagttgtcgttgagccagttagtttcttagagcagatcagtaggctgagaccgagttgagactgggttgctcttcttcgtgggaatactggacatccaagagggggacagcgatggttaatttgaatcaagttcagggatgctagaaaaacaactaccatgtgcaattgtggagaggtactaccaaatggttaaaatttgttggcgtagtacaaggtttgattatgtggtccacatacagtatgtttggttcactaggccgagtttgcttgagtgacattgtaagccgcaagagtgcttttgttgaaaaggaagcttcttggcatgggtgtggaagtatggcaggagctgtcagacacttgttagtcacgagagaggtcgagagttgataaccatgatgattcaaattgggataggcataaaatgcatcaattgctagttatgcatgcaaagaggggcagcacatgaagaccaagtgggcagatgttgcaattgtcagaagacagacgtacttggaggtatttgcatgtgacttttatttgatccagacgagaagcgtcgagacagttgagtgggaagtgttggcttgtagaaaagccagtgggcataagtcacacaaaggcatcgatagagatgttgagttgtggaatgaatgcatcaaagaagccagcagggctaagaagactgagcgtaagtgttgagatgacactagagttcgaatggagaccggagatttgtgccagtgagacttagtggtcatgtgagcctacgaaggtcaagaggggtgctggagtttgcatgaaggccagagggatgcaccattggaacttagtactttagggaagccctgaggggcgcgatgctagtgtgaattagatggatggttgggtggactacgcacgtatgttgaaatcgataggcatgctgcatgagatagttaactcgagagtcaagcccttctaaattgcaacgaagtgcatgaagagttagggctatcaggcattcgcatgtgggcatgttgtcgaggacgccaacaaatgaagtgggggagagaccttcacagttcaatcagcaaaccagttgtttgttacaagaatcgagatgagtattatggagatagattgttgttcagaatgtaaagtcaagaagactcaggacacaagcagtgccagttatttagggtgaaagttagcagaattcaagtactaagataacaccatggcaatgtttgcctaaggtgaaagttagcaggactcaggtactaaggaaacatattaatgtcgaggggcgaagagtcaatatgaccaggcactagttcaacatcttcatcaaagtgacatgtgtaatggagggatcgcatgtgagtgtgcaattagcttgcaatctataccttaagagatatgcttctaagagaaaagtttttcccaagttaagtggaggagcctacaaattcatatatttgaagaaccagtgtacttgttcagttttggtgtgtgaatccagaggaaaatactacaacagatgggttgttcagtgcaaagacatgcatgattgttgcaagctgcagatagacaatatgcatgggcataggctgagatcaagattgaactagtttgcaacatgttatgtgtgtgctttgtatttataggaacactaatgttgtatgggacattgtaagccggatggttcaaagagcatatgtcgatgggagatagcgaattgggatgacttcaagccttaacagtaagaaatcgtgttagcaagtttgtcaaaatttagcgagttctcagaggatgcaaggtggatttgggtgatgaacttgtgacacaatgttagagagttgacaagagcaaaaacaagagggcgaatttgtggttttgaatggttgctagatcattggccacttttttagaagctcagaggagcagttttgcattgggtaagagggaccttttgcatgaagtcgtgggtgtgcgttagggatggagggccagtattgagtacttcgcgaaggttttgggtgcaagagtgttttaggtgttgtattgggtgcaattggcttgcgagcctcgtccaggagcaccgcctcaaattttgacctttgacaagagtgtcgtggtcgattgccataaggaggatggtgtgccatggagttatcgtgtgaagtttctggagagacttggctttagtagaagcatgttttgtacgtgcaatggggtacggtgggtttgcgaacctcaccctaattgttgcaatacttagtccttgtcaaaaagaatatgcattggacagttagcgagtgagctactatctgaggatgtgtaagcttcagagttagtgttgcaagggctagctggtagactggagggacgatgtgatggtttggaaggaattcatgttggaggaaagtgcggaggcactagtccatgggtgaatctgaatagcgacagtggcacaggttctttgatcaagtcca

SEQ ID NO: 299223 - DNA, 7761 bp, Cannabis indica
aattgtattcaaattccctttttcttttcctttgctatttgatcgacttggttgaagtgcatcaagttggtgaatgagtaagagacaacttcgattccaagagtgaatgaaacgaacttacaaatcagcattgagagttattgacattttcttttacaaaaacgaattatacagtctaatgattgaggtgttacttgaatttatgagggcaatggtgactgacctacataagaggttatgcacaacagaagccagagcttgtcgttcctaaaccaaatgcttattatgaactactggagtctgccgtggaatccgaattgatcgcgctaaaaagttccatggtttcaatctgcacaagagaaacagaagctcagtctgctgataattcctgtcttttggatttatcaccttgtgaaaatttgtcccgtgaatgaagtaaatgcaaaatgtggagtaaagaggagttcagattatttaaattgctaaactattggttaactgacatatattaatatctatggttgttagaaagaggatatgcttatgaatgtataatcttgaaattatatcagaataagatgaaaagtaataagttcaataacaaaaagagaagctgattctaataaatgatgagatatattattaatggaagcataagatttcattcggtacaattttttcttgaagtatagaagttaggatccttatcccaaccccaaaatagttaaaccaagaaaccatggggataaaacaagcttcataattgcaagatatctttattgcagaggagcaattgaatagtgaaattagtgcatacttcactctttagcttgacaagtggtacaggcagcaaatacattgagtcaattcagagcggctgcaggcacgaggctagagtgaagttctttcacaggagaataccagaagaactccatcaataattatgccacattaaaatcttttgtatcccttgaactttgagagaagatgagcatattgccccttctccaccatctgttttataactttgtgagcttcagaaagcttcccagcatttcgcaaattactcactaaggtactgtaaacaagaaaatttggattacaacccctggactccatatccttaagcatcccacatgcctccttaaatttaccagccatacacagtccacgaattaaagaattgtaggtgaatacatttggaagttggccatttgtgatcatctcatcaaacattttctgagcattctcaagctccccagccacaacataccctgtgatcattacagtataactaacaacatctggcacacacccgttcttcaccatttcatcgaaaaatatctgcaagcttccaagttcccagccctactgaatccatctatcaaggtggtgaagtgaagaacccccggatcaaaaccaacttctttcatatgattcaaaagatttagagctgcaagtggtttgtctcctttgccaagtacatggagaagaatgttataagtatgcaaatctggactgaaaccacttctacccatttcatcaagcaaagtatgaaactgatcaagctttcccaacctatattttgcagacattagaacattgtaagtaaaaatatctggagaatgaccgtcgcccaacatctgctgatagacccactccatcagcttatattggtttgccacaagaaggcaatgtaaaattgcattgtaagaatgcttgaaaggcctatagttaaatgtctttgacttaatgaatttttctacaactttcctagccaagccagcctctccacaagtacaaatcaaaagattaaacgttcggcctgtagtagggaagcctttctcgatcatctcgtcgactagcctccacattgctttaaattcatcacactctgcaaaaatcttcatcagtaaatggtaactgtttgcagtgtgcctgtaattctcctgctggctagaccatatgaaaaacttaaacccgagttttgcacaccgcattttattcgaatgatcaattgatttcaatattccagtaagtactttcctcacaagcagccctgaaaccctaatgtcaagctcatccaaggccaatttcgaatcgaatccagggccatcttgtttcaaaacctcaagaactctttcagcatcgatccttgaaagttcaaaaaagctctgcctcagggaaaattgcctccgaacattcgtttcaacgggttcctcattcatagcaaaatcaaaatttgagctactccacattctcttcaaaggttcctcgaagctatcacatttactatccccactaccgaaatcagagttcccattacaaaaacttcttattaaatttaaataagacttaagtttgcttgttgaaattaaataagaacaagttctccgaaccaacctcggaccacatagagagatagaattcatggctaaaacccattattacaccaaattttccgaactcaatgaatccaatagacccagaaatagatagtgcagtaacactgaatggaactctagagacttcgaattgtgaaaattaaggatacccattaaaccccaagagagggagatttaaaagtcttagacttgtaattgaatgagtgtgaagactaacaacataccaggaatcaatagactggaatgggtggttggagtgtttaaggtggctccaactggaacgataggtttccgccgtagccaaagaggaagagagtgcacaacgaagtagaaaacagcgccctctgttctctgggctttctgtttggttttgtaattctattgtcgttttttcttgttatatgtagtttccatactttcttgtcgtttcactttatgtatattttctagttccaaacaaacaattgcaatttcataaaataaaaaaaaaaaaataaaaaaaagacaaacgcaatttagtttttaattaaaaataattaaatacaaaatctttacatgttttgtcatctcatcaacttgtttagtctaatattttctttcataattttcttttaggtaactataacgagaaagaaccacaaaacaaataccaacgaaggagaggaaattaaatcttccaagtttgatccttatcctgccttaaagcttctctagcattgtgatgagttgcactgttgaaagatccagagatgtgttgtagaaaagcattagagaattgagataagaatttttttaattaacttgacaacactagataaagcagaattgtccttccaagaattgtttttgagactaactgcaaactatctgattcaatggacacgagaaagagcttgattgcaaaacaccaacgcaggccttctagaagagcttgagtttcaacgaaaagaagtgtagagacaccccatttggatatggagaaacttgttatatgttgattttggctgtttcaaatggaagctcccaggcctgttcttagctgcttcaagtcaagggcatcaacggtaagagtgaattgaccatgttgttgagtgtgagctgctgaaacctcatgggatgaagaggtcttatttgatgtaggaggatccgagggactgaggctgggagaaagagtttgggctgcatggtaatcttacattaaagaacaaaccaaattttccccttcaatgggagtgttaggagtacgattgaaaagagcattgtttctcctgttccaaatctgccaaactaaactaataaacaaagtgaaagtgtccttgttaaagtgatcttagcctcatagatagaactctttaatgtcacaattacaattgtcaatataaaagttttcgaaggaggaatgtttccacacagacttagctctgaggcagtgaagaagagcatgagaaaccgattcgacttggttgctgcaaaaagggcagaaagggctagctaaagattttttgtgaaaaaggttcaaactacaagggagaatgtggttaaaagccttctaggtgaaatgtttaatttttgggagaattttggtgctccaaacagttttccaccaatgttttgaacttttcatgttggaagaggatgggatggtcgagatgggcctagagttagctaaatgataaacagagttgacactaaaatttcctgagggatgatgtccccaaatcaaggtattgttagaagaagggtcaatagaaattttcaagatttcttagacctggtagtggtgggggaaaattttgttgaagcttaaggaaattctagcaactgtcattatcaattaaggatgaaatattgtggtcagatggattaaaattatgcaagaaggagagagagtgcaaacttggaacctagttagtgtcaatcaaagagatagacctgctatttcccattttccaaatgaggcctttcttagaaagttcccttccctaaaagagactcttctaggtattcgaaggacaatgaccttttgagacagtgagaaaatcattgtttttaaaatatatggctttaggaagggagtgtagtagggttgaagggttagtccagattctctaagcttgcttggcgattaaagcttggttgtgactcataagggatctaaaaccaagaccaccatgaaatttggaagtgcatagagagggccaatttttccaatgaatttttttcttattactacacaaaccccaccggaacctagatataagtttttgaagtgtaaggcaagtggtatgagggagtttgaaaccctcacaaaccagaccaagggaatttctaaaaaaatctttagaggcattggtggtgctcggggagaacaaaatggaggatttggccagattaacagtttggccagtagctttatggtaagagctgagcatatccttgatggcaatgctggaactttgagtgagaggggtgaaaaggatgttgtcatcagcaaagaggaggtgggaaatcgtgggagcatttttgcatattttaagaccaacaaatgattaccttactccctgacctggatggaagtagagagactctctgcaactagcaggaagaggtaaggtgaaagaggatcaccttgcctgatgccctagtaggagtaatgcttttagaaagggctccattaatagatgtatgatacacaacagtggacatacatctcataaccaaggagataaaagttgggggaaaaccaacatggttaaggatggcttgaacaaagctccattctactttgtcaaaagccttctctatgtcaagtttaataacagcccagccctacttgcctttttttctatactggatggcattgatgagctcattggcaataaagatattatcaaagataagcttatcggagaggaaagcatactaattctgggagattatggaatcaagaacagttttcattctgttggccaggattttggatataatcttataaagggtggagcaaaggctaattggtctataatcacttatagtggaggcattctttttcttagggattaagaccaagattgcatcattgactgaggatatggcagagtgattattgagcacatccaggatggctttgcaaaggtatttaccaatgatattccaatattttatggtagaaatgggcgtttgatccatcagaactaggagccttgtcctcagagaggttgaacatggctttcttgacttcatctgcagtgaagaggttgtctaaggctgaaaattggcttggagtaaggtgattagggatgcctgctaatatgttggggatagtagtttggtcctccccttgaatagtaaaaagttgagtgtagaaatcaataaaatggggaaggagagaagaagttcttctagccaaggaagcatcctccaaagtaatggatctaatgaagttgtttttttcctagcagaggctttgtggtggaagaatttggtatttgtatcccctgacttaagtcaattgactcgagatctttgtttccaatagatctcacttttatgcaagaggctatctaggctggattgaagagctttagcgttggagatgtccttggcaataggattgttcgattgaagtaagatttcaaggtctttctgtgtggtataaatctattgcttcagggaattctgactcatgctccagtttctaatatcctttatacaacttttttgtctaaagatgaaatcagagatggtggtggaacgattattatgtttggaattagaccaggaggagttaacaacttggtaaaagtgttaatcggtaagccaatgattttcaaagatgaagttgttttgattcctcgtgttcctaaggtaatcgtcaagggtgatctttaaggctccatgactcgagccatagaaaccaaggcagaagagggaagctaggggaaaaagagactgctaggggttgttggccacacaccagtcaagacgctcaagaaaagtgtcatgcttctaagtgtacttgttactaatatgagtgagaggtaacatgctatacttatgtaggaaagattggaagttagttatagcatgattagggggactggtgttagtgtttctatcattaacagaaagatatcgttgaaatcaccacaaataagccacgacaagttagaggcagaatcaaaaattctatctaaaacggtccaagtagaagatttgttactgtgataaggggaaccatagaaataaaagaaatgccaattcatattatcattaatattaacaataaaatctatatgactaagggagaaagttaaaatattaacattaatatcattattccataaaagtaaaagacctccccttaaattgctcctaggaacttcaaaagcattatcaaaacctaatctattcttgatgcgagtaccttgaccagaattgagcttggttcccataacaaaaacaaaatgggttagtgttgcttcaccagcagggagagattacaaaatgctcaaggactccccaggcctcaagcattccaactgagcagactcattttcctcggcggggttgcgaagcaacacctgccatttcctcagggtggagagagttgggatgacaacatcatcattctgagcagctctagcgcgcttgagcatgctcctaacggaacttccaacttgtgcattttgtttggtgaatgggcttttgacaccagttgtggttgtggtggtggcagcacttggttcttggatagtgatgcctctgctcaaacgcctagggcaatggagacgggaggagcaggggctttaggatgggctatcccctttcctttatcagtatgggtgatcactgaagtaaccatgataggtgagggtgaaagagtggagaaagccttgttcaatccagctgggggtatgaacttcagggggtgcaatggtgatgttctggttgagggttgggaccgtaaagtcagaacaaaggttcaaaaactgatccacgacttgttgaagcccttggttagagtcacttccacaggtcagatactcttcgataggggtggaatttgagagatcaaaggggttctttttaaacttagttttatcaggggcatggagggtatccttataaccgagttcaaagggaacttcagaattatcgcatctcatgaggtatctcccacatttattataaatgttatcgagcataccacaaaaatagcaaaaattttacagcccttcgtatttaaaactcagccatttagttttggctatcttacggaatcagatgttcatactgttggaaatattttaccaggatctagatttattaccatgtatgtttcattaacatccta

SEQ ID NO: 299224 - DNA, 1542 bp, Cannabis indica
attaaaaaataatttggaaaaaaaattttattatacaatatatatttataagtaatggtgatgtatataagtatactattagctttagtataataattaagttatcttacacatatataatagagatcaataattcaagtctcttaaaaaaaaaaaggtacaccccctcaatttttaggtctgccactaaatactctgaagtttacatatcatattagttaaagaacactctaataacatctctacacatcataatgtatcaataattggcattttaaattattattttacattaattaatttttattttaataatatgtataagtaattgcaatagatgtattatttaaaaaaaaatagaaaacaaataacatgtatatatggagaagttactgcaacactgtaaaaaaaaatgtattttagctaatatatatcggagtggtgagactacttctatgtatttataaaggaatgcattttatacaactcattgtcattggtaatacaaataggagtattatttataagagtagaaaagtagacatgcattaatagaactacccactagtaagttattagtgatatcatagtagaatttccataataattagtgaaatactctttggcctttgcaaagaataatagaaatggataagtgtatcaaaggatatgtgtggatttggacatgtcactataaaagatggaaaaaggtgggaaagcattagagtttagacaaatgggaagaattgttgcccacaagcaatgaaccatcatataaatttgagaatatctttttgtatttgataataacattgggaaattttaaaagaatgaagtccaaacaaagaagaaagttgtcttgtgtaagaaaacaaaatgctcctcaatacaagcaaaactaagcttccaagtatagttatgcctaccaccaacaaaatgatgtatataatatatatatcatgacttgttctgactcctttggacagcgaaagtccatttataatgcgtgacaaattgccatgcttttatgcaagtgattgtgtgtgtgtgtgtgcatgttatattaggtagcaaatataagtttcaatttttgtaactttcctaattaaggtgctatttgaggatatacaaaaaccctattctttattattatcgtgtctcaccattcactaattaaaatactatcacatcgttacatttatcagttacaaaattaaaaacactttatattttttcgttaatatgaagctttttattattgacactcgcttcacaattctgatagtttttctaaattgagtctcactttgttaatttatttcaaatatatagtgctaatatttacatataaaaaaatatataaaaaataattaaatatatataaaatataatactctatatttatagagcattaataataaattttaaaaaatttttaaaaataaagaaagctatatagataattggtctcttcccaattcaaaaattctaagattttaattttggtgcttatataatctcttacatcgtcgttttttcttc

SEQ ID NO: 299225 - DNA, 1749 bp, Cannabis indica
acttacgaattctagtactggtaagttaactaaagtagttggagatacaaaagaaaaaaaaataaaaaaagaaagcctaattatctagcaaactacctctaaattagataatcatatgcatgcacaacgattagatcgatctccaacttatctcaaagctaattaaggaaagaactaaaatataatatattattaaacattggcctgaagattaaacatgttcatccactccaaattgagagacccttcatttgaaaagtcaaagaaatcatcaacatcaaaatgggtactagtagtagccatgtttgaattatgatctttatcgctgattagaactttgtcggacgatgatgttttgttttctttgactaataattgtgtatgaaccttctcatcatcatacttggtcatcacttttggtcttgtagtattattatttggagtagtagtagtctccatttgtttcttcttcttcttcttcttctctttctggctcattttcttgcacaaatgagaattccagtaattcttgatctcattatctgttcgaccaggcaatcgtcccgctattaacgaccacctagttaattaattatacatcgtaccaaatcatcaaaccaaccttaattagttatctgtaccgtacgtatatatatagtacatatatataatatatgtataagtagagtttgcactaaaatatgaatagtgcctaaagtaaaagagtttaatcattattgtagtgacacaatctcctaaaggtcttgaaagttccaaattaacttattggaccctttataatttcaatattttttaaaaattaaaatgtacatgtgaagtttggaaattaatcccagcccattgaactccttattacattatttattattttatgtataacaaagtacatgtaagagtagaatatactatatatatattatatatagtaacctgttgcctaaaagtttgtgcagcctaaggattaaatcctcttcttgatcagttatatttcctctcttaatgttgggcctgagataattcaaccatctcatcctgcaactcttaccacatcgattgaggccttcaaattaagaggtaaacaaaataataataactgatcagtaattaatttgaagtacttaattataatacaaattaatatatatatatatatgtatatatacctgctatggctgcaacagtcttccacttttgtgcaccatgatgtgaaattacctcagcaagtttttgatcttcctctgcggtccatgctcccctgttgaatttgaaattgaaattgttttcttcttcaattggcttcgaaatcgactgggaactagaacccatattcactttctcttggactaaattcatgaaaaaaattattactcaagagagagaatttcttaatttattatataatattatttggtggagaggattagttagtgtgaggaattaactacgatcaactacctctgtgatcataattgcgggagggctgctttgaaagcaaaaagacatgaatgatgagaaagagagagagagagagagagaaattgatgattgagaaataaggagagatatcattgccataaaataaatttgtacaattgttaggatatttttagtatttaatttaggttaattttagcacatttttcggtttaatttaaattatggttggagcatttttatgcttttatcttttagttttgcagatttaaaaatagatgaagagttagaaaa

SEQ ID NO: 299226 - DNA, 2475 bp, Cannabis indica
cgcggcgagactcttcatcgccgcggccagatatgcaaaaactcaaaaaatgaagtttttcttcggctcagcacgtttttcagtgaatttctgcacccgagacctcttttactccaaagaacctgaaaacatagaaaacaagcgtaattccgtcccaacacagctaagaatgcacataaatcggatccataacataggctaaaaatagcctaacattgggtttatttattaacgggagatcaaacctattaacatcgttaaatttaacagaatattcaaggtatattttgttaaaccaaaaaatatcgttagataagcacttttaatatataaagatataaagtagaatattctacttaatattatgcaataaaattattgaataaataagcattataagtaaacatatatgagtgaaaatatgattatacatatgtatacaatactaacaaaaatatgtatgaaaataatattttgatgtatagaaaatgataatgttgaatgaataataatataaatcaaaaggattaaaatgaaaaaaaattctttccatcagccatgaagatcatgaaggacaagtataaatatatatacacaaaaatattaaaatttaaaataatcaagacagagataaaatcaatctcgcaccaacagttacaaatttatatgaattatacgaagcaaatatgaccatgtgaactcctcatcttcctcactcctcaatcagttaattgttttcgtccagctttctgtataccaccgaatgaccccctcagtcatcactgagcgagctcttagtctcagagatttctaaaatagaggagagagaaagtgaggagcaattacagcggcttgtgtgtttcgcaaatgaaggatgcttgatgacatggatacatttttagtattttttaattgatgcttaccattagaatgaaaaagaatatcacaaaagaatgtataccataatgttctttatatcttctctttcttattttttttaattattattttatcataaagtaagaaaatttgtttatgtaatatgtattaaataataatataatattatttgaataatttttaaagatgcttatcattagatcattttagacataaaaagtatcaaaaataatctgaaagaaacataaaataaaataatatatttttaagtgatgtgaaagtttttgatatgctaccattagagatgctctaaactatttctattgggagatgtaaaagtttagttatatttgtacaaaaagtagtttgtgatatctttacatcaacttttacattgtgcttcaatacataattgtaaatcttgatacaaaatttaatatgctatttaatgttgacctaataatttattaaaaaatataaaataataataataatacaaagttaaatataaaatttaataataaaataataataatgtaagccatttaatgcaaaagagtatgttaactaaaattgaataataaaatattaaaaaatgacataatagtaaatgtttaagcataacatttattgtgacaaattttacatcatgctatgttgtatttggatcacttttaattatgtgagatttttgtatcataatttagcacaccattagaatagatagaacatatttttaacaaagtgaactatattttgcattttcatctcttatttggatatccattagaaatgctgcaagagctcttctattattatttgaagagaaatgttaaagggcaccagtggtgcctaacagcctataatagctttttagggagtatcgctagctaatcgcaatgcgacatgtcgcaaaggtgctaggcaccactggtgcctaatagcaatgctgttatttgaatttcggatttctttttcttctaaattttggagatttagagttttgaattttccttgttgtttattagtaaaggcttctgattggattgggggtaacgtaacatgtttcaatggcagtgttaaaagtaaggaagattaaagggcaagctttgtttgtagctagataacctatcaccgtgaactttccatattaatgattgaattgaattgagttgaattacacacttatccaaatattgctgctttaacaacctatcattaattaaatagcagattttgttgtttgatttggggatgaggaactggtttagtatgaaataactgctccacattttctcagagcaaaagacttcaaccatggcttctgctagccagatagctcagagaaagtcttctccaactgcaccacattttttcaagattatttttgatgaaactcttgggcacaccaagttagtaagtgtgctatgtactcgtactctctctgcttcaacagtacatatttttcatctgtgatttttgtatgcacttcaactatgatttctggtatctttacctaagtttgaggatggaatatattatctttgttttcattctctctacattcgagttctc

SEQ ID NO: 299227 - DNA, 2413 bp, Cannabis indica
aatgtgttttatttagggcataaaacccaacaagatgttcattccatccttccacaagaagaactttacccactcatggagcggagccttccaaatcttactccagaggggattaaccaatcccaaccgaggcttaatcaaggaaaggtaagcctgtctcaccgagaaggaaccatcagtagcatcacgccaaattaaccggtcttggtcaacatgagggaggagctttacaaggccaagatgctgtccaagttagggaataaaccactcagctagctcatcccgtaacatcccagtttcttcgcaaaagaagtcatgcaaacaacacacttttggccattgaattcttggattgaaggcagctatatactcgttccaattaagccacgggatccaaggagaggaccacaaatcaatacttttcccattcgccgcgagccaacaagattcattacgaataaactccctcgacattaagataccccgagcggctttggacgccacactaggatagttcatattccaaaaggtgtcaccccgcttacagtatttggcccgaaagattttacaccaaagtctctcatcacctttggcaataaaccaaccaagcttagaaatcagagcaaagtttaaatcagcaaatcgtttgatcctgaggccaccatactcctttggtttgcaaatagagtcccaattagtcaacgccaagaaccggttcttttcagaacaacctacccaccagaattttcgaacaattttatcaagctcatcattaaccttcccggggaggagaaaagtagacatagtatacagaggaacactagcagccaccgatttaataagtgtcattcttccagcctgagaaagaagcttacttctccatccttccaatctagccataaccttatccaccacaaattgaaagtcacggctagaattcttagagaaggaaatcgggttacgaaggaacttatccgacagggagaggggacgaaaccccagcaacgaatggatagaatctctagcttcaatactggtgttgcctgagaaaatagaggcagactttgcaacattaagaagttgtcccgaccaagtacaatatttttggagacaatcttggatcaccctaatctcatcaacccgagctttgcagaaaaggaaagtatcgtccgcatacattagatgagaaactgggggactcggagggcacaccttaaaaccatgaatcatgcccgccccttcagcccgaaagaggagacgggatagaacctcactaccaatgataaacaaatatggagataacggatcaccttgtcggaggccgcgagaagggcagaattgttttagcggaccaccattcagcaacacagaaaaggaaacggaagaaatacatttcatcaccaagcctcggaacttcccacaaaacccaaaagcctcgagaaccacctcaaggaacttccattccatacgatcgtaagctttagacatatccactttgtactactcttaccactttgtaccttttttttcggtaaattcattcaagagatacaacataagaagtttggaatattagcattgcaaactagcttcccattagggtgggcaatttgtgtgtataggtcttcatcatgaagtattgagatttaagtactataagcaaattttaaattaaattcgatacatttattaattctgtaaaaaattaaaatataagctcaatctatttataaacaaattgacgtgacgagattcatttatataaagaatcgtgtttagttttatcaacttattaactcattaatattttttcttaagaaagcattatcctttaaaccaattacttaggatacaagcaagtgaagatatatttgttggagcttattttactatgatcttatttattaataatgtatgttgattatacaatacaatctaacatcctaaatatatatatatacaatatatgtatataacgaatttaaacacataaagttgaggattctcatattaggttgcactgaaataatatgtatctttatgttctaatattttaatctttaattccttaatgtagcaagatttcaaaataattgtagaacctgaattttcaatcttcgaatttgaacctgattatgaaattgagaagatcacaatctttcacaaattaatgaatatcaatcttgacaagtgtaggctaacactcaaaatagaaaggttgattctttggttatatgtgggatgaaaccagagagagagagagagagagagagtttgtggcactaaaacttatgtaagttctctcttctcttcctgtaaataaccaaagccttaggttttagatttcccatttttaaataaaaatttgggtaaataccattttggaccctctgttttacaaaagttaccaatt

SEQ ID NO: 299228 - DNA, 3547 bp, Cannabis indica
ttattatgtttttttttttaaaaaaattatatgaagtaattgtaataattttaaaaaataacaattataaagaaaatggtaattttaataaaagagtggggtatgttgtgtattgtttgagagagttagcccaatatgagaaaacccctgtccagctttccatttcatccttctaaaagtcagagcacaacttctgttcttggctctctctcctttcttctatcggcccttttgtggctttcttcggctctctcactaacttctctcactgatcggagatcggaccggaggaattccgttttcactcacctcaggtactgcactttttctggttgtttgagttttctcaagtgattctctttattttatatgtactttttttgtttctttcatgtgaatcccattcgtatagttatttgtttctacatatattttattttcagtttaagtttgatgttgatgaagtgtttagaaacttctctccaaataaaatataatttatggtgtttttaggcaatttgaattgtaattattttaactactcatagtgaaataagttatacctcgaacaaggctgtgctgttgattggtattttaaattttaataggagaagcaaaaacctgtttagaatttttttgaactaaagtggacaacacttcattgaatagctaccaactaataacatgtttagaggagttgtgaactagcatttattatataggtaatatattttgatttggttatcgattgtgtttcaattttggctaatttgggtaaatttggtttcaatttggtgtcaactgttatctgcctgtgtctatgaaaccattgatttatatggagagagcagatcaggtgattgtgtaaaagatgcagcgagtcccagcaactatcgaggaacagttgatattgaaagcaatcaaagaggaatgtccatgggagagcttacccaaacggcttcaagccaccttgtcttccaaggaagaatggcacagaaggttaggctacttatttttcttcttgtttttgagttttgctttgagtaataccgtgactgtttttaaaaaaattgtttctatgagaaagtactcactgttttactaatttgtttcaagattgaatgccctgaggccgctgttactttattaacttattggatacgatgaatgccctacatttgtggagttaacaattaaattgagggttcatagaagaatttcatttaattgttttgatattaaaaagtcattaaaagtattcatgagtgtgtgattttagtgtctgtataaatgtgaaaagaaaacacttgctaaactatgattttagttgctggttttgcatggacattgctcccaaccttgagcccatccatccatttccaccacaattggatgagaaaaatctggtaatgtcagaattggcacctagatcatcgcttcttgagcatgtgtaaagctttcactgcttcacttgatcaagcaaagctatccttacacaggtgttaggttaagggccaatctatttattcatactcaacaacatacctcctataataacacgtcaagcccttcggacttggccaccgttgttgcttcaatcttagtctcatctgctgtcacaccttttcctaatacgatatagtctaaatattgcaattgagattgaacaaactcaaatttcttcttgttgtagtaaaagctgattcttgttgaacaccttaaaagcctgctttaaacgattgattcttcagctctaccatacaccaatatatcattgaagcaaaatttactaaaattttcatttttttttgaaattatcattattagatactgaaatgtagctggagcatattgtcaacctaaagggcatcactacactcagttgttgccaatgactgtctgtttctctattgcttttgacgtcgagtgtagtttctgcttcatcgccaaccatcgctataatcttggatctaatttccttgagatcacattcaagaacttctactcttgcatccatctttttcgctaccatggcccaacactgtctctaataccacttgataggattctgattatcatatctaaacaatttacacataagtatactgaaatgcccctgtattattcaacttcaggtttggccaagcaccgaagccttaatagatacaatgagttaattcgagaggcgagctctcctaagaaaaagcaaattgttctctaacttgtctccttagaattgacctcatttatacgatcataacatcctaatacagaattgtaacaacatacctgctcattcaactagcttcctagcttgtttgtttctaaacttcctccttacagacgtgaatcttatgggatgtttatcattcttatcatcctcttagataaattaattagttatgaaatgtagactaatgtaggtgtatgatgatagaaaaatagctggttagttatgaaatgtagtaatataggtgcatggtaattgaacagtctttactgtcaatatttgttttgttaatatttcaacctgcaatgttgactgtagagacttattttagttttgatttcacttgcccatgcaggatagttgaacattgcattaaaaaaagacttcaatggaacacttgttttgctcgcaaaatatgcaaagaaactgaatactatgaagatttgatgcgctacttgcgaaagaatttagcggtgcgtctaatttctggaagtgtactaagttctattgctgctacattgcatcaacaatccacgcgttctgttctgtactctatctgtttttgaataaagtgcaacacacggatttgtcaatactatatttgatttagtttcatatatttatctctgctcttcatcactcaatatgttatcactttggtttaattatatcagttgtacaaaattacatttatttttcatgttgcttcagatatatgattttgcaatttgttggtgaaattgttatgtgcagctatttccttatcaccttgcagaatatgtttgccgtgtaatgagggtatcacctttcaaatactactgcgatatgatttttgaggttatgaagaatggtaatacttcactttctttttataactatgctaagattttgaattagtattattcttgcatggtttctagcatattcctgaaaatagcatgttgaattgttgatacctaagagccagggcaccacacttatgctggcacttgatgaactaatttgctttcattgggttgtttaaatttctgtgcatgaatgtcaacaaacttttcaatagctgttgtaaattattatgtacgtttgtaatgcaattccagcaacatttacatatttatagattcaaaaaaaacagaggaaagtttttattgctattgctttgtgctcttgcaagacgatgggatagataaaaacattatttaagaatctcagataattgaatcatataaatagcgatgtgaaatgtatcagcaagatgtgaatttattctggttcaaaaagaaaaaacagaaaagaaggaaagtgtttattgctatt

SEQ ID NO: 299229 - DNA, 2036 bp, Cannabis indica
aaaaagtaaactcttgacattttcccatattttaggtaatttttaaaattatacagtctaatctaatacaatacaatccaatacagcacgacaaaccaaacgagcccgaaatgttttcttatccaaattagaattaattaattaattaagatacacaattaggaatcatatattaactttttcatccatttcgttttcttcttcttctcatgccactctctctcactctctctcctcagacaaatttcactccatcaaccatggaagaagagcagcgatcgcttcttctaagcacagcctcacgtttcccactcccacaaggcttcaagccatcttacggcacagctggtttcagagccgaagcttctcttctcccatccactctttacaggatggggatcttgggtgctttaagggctttaaagacacaatccgtgattggaatcatgatcacagcttctcataaccaggtctctgataatggcgtcaaaatcgtcgacccaaccggtgggatgctttctcaggattgggagccttttgcagattcactcgccaacgcacctactgctgattgtcttatccaacttatatcggacaagatcgagcgatgtggtgagaagaaggttgaggttttggttgggagagataccaggcctagtggtccttctctgctcgaggctactaaacttgtaaggcttcttcttcaataatagtaattttgtgttcgatttcgatttgtgtggtttgttcctttgaaaaagtgtagttttgattaaattcataatttggcttgtcgtatatacttgattgattagtccaattaagaagatgagggcaattctctcatcacaagcagcttttgttaagttgagttaagcatccttcgcttctaaataacgatttgttcactgttgtttaagcatagtctatgttgtgcgttaggttgagttagcccaatatccttcctgatagttttgttttgtaatatttggagatttgattttttttttttttttttttttttttgactgatacaatattgagtactcctaatatcaattttaaagtttcacattacctggtgatatatattcgatccttccctaattgttaggttgagttaggtccaatatttttattgatagttttgctttgtaatatttggagatttgatttgatttttcttttgtactgatgattcgtcctaattttacaatattgggtactcctaatatcgattagttcaatgttgttgtatgctctgcaagaggggacgtattaaagtttcacgttagccggtgatatatactcgatccacccttaattgttaggttgagttaggccccatatccttcctgatagttttgctttgtaataattggagatttgattcgatttttcttttgtatcgatgattcattgaagggaattggttcgattattggtgctgttgctatcgatgtgggaattttgactactcctcaactacattggatggttcgagctagtaattgtagtacacgagcagccgaattcgattactttgagcagctttcgatgtccttcaggttggtgagttgagttgagtttgtttttgtttggtttatgggttgagaattgtaactgtggattaaatattaaagggtttgagtgggttttggtttaggtgcttgatggatttgattcctggtggaggtgaaagcattgaggggtttcataagttggttgttgatggtgctaatggtgttggaggtgaaaagcttttggttttgaaggaaatgttgaacttgaaggggttagaacttgaggttcgaaacactggaagtggcggtggcgtgctaaatgaaggtgttggtgccgattttgtgcagaaagagaaagttgttccttctggttttggttcacaggatgttgggataaggtaagctattatttagttgatgaatataatgaaagcagtaagcagaatgaaaatatatagtgaaattgtgttagggtttttttttttttttttttttttttttttttgttaaata

SEQ ID NO: 299230 - DNA, 2279 bp, Cannabis indica
ttacgaaattctatatagaaactcctgttgtaactagcactgtaacctaaattgcaacaaaaaatcgtacaaaaacccctattgcaactagggctgcaaccactttaaaaacccaaaccgtaaatttgaaaaaaaagttaaaaaaatagtatttggagtaattcccctaacttttatttcccatgttattatttcataaataatagttttctttttaagttacttttccaaaaaaaaaaaacactttattattttattgtgctttataaagtaatatactattgagaataataacttatttatggacaaatggatatatatataattctaaagtttaataaataaataaaatttttacaaaaatatctatttttttttggttaattttatatttttgctgtcatactcttttttttttttactatactaagttttaaaaaatattgtcttaaagtttaaaaattacaaaaatattgtgtttgagtaaaaaaaaaaactaaaataactaaaaaataaatattaaacacctaaataacaacatgaaaataactataaaataacaaaaaaacagctacaaagtaacagaaaagtaacaagacatcaacctcattgtaatatgcaaaataatatcaactcttcatcatatttttatattacaaaattctttttttacttagttttgataaattgattgtttttgtactgctacgttatttttttcatgaaatttatttgttacaacttcatactttcaactcttttttttttctcttcccttttgagttagtgacaactaaaataacaatttattttttagaaattaaatggatggttactgttgatcgagattttcgacaaccgctaatcaagtattggtaagaataatttagaaatggatgaggattttttacgtggttggagcgttgatgaaccttagttcacgagtcacttttattaaaggttggaatgttctctagtttcagagaatattcagtttaccgcctatggagttcattgtgttcctgaatccaaaagtcccctttacatttattgtctttaggtacttataggaggggaatgagatcagaggagaaaagggtaaatctctcttttacctctaggcactatctagtctccgtagtaggagtttggtgcatgagacaaaatttatcccatatgcagttgatgtgacaatatagagaatatagctgccactttatttatataggtaaatgggttgtcagaacagtatggtcttctaatgatgttaaccattcgttgaactagtcgtctacagtgatttattttttagaattcgtgttatgcgaataattgagtctccaatagcttatgatccgagagctcgtgactttctggatggcaaaagtcatcattctctcttaaccactctcctaaaaagtgcgtgactcctcccaaatgcgtcttcacactttgtgattttaattaaaggatttatacgacagtgagtattaatctcatagcaggtagacccctttgtcacgcggtgcctcctgtactgaccacttgttttggtaaaatatatgctcaacaattacattaataatagaaataataatataatataatgggtaatatatatttgaaataataaaaaattaactagataagtaggattttaactccttatccctacaccaacaagaaacctcttcattatttcaaggtaaattttgaccttttccctcagctaagtatgctttagactccaaacaacctcaaaaacttatgttgtattccacgactaaaacactcacggttttgatatcttttaacaaatacggaaaaattggagtaggttattgccatacaattggggtcaacaattctattttatatttattttaagaattaattaatatttaattttacaattgtacattggagataaatatagtataatttttatattttctatttgaaatggtctttatacaattgttatgcttgctataacttggtttttaggttgctataacccttttatgatattgagggatgagagattcaaatttagaacctcctctttattaagataaatgtgaaactactaagttaatgattataattataaacctatttatgttcactctaaataaattatttgttactttaaaaaaaaaaaaaaaaaaaagtaaaataataagcaaataaataattatcgtgaaatgacagcgtctttgaaatttttttactgttagaatttctatttaagaatactctattcaagaataacttct

SEQ ID NO: 299231 - DNA, 2348 bp, Cannabis indica
aaaaaaaaaaaaagtaaacaaagagatattatattatatgataatgataatcatgaacatgaagatgaaaatgacaataatactattataaaaaaatatttttaatgataattttttatgagtaactgtgactttaaattacaacaaaaaattatttagaattaaaatgtaattttttagtctatatttacatatataatattatagggttcatggtttttctctcgtgctctatatatatatacaccaataatttagtaaattgtcttatcaacaaaaaagaaaagaaaaaagataaatattgtaaaaggtgatcgccttttaattgttatctattattaattaatggtttatgtaagttaggtgggagagatcgagctagggtttgattatttcactctctttagttgacaccaatattataacaatatatttatttttatatatatattttcaattcaatatatttttcatatttagaaatattatatataattaattaattttaggtgtagtgtgtggtatcaaatgggatgaagaagtcaacgtcctgttataattaacttttgtgagacctttcaatatagttaacaaaaaaggccaagaccataacataaagctacataattacagatggaaagaccacatcaataaaccacttcattatttacctcttacttaattacactaattttaaataaatatttaatattcaaaaggaaagatattatctatctacacaacaatattattaatataaatcaaaataatatttctctcttaatttatttatttatgtaacaccaaaacaaaaggatcttattagttatagaattatatatatatatataatatatttctacgtaacttatacatgcgtacgtaaccctatatagtacaacttcaattcatcaaaatattatatatatatatatatatatttgtaattaatgcttggattataccgacaagtgacataaaggatctgaggaagaagaaggtgaagatgatgatcttccgaaactactccaaataagatcgttctcattgtagttttggttgttattattattaacaataatattcgatgacgacgtcgttctagaacgtaagtacggatacgaagacagttgtacgacgtcgttttcatcttgttcagtgcaaaacgacatgacgttttgaatgtcaccgaaacaattactcaattgcgcctttgaagctgttgttgtctcttcttcacgattatgatgatgaccatttagctgagatgccacaagcctgtcaagggcaatccagtcatttactctgttgttggatccgggtttcgggtggtttgaagtggaggcgggttcggtttccataagcatgtcgtatgactcatcatcatagttagtagtagtagtagtagtactattgttgttgttattattgtaagctttgtatggtgaaacgttgtcgtttaataaaggcattgaaggaagagtagtagtattagtagtattgttgttattattattggttggtgttattatctcttgaagccttgggagatgcatgaagttttgatgatggtggccgaaaactgcttcaccgccgccacctcccatggcggtgtttttgctcatgtgatgataccgctcggtggtggcgatgttgttggttaaggaatcattttctagcttacatgttcttcccatgtaatgaagtatttgatccaaaacgccgtcgtttttagggtatgacatctggtggtggtggtgctggtgttgctgatgtatcgagtgatgaatgttattattattattattattattattcataataatattcgaatcacctgacatggatgatgatgtagtgccttttggactgtctagtgatttttggtaattttttttcttgaatactctgcataccacccaaccatcctctgaaacagaatcaccagctaactgactgtttgaaatctatttttacgaaataaaaaagaaaaaaaaaattagatttacataataaattaaattaaagttaggagaatcaatcaataatttgagatgatgatcataattgaagaacatgttagatgggcttagctagggcatatgaatgtacttacaacagttgagtcatgagtagtagtactactctcatctaatctatattcatgcatgatccaatctgatttttgaccatgtggagctcttcctttgtagaacacaagtgttttcctcagtccaattctcttaaaaccactataaatgatcttatcccgacccgtggccttccagaacccggccgcagttgctcggttggttcgggttccagttgggtatttcttgtctttatga

SEQ ID NO: 299232 - DNA, 2385 bp, Cannabis indica
cttgtgtggtttgctctcgctctactatgggcctatgtttgttttttctctggtagtctagtggtgccttcccttttacttggactttcctctcatgaaatttctttcttggtcttatcgaggcttgggaaatgcctagagagtgaaggccttacgggggttgattgtaatggaaaatcatgatgtattattcttgattgaaactaaaattttttcttctcacatgggtaatctctggagataattaggctactttaatgttgtctctatggatgctattggctttgtagggggattatgactatgttggagagctgggattagtattgatatcttgagctctagttcttctgttattgtttccaaatttttgaatgttttgaatgccccccttggcttagttactttgtgtatgcttcttcgatgaggagtttatgagcttccttttgggaagaattagggctagaggtggtggcgcgctctaaaacttagataccttattggtgatctcaactcatttttaggataggtggagaaatatggaggggctagactttctcagactgcctatagtgttctcaatgactttctgctcatcattatgggtgttgatcttggaattgtgggaaaaaaaatttacttagtcaaataggtgtgtcttcatagatttgattaaagaagggttggatagagtggtttgtacccaaaagtggatggttcttattctaaaagcaggggtcttttgatcatgcacctattatcttggacttgttctttggtaaagaaaaatttcatacaccgtttagattcttagatgcatggactcaggatccttcatccaaggaggtaatttggggcttggaatatcattgtgagaggggccaaaagtatttgattggtggcgaaatttgatcacactagaaaaaagctaagccattggaacgaaacccattttggattttgcaaagaaaagttgccgcttcttgataaattcctccttgatgttcaaaagagacctcccttcctaaagaatgttcaattagaggtagatactcttcttgagatagaagaggcattctctagaaaatgtactatttgacgtaaaaaatcccgagaaacttggttgtgagatggggactcattttttacattcttctactatcactcagagaaagaagaactttataggaattgtatctaaagatagagagaattgaatttttggtcactacgaggttggtgactatttttcaaatttgttcaaacatgtatttcaattatttaggtcgagttttactgagagctagaagagttgataatgctgtctgttttatgagagtatgaatgatagactcattcttattgtcttgaaaggaaattagaagagttgtgtggtctataggacaacttaaagcgccaatacttggtggtatgccatgtcaattttaccgtgctcattaggagatcgtggaaagtgaggtggtaggtactgctgtccaattcttcacctcaagggagtttttcgattccctcaattgggcctttattgttcttatctcaaaagagaaaggtgcatctaatttgatggctttaggcctatctctttgtgtaacttttcctatagagtgatatccaaactattacctagccaaattcatgaggtactaccaattaggccactaattggctgagataggttctacctatgacattctatatagagttcctgtaggaaccaagtactggatagggatgggctctgaaaacataacaaagttcctatgaggaaccaagtactgataaaagttgtgattcaaaactgtgtaccgactaggttttttgtccaaagtcatgtaccggccagagtcacgggtaaagaccgtgaaccggccaaggtcacaaatagaccctatatgccagccagaagctcaaacaaatcaaaatcctacttttctaaaatttaaatagtgttctttatgatcttcgagactcaaagagtcaagaatcaaagtggagttcaagactctatcttttttatcagaaagtcatacattatacgtcctaaagttatcaagtcgattacaatggaaaaaaagactaaactacaacatgagaattaaaaaatttaacaaccttgaaaaagcttaatgtcatcaatggtagattcaagaaaataataaaaaagtgagatttgaagacctacccactgaagaagatcgatgtggacgctcgagcaacaatcagatcgtcaaaaaaattgtaaactacggagagtggtggtgctttaggcatcagtcttgcagaagaaaatgatttttttttctttttcatacagagagagagagagagagagagagagagagagagagagagagtagagagaga

SEQ ID NO: 299233 - DNA, 5039 bp, Cannabis indica
ttttttttttttgttaaatatttgatactcacataataatacacattaataatttcccctcacatttataaaattctatgattaccatttctataaaagattatttgtaactcgatatctttttctactacttataaattggtgtttttataatgtgaaaatagtaattttacaaggttattcaaattacaagaaactaggtgtttgtgggcgcgcagtgtggatagtatggatggtaacttattttttcaaatcaaattacatctgtgatttttttttattttcttaaactgcaattgcactgcatgatcaaaaccacaaaactacattgtaaaaatatggtgtgatgtgttgcggtttgagtggtttatactgttattattatcaaaacaatacaataaaaaaatcaaaaaatcaattttatatgttttaacaatacaaaaaaaaaaatgtatgtatagaaattttttactccgattacatatatactaatcgttaaatttttatattgaattatccttaaaaaaatatgtaatatattatcaaatatattgttcatatatttgattacatatacttaaaaaaataaaaattaataactttgtaatatatagattttaaccgtcattattaaatttaaaatcacaaactgcaccgcatcgtgcagtttgacgaaaatacaaaccataaccacactgcaaaagattttaaatcacattttttgtacgatatcgtgcgatgcagataatttatataaacaatttaatcaacaatcctagaagaaagagcctagcaacatggacattgctattgttttattgttagcgaataatttgctatttttgtaataattattaaattaaaatatgtataatttaatatttaataagaaaaaactctaaataattcttgatgaacattttgtatggatactttttcaatttaatttggtaagcatacttttttcaaatatcatgtttggtatcccacactgaaatattatgtgaaaattttacagccttcccttctctaatatggttttgtatttcaatttataataatattattaaattaaaattttaatttaaaaataattttttaaataaatgaaaaagaattgaattatgtattttaaaggtgtattatatagtttatactttattggattgagacaatctggaatgaatattttattattttggatatttttgttatttttaatgttattatttttttttaatattttggtatattaatatttctctaacaaattgttaattattttctatataaggtgtgtgatgtaaattttgagaaaaaaaaaatatatacttgtatccttatttttctctcctcaaattcatgaaaagtttaatagtacaagaaaatcttactcataaaataataataataattccaacaaaacaaaacaaaacaaaaatactaataataccaagtctcacaagataccaaaaatgtcaaaagtgttttaactaaaccgtttattaaaactcaactcaacctaagacatatttgttcttaatggttctcatctttgggaatattaaggtctttaaatattggactatcaactcccacacccattgcatgaagaccgttgtcgacgtaaataacagtcccggtgatggcagaagccaacggcgatgccaagaacgcagctgtgtttccaacctcatctgtttcgaaaaagcattttgtgtaattcagtaagttattcgctaaaggaagagaaaaaagtttccgagttaaagtgtttggaaggtacctgcagagagttctttttgcaatggtgcattggctattgaatagtcaatcatcatgtcgatgaaaccgatcgcttttgcagcacggcttctcaatggccctgaggaaaacacgaacgaaacgagcaaagttcttttagttttgcggtttgtatagttcttcaaacacaacaatatcaggttcatttgttatagcattatattagacaaattataaagaattaagtcactaataagcgatgttaaatatttccctcaactttgaatgttagattaaataattagcaattttacctcgaagtatgactactatcatattttgccctccgaacttttaccattgtcaaatcatcatgctaccttttattaaaaggtcacggtttgacaataataaaaattcgaggtgtaaaatatgatagtggtcataattcgagaggtcaaatagctaattatttaacgaaagtccttcgagaaaaatatttaacatttagtaataatttaggtgcatgatttttttcagccaaagtgaagaggaaaaagtttctatttattcaatcacaaaatacaaagcacaaaaattgtcttatgaaaaaagagtgataaggtaccagccgagatcgtgttgactctaactcggtgttttctacccgcttcaaaagcaagcacctaaacgaatcgacatatgtattagcaacgaatataactaatcagaaacaagcattttaacacaaaagataagagagcacacccgagtatcgctctcaagagcggcttttgcagagctcatacctccaccatatctaaatacgaaactccgaatttcaatattgcactaaaagtgatcaagtgaaaatataataacacttgcatcaaagtgaggtgagcaatggatgaaaaattacccgggaattatcttctcggaagcaatataggtaagtgaaagagaagaaccacctgtaacacaacaaattttacttacaaaagtcaaaaccgaaatttcaagcatactaacaacatgaactgcgaatttggctcaacaaaacaacgaaacatgcctggatttattattgggacgaaatgcttgagaagcgaaatataggagtaactcgacgcagataatgctgcaagataaccgttcctagaggtctccagcagaggttttgttacctaatatgaaattaccagattattaagctcccccaagaaaattatgcataaaaatacaacaagatgagtaagtattacttctggtccattggcaagagagtgaacaagaatatcaatactgccaaaatcattctttacagagtcagcaacttcctgcaaggtatttcaaacaagcataaaaattattacacattttcagcagaacatatatagagagagaatttcttaggtgtgagtatcacttttgaccctatcatcggtatctagagaaactatattctagttatagtaggcatcctgcaagttaccgagaaaaataatttccaactaaagtatttgaatcatattctcggcacctaaaactattcagaatttcctgaaaaacgaacagaaagcaaactataactataatgtactccgtcaaaactttggctctttgatgttgctaatctatacctgaactgtccacttactagaccctgcataacgcttgttcgtcttaatctgcatcatcaacacgaaaagaagattaattttttagcatatagtttttccaattttcatatttgttattattacattaactgtttatagtaggagattacatacatcttcaggtacatcctcaaggttgtcaaaaactgcatccaaaggatatactttagttatctccattaaagaaccatctggcaacctgaaacatcatatctctcacaactcatttcacatacacatatatataattataggaaatttctccagagcatctagagtatattataattttagtaagcattctattcatttccataaaattatgtataatttaaggtgtcgtgccgaaaacaggattcaaatagtcagttgcacgcgtgtttgttatattttatatgcagctatagtgtacactgtcatataataaaaattaaaatataatttctctaggtgccaaaaaaggcccgaagaaactacgataggaacaaaagtgatgtcccacctaagaagttctattaaatatgatatactttcacataaaattggtacaaaaaaactggtgtaacatcttacactcgagactcatcaaatttccctcttctaaggctggattcaaaaatgttcaaggcctacacaacaaaattgcttattcattaaccacacacataccatttcccaaatctgaaaaagaatttaaacaaaaaccccagaaattaacaaagatttgagtactcacaggcacccaagttcccacaagaatttcagcaccagcagcagcaagagcctttgcaatagcccaaccataaccattatcatcagcaacaccagcaataaaagctctcttacctaaacaaaacaaaatccacttatcatattagcaaaaatgtcacattattaaatttcattgagacccaattacaagaaaatgacattgataaagaaaagagagaaaaggtgaaacctttgagattaataggcaaaccagagacatgggtattgtttgtttgagacatagccttaatagcagaagattccttagccttattcttatcaaatttaagagaagaagaagtaaaggaacgagaagaaaacgatgaaatgtgagaagaacttgaaagcttagaccatgcagctcctttgaatgtggcttttcgaagcattgctccacttgctgctgctgttgttgctgctgtggttgccattatattctgaaaaaatgaggaagaaaagcttaaacttttagacaaatctaagcatggaatagcaaaatgggagataaagtttgaatttttacttacaaattgaggagaggaagtagtaatgaggagatgaagaagaaaaatgttaaattgatttgggtttcttctctttctatcaaatctcaaaaggtttttggaattattttttgttgcccttttggatttgggatcataaatttttgtactaaaaccctgcaaagttccaactactatcttactaccaacagcattgagtttgtgaaaagtgaaaactttcaagtttatgatgggttgggcccatcctatactcttagggaaatttacaaaaatactggaattcgggttaacttttaca

SEQ ID NO: 299234 - DNA, 1840 bp, Cannabis indica
cttgcatctgaatctcgatagagaaggaggatcaagaagctgaaccaagtattaacatggccactactgagcaagatccatctcttgaagcattctttgctcaagaaaatcgaaattacagagctcgtgcgtactcttgaggttagtatttctctaatggattcaatttctctaatttttcatcttttcctaattccagaggaaattttagaggaaattgccctcgagaaaccactaataacactcaggccactaccatgggaagaggaagaggtggtcgattcccagcagctcccaatcaaatccaatgtcagctatgccaaaaacttaggcatgttgttattgactgtttttatcaatttgataaaaacatcacaatatgtttctagtagtagatcaatctcaactacaggccaacattcctcatataactcaaattcaggatgacaactggtatcccgattctaggctacaaatcaatgcactccaaatggacaaaatgtcataacaacaatagattatgaagggcctgaacaactatatattggcaatggtactagactacctatttctcaaattggtaatgcctatcttattcctaacacatgtgataaatccttaatcctaaacaaattacttcatgtgcctgaaattacaaagaacctgcttagtgtttctaaatttactacagattataatgtttactttgtgttttatcttgatgtgtattatgtcaaggatcaagtgagtaaagctgttctactgactgggtcaaaggcctatatacttttgactctaatcaactacagttgtctgcctcccccttaacttatagtacttcaaagctccctcatcagccatgcacaaaaatttagctattacttcccaaagtcagagtctcaactctactatttgcgtcaagtgtaacaactctgttcatgagtttgaattgtaacgtaatcgccttggtcatccctctaagaggattgttaagtctgttctttcaagttgtaacatttcaaattttgaataaatgccaaattctatatgtaaagcttgttgtttaggaaaaatacacaaatttcctttttcaaaagcttatgaaatttattatactaagccatttacaacctctcacaatggatgtaaatactacatacattttataaatgcctattctagatttacaaggctttatttactcaaaaccaaatctgatgttgtcaaaacattccaaaattttaaaatagaagttgagttgcaactaggcactaaaattcaaacatttcaatttgattggggaggggaatatagagtcttcatagagtatctgagagaagcaggcatagtcgatagaaaagcttgttcaactactcatgaacaaaatggtctagctgaaagaaaacatagacacatagtggagaatggtctcacacttctttctcaagccaatctacccttaaggtactgggatgaagcctttaggacagctttctacattcacaatagacttcttaccccagttctttctctcaaatctcccattaaagtgttgtttaacattgctccatattacgccaaactcaaagtgtttggttgcatctattatcctaatatcaaaccctatagcaagcacatgattaattttaggtcttccccttgcacctttattgggtagaatctcaatcataagggttataagtgtcttgatccttctggaagattatacatcttgagagatgtaatctttaatgagtccacatttcctcatcataatcttgatctgtgacagtcagtagtcccgtgatccgtaaggggaaataccgggtaagctgtgcaa

SEQ ID NO: 299235 - DNA, 3480 bp, Cannabis indica
gaaaaatgattatttggtgaaagtattttttttccatatcaaaaaataaaaaaaaatcaattctgatggtactgttgtttttgatatttcatgcatgcataataatagatctgtagatttaggtgaatttggtaagataaatatttttaggagccaaaaacatttctctttgctacacatgtacgtgctatattcaatttttattttcatttttctattatagtgttgattgtgctgattactctttatttcatgtgaatgatgtagaaatggaaaattgatcaacagagcgcctctgaatctgaggaattttgggtatcccaagcagaaaccttgaagttgttttttcataacctgaaaatagtaacgattcatggagttttcaaaagcgagaaggaagttagcctaccaaaatttttattgaggcatgggaaggccttggaagaaatgacgttgtgcattaataccaaacatcctttctataacacaaatatccacagaagacaaaatagttttaggtcacaagttatgggatggcctcgtgcttcttctagtgctaacattacaattcgttgcttaaataattaatttaaacctcttgtcatgaggacctcctcaagctattatttcatttttcgtgaactactgcttgctatgaagctttattgcggtatgttcaactttattgtcgatttaatcttaattattactttttttttttgtcaaagtgataatatatgctagcttttttcctcatccccatagagaatccaatatatataacaaatagaagaaatgtggttttttagcaaacttgacgaacttgtggactggcttggatgttggatggagagaagtatttgataattttggacgaaatatttaatatactttttaaatatgcaatattcataatttgagtagttgatgatcacatattgactttttttggaaaataatacttagaagtgatgttttaatttatattacaaaattaaaaaaataaatattaaaaataatggataggaccactcatagaacactaatattgtcacaattaattatgtagtcacaaaatagttaaatttaaatatagcatccatcatattctttatctataactattcataggactgagctaatcacatcattctccatcaacaattatctctcatccacaagtaacaataaaagagtgaatatagagagtgagaaaagaccagtagtttaataaaaatccttgcatggttagcttttaaaataaaacatctcatcatcatcatcatttctaaacaaaatagagagaccacaagtaatcaaaagagacaagctacccgtgcatatcacactgtccacccctagctctcaataccaatcatagaaaacgacctccaaacccaaatagttgcggttgataaccataatactagatttagatttaactcacttcatgtacagatactataggtcttttactttcaggtgagtacatacctaatttacctatgatgacatagagattaggtcgtgaaataacaatatgcacaaatcatgattatatggctctcattaattatgagtataaccaaaggcaaacaaacaaatataacacaagaacatattttcttgatgttttagaaaattcagcaagatgacggctgtaatttgaatacacccaaaaatcataacatgcataaataattgtgcaaaaatatatttgacacttggcgcttggcactcagtgcccagaacagtccagaaaaatatacagagtaagtttccaattttaaaaacattttaaaaatcataaaataattagaatatgtctaatgttattcaacccatacaaaatcaagtccagtaatcaaattgagtccataccctctcccaagtagttcaactttgtctaaaatgatgattatatgctctcaactctcgagctccaattatttagtccaatattagatatcatttttacctatgacgctcaaatgactaaataattatcatcactgcattctacattcaaaacgagtccaacgacacataacatgattatatttaaagttttaattttcaaaattttatctaagcagtgcacattaactatcggtggccgtagaaattgatatactagaaacattgccaaaaataggggtagtatacatgaaaatgacccctttgaaaatttgtcagatcaaattttactaaattcaaagtctcctaatatctaaaattaattttcattaataataaaattaataaaaaaataatttctatatgataattaggtttaaaatttgaaaataagaatctacacaaaaatttacctaaaatttgaattttatttcattaaaaaaacaattttgaaagttgagaaaattggaaattggcaaaatcggacagtatcacggggaggacatggaccgagcccagatgctactggcaggccatttgggtgcgtgagaaggcatctcgaatgatgcctgatcgagaattctcaaacaacatcttgtctgaaggcccccattgtctgagcaagcccccgtgaaaactggctccgtgcatgcacgtagggtttaaaccctagcatgtgcagcaaccaaaactcaaatctacaaaatatcatatatttttcaattttaatcaaaatttactttcgtagaaggctgtacaaggaatcgaaggattaataatcctaacaaggttcgtgtcaaggtcgggattttgagatgcacggtcgactcttgaggttggggctaggtttgtgtcctcgatcaaagtctaaggatcaggaattgtggtcaaatggtggggtcaaaattaatttcacatatgatataactgaaaacgtatatatggtaaattatttagtttttttaaaaaaataaaaatataaagaaaagataaaaacagtatacattacaatactatcgtggactaaggatagtatagtttaatttaatacaatatattaataaatatcaataacaaatatagattacattaagtaaaaattacataatatagacaaaattataagagttgacaaaattataagagtttactttttgattttcgatggtaataaataaatatataagtttatggtattatgtaggttttttatgctatatgggccttttaataaataaataaatacctttacaaaaaaataaataaataaataaataattcatttatatgagtttttttatgctatatttttgtaaagtttaatcgaaaaagttattgtcgccaaaaaaatcaccgtcaccgaaaaagctaccgtcgccggataagtcactagaaatagatgttttagatatatataaaaatagaactggttctataacataatgaataaatacaaataacacaaaacaactcaaaccgattattattaaaatataatcggttctgtaacataataaataaaaataaataacacaaaataattcaaaccagttataattaaaa

SEQ ID NO: 299236 - DNA, 4446 bp, Cannabis indica
tgttatacagattgttactaaaaataaactagaaatgatattattgaataaattttttggattgagttacaaattgctctctttgagacgttcttgctcaggattatgcaaggagtcagaaattgcaggtcatttccaggataaaatcgtccaatttcatacactgtatcaaaataccactgtactaacgaactatcgaatacacccttaaaataagtatcacagatggaattttatatagtaaaaactaagttttttaccacaccaaccagtttaattaactcggacagcacacgcgtgtgtggtggataaagtgtatgtgttcacccattcatataaaattcaagtaccaaagttattcttgtaaacaaatgctcatatatcccgtgtcaaactcattctatttcacatataataggacactctcattttatcagaaatttattaactttcaaaaaagttccaacaacaattatattattacatatgataattgaatgggttggaaaatactggatattttattggtggatccatagaatatcatttagccgccggagagagaatgattgagtaaaattgtttaagaactctctatttcctgtccctattaaataacacatatttttatattttctttctgtcgtaacatacatatttataaatagtaataatacaacaattgaagaattaaacaagctggtattcagtctcgttttgaaataaattattattaaaattctgagtggatctaatcaattagtctttagtcgtactctactctgtatatgatgatgatgtaacaaacatataaacaaaatgtatgtatttacgcatgcacacgtccccacatacataaatttttacagctatatatagataccctcatacccatatataattatatatatatatatatatacaatattatattatccggagatgcatgcatgtgctagttttcaattataaataacaatattgttcccttcaaattattagttcaataactcgccattgatcttcgatctgatttttagagtaactatttaaagtctaattagcatatagactaataaatttgagtaatttttaattaattatacgattgatagtgtaagatagtttgatcatgttttgttctttgttcagtgctattatacaaggttatattaaaaaatattaaaactattgcagtaataattagtgttctgtttttttttttcaataagtgtgttaatttttctagcatatataattatttgtgtgtaaattatgtatatatagttgttacatgcgcttccgagaaggaatgttctatatatatattttagcattaatgaataataatattgaaaaataaatcataatgttatacaatttttattaaaaattttcaatataaaagaagtctcctcaaaccatataagctctctatattcacttggaaagtatgctgagataattcatttgcagtcttatatggttgttcgatgtacataaattaaattaggaacactctaacaaaatttgacattaaacttgctaaatcttctaataaagaacaaagttcattaaggaaggaagaacatttagaaaacgcattaacaacggctaaacactgtgactctataaaatataaagaaagaccaataataagagccgaatccaatactataagtagagttatacattctgtttaaataactgaaaaataatctccaaaaaaaccatcaaaagtaacattaaaaaatatgaaataacattagaaattgcttgcttaaagaaaagaaaaaaaaacttatacataagtatatttatatattgtgtacatataatgaaggggagcataattttccttggtttttcaccctgataatagctactatacaattatctgagaatgattatctattattttatccaagtacaacctttggtcatacgagtaacacaaacaatacataattaccaaaataaagtcaagaatataacttataacttacattattaagactatacaaataattgttaaacaatcaatcatatcattaattttatatataaaaaaaatattataaacttgttcgactatttttttttcttgaaaaaaagctattttggaaggagatagatcggcaatctttatgcaaataatatatacgtagtatgtaatttgtggcttcccctcaattgatttgttttttgtttttttttaaatgtaaactaatatttaataaagttaaatcctttgaaaaagtaaataaagtactatatttgttgattgatttaacttaattatgggtgatgaaaggtaataaatgttaattgtagatatgtactagtcattcagttgtgtgttttacttagtgtttggatttgatcacacgtgattttttcaacgatggagaaagtcgtttattaatttggcatagatcagacacactatatatacttaattaataattattcaatgcaaattttggatgaagaatgttaagaaggaagtttgatagttgaacatgtctcctattaatttatttaattccactccgcatgctgaggtgatcgtgtatcattttatgaaaatgtcaattaatattatgtaatttgacattaattattttcgtccaaactttgactgattttcatgtgcatgtatctcctacttttagttttatctcactatattatatatatatagatatcacgttattattatttgaacggagaacgtaattaattaatgttataaaataatttcaaatgaagagtaagaaaaaaaaatgaaagtgaaagataattttcttaacattatttcaattgctgataaatataaaaatatgagcccgtctttctagtatattgatctggttcacttttagtatttttttttcatgagcgcatacgttgtagctatttaagataacttgttataaatttttaaaaattttgaataatttatagtatcgaaaataaggtttaaataattatttatcacgtatatacgaaaaatagtagcgtgtgaaaaaaatatgtaaattttatttttaatattgtaaactacttagatttttttttgaaaaagtggtcctaaatagctacaacgtatgcgatcataaaaataatttagagtaagaagttctcctcttggatatcgaaacagagatagattatctactgaaaaactcctttacaggagatgcactgtagacttaccatatattatttataacaattaagataattataatagggtgattctgcaattcaccccttaaaaaaatgtgcactgatgcacctcttatctgtttcggcaatcaacaataaatttagtccaattgtttatattcgtgtatgttatacttatttaagatatcatgcaaaaatttgagaaatttagaataatttataatataaaaaaataatgtttaaacaatctatatcacacacgcataaaataaaagagtcatgactgcaacaaactgtttaaaccttattttcagcgtattaaatttttccgaattttttaaaattataagatgtcttaaataactacaaacacgaccataagaaaaaataaactatttttttttttattttatatgtcaaaacagaaaaaggatgtctcgtagaatttccattataataaaacgtctacaattaagcaacaaaattgcttgaacaataataattatcacgatttgaaagttaagaaactatatagaaatgtatctatgagaggagattttaatagttacatcaaatatataactattatggttatatttatttgtggttattaaatcactattgaatgattgtgattaatttaaaaattaaaataaaataaataataaataacttgtaatctaatactttattttcttataaaaacttaattaaattaattatatttaaaattaaattactaataattagtaatcaattttatgccatttattactaagtaaagatcttttagaaattaattttttttgaacttaaataattgaaatatttgtaacaaaactctttataatttaaaattattacacacataactttaattaataaaaaatagtaagaataatgacctctaattacaggtaattttacactcaatcttatttttaatgtctttaagtgccaaatagtgcgtcgattccagattgatttgatatagtttttttaaaaaaatgaaaattaaataaaaatagtttaaaatataataataattacaaaattaaagactagttaactattcctgctccccgttgaaatcatctacttcaatttagagattgtaaaaaaattaccaaagtaaattatcaattaattgagattgttgcttcttttttacaaataagcataacagtataaaactaacaagcaaatcactaaaaaactaaagagaaatctaactgtagctggtggattggagta

SEQ ID NO: 299237 - DNA, 2120 bp, Cannabis indica
aatcgaaaggggtttcagcttcaaaagctttttattcggtcaagaaactcagatctttacttctaatagcaaaacaacaccatgtgactggaagggcagttactaccacaaatatataattttaagggatcctgcaacgtttatccagctattatcatcttcactaaccgataatggcaagaaaaaaaattaaatgcttctgcccaaccttgaagtaacataataagcgataaaagaatatttggctgcaatggccgcttctcattctgctctggactggccagcacgagaagacaagataatgccgacgataagaccgtacagggcaagagcctcggcaaagatgaggataagaatcataccaacgaaaagttttggctgctgtgcattagctctgcaatacaagatcatttagtaagcataacatacaaataataatgagtctagtattcactataatatcaaatcaacatttaaaacaaaaaagattcgcgaactgtctacacagttcaagtataatatcaatcgcgaaccacttttcccacaagtgacaagattgtgaaagcagtagtttccaactgtttttatgttaggtctaacttgagcccaaaatctacatcattctttatcatgagttaacatctttgctagaagttatattattcttaaacacgagtaaagaataaacacattgtcaaaggctcaaaaatatttggaattgacttattatgtgcttttatataagtgaagtttgcaaaaatttagaatagtcatcagcaacttatggatatactactttaagatgctacaactattcactagaaaaccctatttttgttatttcttgtaatttggattcatccaacatgcagaaatttttcagtgtgttacaataatcaaataagtgaatgaaaaatgaaaattaataagcacttttacttccgaaaaaagatgataaaattaaatctcaaaccagtaaaactatgctttaacagcacatgataagcacacaagtagttattcaactttcatatagatgatcgtacctaacaccagcatcaccaacaataccaatggccattccagctgaaagaccagcaagaccacaagcaagaccagaggaaagatgagcataaccatcaaaaaggtagtatgattttgcctttgggttaatccctgtactgatgataacagcaataataagaccataaatacccaaaactccagccataacaactggaacaatggacttcatgaccaactcgggtctcatcactcccatagatgccacaccaacaccactctttgctgtgccataggcagctcccatacctaagaagccaggagaatccaagatcaatacacaaagcagtatgtaagctccacacaaatttcatgaagatctaaataagtgaaaacacaaaaagtatacactcaagtaaaaactataagctcagaaaaaagtacaattgattgccgatctcaactaaattcattagatctaagtgagattcaaatgatcaacagcaaaacttaaatctaaacaagatccaggaaaaaaaatcacaaaaccccaatcgtccactaaaagtaaaacgagaaaagcaaacacacaactttaaattgcgtttgaccaaagcaaatagtaacacaaaacacaaactgttttctttgttacaaacctaatcagatcaagacccagatcattcaaacctccaatttttacgatcaactattctcatcatatcacaatcaattaattgaatcagagcaagaataacaataacaataacaattaaaattttagctatctttaacgaaaaataaaagccccaatttcgtggaacacaaacagatcccaattcccaaaatctttacagtatgaaaatagaaattggagattaaaggttagggatttaattacaggagaaaactagagccgcggcagcgccgaggaatccgaagaacggtgccgtttcatcgccgctgaaggttgaagacattgtgttaatcggatctgagaggacttcgtctggatcttcagagagagtttgtggagcttcgagtttcgatctctctctctctctaaactctgtggttgtccttacttacgaattgaa

SEQ ID NO: 299238 - DNA, 1284 bp, Cannabis indica
aacccaatccatggcctggactcagacttggactcagaccccaaattcgcaaagccctaaactcggacccgaacacggaccccaaccctagaccccagaccccggccccaaacactagccttggcctcagactcgacccgatccaagaccgcaaattgaacccgaacctgatccccaaccctgaaccctgaacccggacttggaccttggactcggacccaaaccgtgacccaaacccaaaccagtatctagatccaaatctgaaccatgaaccaaacccgaactgagacccaaaccccagacccaaacttagacctcgacccgaacccgaacttgaattgggactcaaaccctaggttcaagttcgagatctaagttcagggtctggatttcggggcttgggttcgaggtccgcgtctgggtccaaggtctaaggttgagtctggggccagttttggttctaggtcctgggtattcggggttggggctagggtttggggtcttgattcgggtcaggggtcgggggtctgaggtctgggttcgggtcaaggtccaagttgaagttccagttagggtctgggttcagggtcgagatcggggtcaggtctgtgtttggtgtcaaggtctggggtccgggatccggggtttagctaggtccatggttatagtatgggtccaggtccgagcgctggggtcgaggtcggggttgaccctagaccctcacgactcacattgtattaaaatgtgtggtggtaataattgatgtaatataatgttttatccaaacataatgtcattagttatttagtacaatacgatctttatatgaccttccgaacaagcttttataaaatttgatttgtaattttttattttattttatttttggaaaaaattccatcctaacattaaatcattgcaaaatccatatctattacattttaatttttttttaaaaacaataattatggggaccttaataattatataaaattttttaggtatctcattgcaataaaaaagtttaatttagtgaaaaaagtcttaatgttttgccttaaggttatgggttcgattcatggtcttttattttaattttaatagagaacacggttgccactacattagctgaataatttgttttgcattattattgattaagttgggaaatttacatcctatacagattttttccattttatttcttttgtactgttacacggcaaacgtaacttttttactgtgtaactgttttttttaattttaagtctaattaatttaact

SEQ ID NO: 299239 - DNA, 5200 bp, Cannabis indica
aaacaaatgaataaaaattttatttaaatttagcaacattctgaatacaaaagaagtacttgtaaattagctcaaatattatacttaaaaatactatacgattagaaagaaattgaaaatgtctagccacaacatgtgttactcaatttgatgatcgtctaataaaacgtaaatgtacattctacaaaaaagaaagtaaaaatttacaatcttaaataattaaaccaaaaataaaattcatagcttaattattacaaatgccttaaaaaaaacacattatctgtttcaattctctgtattctgccattgttctttgattctcataacttttaccatttctgcagtataattcggccttcattttaagtgcatactattaagcattgtttctttgagataaactacttgattttgaaaatttaagcaataatagtttgttttttaaaatatatttaattttgattaaaaaaatacttatgtacttttgctttactataattaataaggtaaaaaattgactaaaatattataaattaagacttattattaaaatttacaggtagacttgtttgagagaattgataagtataggaaggttttggctgattaaggtaaaaggatcacgggctaatttaaaaacagattgaagcagagcaagcttagaatgaaacaactccaacatgaacaagataacgcttctcaaaatttgtataaggaagaacatcataagttgtttgaaattttaacttaaaatgaagtgttttggaagcaaagggttaagcaattttagttaaaaggagaaaaaaaatagtcgttattgtcatgtggtagccagtgcacggaagtgaacaaatataatttctaagctccagtatgatagtcgtgctccagttcaaaacctattctcaacttctgagactgaattaggtgtccttcttgatgatattcaagcttccattactccaactcaaaagataattttctttgttagtgactaaagaagaggttcgtaacgtgctctttcaaatgcatcctgataaggctcctgatccgaatagtatgagtccgggtttttataaaaaaaattatggcacattgtggaggcgaatgttatggagttggttaaacaagtagttgcttcatgaatgtttctcatggtatcaatgatactaatattgttcttattcttaaaaataggaatcatacaacgaggggtgatttgaggccgatatgtttgtgtaattataaaattatttaaaagttttggttgactggttcaaagtagttttacctcaagtcatatcaaacatgcaaattatttttattccaaggtgcttgattttagaaaatattatggtggtctttgagattatacatcacttgaagcgtaaggtttctaaaaaggaggggtcatgactttgaaacttgatataagtaaactgtatgaccgtgttgaatggcattatctgcatgctatacttgagaagctcagcttctctaatcgaatggtgcagttagcttttggttctttttcctcattcagtattagattgtgcatggcagtcattaaattggtcgcattattcctactcatgggattaggcaggtgatcctcaccttatttattttttatttgtgctaaggggttttcaactttgattcgacgttatgaatgtcatcaacttattagggggtgtcgtgtagctagggcagctccatctgtctttcacatgtttgtcaatgatagctttttgtttgttcaagctaatagtggtggagctcaaagggagaccgagatgttacagaattttgaacgtgtcgggctagaagattaatttgaataagttttcttctttctttagtcgcaatgtggttggtagtgttcgtgagtctgtttgttctatattgaatattgtaaaagtgaatgttaatagcatgtatttgggtctatcaaatacgatttggaggaaaaagtaaaccgtgttggggttcttgaaagagaagatgaggaagtgtattcaaagttggaatggaaagcttttatctcgtgcaggcaaggaggtgttggtttgaagtgttgcgcagagtctccccacttacgccatgagtatgtttcttttggcagtaggaattcgtcatgttcttaagcaacttatggctaatttttggtggaaatcatctactaattctctcatggtattttttaggtgagttgggataggatgtcacacaataaagaggttgggggttcgggctttcggtcgcatcaggatttcaatttgccatgttaggaaaacaagcatggagctttactaagccacactggttggtttctcaaatttataaggctcgctattttaagaacgaggattttctcaatgctcaacttggaagcaatccgagttttatatatttggcggagtcttttggagactcgggatttaattcgtcaaggggctaggaaggaaattgttgatggtgcgagtacttatatttttcaaagatctttgtctctctatgagatttaacccaatactttttactctagcttggttaatgagaaggtgagtggtctttttgttgtaggggaacttgtttgggatagtgatatagtcaaagatctttcttcggaaagagatgcatatactattcttggtattcctttgtgtaattcagttttaaaagattattggtttagtcttttgacaaaatcggtgattacactgtgaagagctctttcagaatataacaataggagagggatggaaggctgaattatgttgtggtggtgttttggaagaagttttgaaagttgtgtttacctctaaaggcaagaattttgtgtggcgaactatcaatgggtgcatcccgaagagagtctagttaaagtcgaaacatatggaggtgtcgttcttgtgtccaatgtgtcacttagtaagtgagtctatcttgcattgtttggttacttgttagtttgctcagagttgttggtgtgtggctgatttgaccttgggtcctatggttgatggttcttttggggaatgggtcatatctatttttgtttgattgtgtggtagggtgattatggttgtgttgggcgctttgatatatgtgtaatcaatgtttgtggaagggaaagaagaatgtggtggaggttgttgttaatttagcttgggtcattcttgatcaatagaggaaagattaggataaaagtcttcttccatcgatggatacttggtgtcttacgtataatattgagctgtggactaaactagatgttgacaattttaaggtgaatatcgatgcaaatatatttgaagaggagtgcaagtttgggtttgatggagtgattagagatcatcacaattttgtggtggctggtatttcgggattaaaggaaggtgttatgcttccggaggttgttgaagctgtagcttgaagtaggtattgtcgtgagtgaagcaagatttctaattggtcagtagcgttgagactaattgcttggtgtttgtccaagcagtttgtagtcctaaggagatgctgtcgtttggaagtgttgtggaagattgcaaatatttttttgaattctttagttaatgtttcgttaaattttgttaaacgatccgctaagtgaactgctcatcaaattgtaagagcttctcctttaatgttgatggtacttttttggactttaatgtccctagtgatatttccgttattgtagaaattgaataaaaaatttcagttaaaaaatacatatattattaaaattttctaaaatagtaaaattaaagttggtaaatttagttaaaatataaaaactaaagtaattttttcaataatattaagagattttttcaaagaaatatatatataagagattagaccttaattaattgacataataagaacaaaactaagccatattcatctcctctcaactgtctgccacttggtcatggtagtctaaatcacaattgccggaccacacaaccaatcaaagtcattgattgtgccacgtcacgcattcagatccacttgtcaaaaccgtgaattgacacgtggcaaaagagttacatggtgtggcagagtctacccattttctcaacttgtgtatatattataaatataatgtgccagacaacatttgctcatatatagctagcggaaaggccatgctgtaacattacaaagtttcccaattcaggacgaaagctaaaaaaattaaattattatttaatatacatatgtatatataaactcgatcgtcagaagaaatatataatttaattacacaacacgtaaattgagttgagtatatataaaaataattcaagatgatgatgatgatgaagatgattattattaaaaaaacatatcacaaaaaaaaaagaaacattgatcagaaatgggcagtgataaatttatatataaataaatatatttatgtatgtagacacacatgagtaagtatctagcttgcattgtcgtgtatgttgtctcaatattaataaaccaatgtatatataatatatctaacttcttattattattaattagtgtcattcttaagccttttatttatttatttatataaactcaattaaagtatatgaataaatagaagttttatatgtttttgtgtgtagcgtttaattcagcaagaataaacattaaaataaataattaagctagactgcaagtataagatatatatatatatatattaagttagagtttttagtggttaaacctttaattatcgtttcacttgcatttaattttcaaaacttaaatgttggtagtaaaaccttctaaattattaaactgttagcaaattgaaagtgtcgtccgattaactgtcattatagacttatgtgtacactattgtacatgtgacatgtgttgaagtaaaccccatattatctatacactgtcaaactagaatttttacaaagagtttacaagcagtaaaatactaggtggcctctggcctctatttacgtagacaggttattatgttagtttataaagtttgttaaaactttataactaacactcctgtattccactacaacagatataaaggagaaaattacaacatctatatataacatcaaaaacagaccagatcaatatgatgttcagaacaacaatcagagaaatataaaaacacaagatcagtacaacaatattatca

SEQ ID NO: 299240 - DNA, 3176 bp, Cannabis indica
aaaaaaaaaaatagagtaaaaaatttttctggatgccgaaacaagtagagggtgcatcaatacatctattttaaaggggtgcattgtagaatcaccctatgtgtatatatgttagaaaataagtaacatattttggaatgtgtaaattataattataaactgatatttaagtaaaattatatattcttttataaaatcaataaatctataatttcttcaagaaaatagcatcacatgcttaaaatcttttgcccgcccaaatgagattactttgtctcttattaatttataattacacaattaaataaataatccaaatttttaaataattattttgaaaattaccttttataaaacattgagcctttcttgggtttccttacactacttatccgtgagaattaattaatatatacaatatattaatttagttaactaatcataattaatttgtactaatatatataaagtacatctaaatatatggttttaatatatatgatttgatgatgaaggagatatatcataattaattatctttgaaaaaaagtacattgattaactataacttaataaaaaactattacttaacgtaagaaatgattttgaagaaataagaaaacaaggatgaattaattgtaattaattaaatgcatgtatgcatgcaattcttagtttacaaaaatgagaatattctataatataaataataatataatatttacttaagctagacagtctttttatcttgcatttaaaaaatataattaaataaattatattactaatagattagatgtagtggcattatttggatcaaaataattaattactcttgcttaaactatacgtacgtacaaaataaacctcatgagagaattgatataatttttaactaattaaaactaaaatatttgtccactatgacatttattatataaaaatatatattcacaattaatataaaagtgtcgaattatcgacaaagtaataccattaggtttagtgaaagaaacatcgatttgtgttttcttgaagacacaaatatttatagaaaaatatgggaatatattattaatatatataggtgatttttgcatcttctctcataaatataatatatatgttctaatatgttttttgattaaagatatatgaaaatggtaagatttcattaatagtcaaagatatacatataaaattttaaattactttcttaatgtgtacttatcttaattaaacatattgtatattttaataatataataaaatgtgagtattactcacacatcaaattatgagatcagtatatataaaaagaaaatgatgagaaaatttattttttatttttcttagctccgatttactagctatatatatgtagtgctaccttaaaaaaagaaagaaagaagaagctataataattaaataataaatagaattaattataagttgctatagtaacccgtctaatttacttataatattacctatatatatttgtttcaatttaagttttttttttaaaaaaaataaataaattatatatgagtactaggaaattaatattatttcaacattaattactaattgatgtggaaaaattagttactatgacgatataaaagatatctataaggttgttaaaaataataataaaaaaattcttaagggctcatttggtacgccgtattatattgtattatattgtgttggactgtattgtattgtattgtattagtattatttaatacaatactatgtctgatattaacttgtattaataaattgtgtaaaattataatatattttcaatacacttgattccaacaccaactacgagtccgggtctgggtccgggttcgagttcggggtcaggtctggggtccgggtctaggtccgcgttcgggtcccgggtccgagtcccaggtccgagttgggtctcgagtctcgggttcaggtctgagtccagggtccggttcgggtccaggtctaggtctaggtccgggtctgagaccggggtccaagtttgggtttgggtacggggtccgggtccgagtctgagtccgacacccgggtccgggttcgagtctgggtcccgagtcctaatctgggtccgggtctcgagtttgggttcgggtccgggtcgcggtctgggtccttagtcctaggtctcaggttcgagtctgggtctaggtctcaggtacgagtctcgagttcgggtccgagtctcgagtacgagtcccgggtccggctctggatttggatcccaagtttgggtctgggtatcgagtcctggtctgggtctgagtctcgggttccgggtccaggtcccgatctaggttcgagtctggatccgagtctaggtcctgggtcccaagtccgggtccaaatctgggtcttggcccgggttccggatcccgggttcaggtttgggttcaggtctgggtcccgggttcgggttcaggtcggagattggtgttgaccctgaattccttgtaaattttataatacaagctaatacggactatttgttttgtattaaataatacaacatacattgtattaaaaattttagtcgcaataattaatacaatacattgttttatccaaacatagtgttatttattatttaatacaatacgacccttatacatcgtaccaaacgagccctaagagtactaattacaatttcacattataatttcttattagtcaattctctacgtccaaaattatatgttgggatatttttttttttaatttttgtatttgttatagttatagtcatctaatttataaattttaaattttaaaaaaattctgaatagtttacagtaccggaaacaaagattcttaatattccagttgcgtgttcataaaattttaaacttattttcgacactgtaaacaattcaaaaatttaaaattttacttgaatgacgttgagtataagaaacactactatatatggaaaaagaaattaaaaaaaaaagttatttttgtatgtatttgggggacagaagtcgcaattattatattcaaaaaaagaatattggcagctaaatcacctgaactttacggtttataacacttaaccacaaaaactgaatttttggcggctaaactacctaaactcccattccgttttgctctgcacacctccgtccaaaaat

SEQ ID NO: 299241 - DNA, 4035 bp, Cannabis indica
ccataattggttcactttattatgtgatacattaaatgattctaaagttaatacaattattctttctttttttttagtaaaaaaaaaaaaaaattagatggggttatggaatggagaacttctcaataaagaatgacgtcttttacaatgatatatcataccattaccatacacatcatgtagtaaattctcaaggataacgtcgtcagttttcctaaaatgagtttagaatgactcgtaagctaatctcagatatgggaaacaaaacagaaatactcttatttttggtattttttttttccattaaaattgaagtgagtgaatctcttcctctctagttggctgccttgggaatgtcaaggttctcgaagatggggctgtccactccaactcccatcgcattcaaaccattgtcgacgtacacaactgcaccagtaatggccgaggccagtggcgatgcaaggaaagcagccgcattacccacctcctctgttccatttgtgtttcaagatcaatacaaacttggattgaaatgaaaaatatgcttgaatatgtcagctaatagcttagcttggcttatagtttatgtgactcaccagcagagagttctttctgtagtggtgcatttgcagatgagtagtcaatcatcatgtcaatgaaaccaattgcttttgcagcacgacttcttaacggacctgaaattattagagtaatttccaataacatatgctatgcgagttccaagatcacaaaacagaaaaactagccttgtttttcagggatgaatttagaaaggaaaataataaattagtagatggcacatttttcaaatgaaagaagctaactgcagtacctgcagatattgtgttgactctgattttgtgtttccttccagcttcaaaagccagaacctgaaccgaaggcaaaagtacagtaagtgagatgttacataatgggcaacatacgttggggaatgttttatcagaatttggaacattcaaatatggccaatcaggaacaaataaaacgaactagtactcactcgagtatcgctctccaaggcagcttttgcagaactcattcctccaccatatctgccatatgcattataaagatttatatgtaatgtgcaaaacactggattgacatggtttataattgaacggaaacataccctggaatgatcttttctgaggcaatgtatgttagagaaattgaagcaccacctgcaaattcaacactagagcttagattacaggttttcttgcaacagtagtctcacaatctaagggtccttgagacaggaggccagaaaagtaaaagcataaagagttagaaatatgcctgggttcatgattggaacaaaatggctgagtagagaaataaatgagtaacttgatgcagagatggctgcaagatatccattccttgaggtctctagaaggggtttgctaacctggggatgatattttattattaagtgccatgaggaccattgaaacatcatcaacatgaaaagctttgtacctctggtccattggcaagcgaatggacaaggatgtcaatactgccgaagtcctgcttcacgcattcaacaacttcctggaaagaagaaatacgagagtaaatacttctagaaccatgctgaatagtcctttacccgaacataaaaatagaggacctaatgagtgaattttaaaagctattttgacatattccatatcaaagtttctagatccacaaccattttacgaagcatttaagatagtcgcttctttcaagttcagaaatgatggatacctgaactgtccattttgaagatcctgaatagcgtttgtttgtctttatctgtacagagccgaaattatagatatcactagttgtttcaaattatatatacacaaaaagctttaacaatcactgtagttatgatttgctatttagtatattagaaaagattgagcatgcatacatcctcaggaacagactccatatcatcaaaaactgcatccaatggataaactttggtaatttccatcaatgaaccatctggcaacctgaaaaacccaaagatttaggtaagcaaatgtggaggattcaaaacaagttggacaaacctctactgatcattatattttccttacttgcgagattcatcgaatttcccacgccttaaactggattcgaaaatgttcagcgcctaaacaggaattgatatacattaaagctgcaattttttcacacaatcatacataatgagctgagtttaatttacttactggcacccatgtcccaacaagaatttcagcaccagcagcagcaagagattttgctatggcccaaccatacccattatcatcagccacaccagcaataaacgctctcttacctataaagagcagtcccaaatttagtaacatgccaaataattgtaacaaaggctaagtccaagattcatggtttcaacaaatgagaaaacacacgcccaggataaaggtaaagagccaccgagaacagaacaagacaagctactgaatgaatacaagtatttgaataatcaagtataaaagaagacacttaacctctcaaatcaattggtagtcctggcaagggagtgttctcaaccgctccagacattgctcttgtaacaacattttcgaaattcttagactgagtagaagtcaagctagggaagagtgactgccttgatgagatgtgagaagagcttgttagccttttcaacattggagacttaagctcagtactgaaatttgcagtagtgggcatagattttctaggagaagaatttatgcagggtttcactgatacgatatgcatgccatgagtcgcagttgaggccattttggatgaaactaaaccaccaaaaaccaaaacaatgatttagaacattggtaacacacttgcaattgcataatcaataggccaaaacccaaattttaaaacgttaaagttcaatgatatatctgcaatccaaattcattactcaggagatggtaagtcaatttcaatgaaacaaaagtaaagtgtatcgataggcgttgaaaccaaagaatagagtcaaaccaaacaatccaaacagatacaaaaagatcactgtgtcattttgtcaaacaaataattaattgcaaatggtacttgtagaaaatcaaattaatagcaaaacgggcacaaacatatttaaataaataataattcaggaaatggaaggaacgaaaaagaaaacatcgatgagattatccttagatggcaagaactagattaataaccacaacagcaataacaaaacaagaacaaatggtattcctaagccttgtaaacaatcaagcaacattcatctcaattttttttttaaataaaattacgatatctgcaaatgtgtaccaaaattgaaaatcataaaaggaaaaaccagacaattgtagatcaacccagatgaaagaacgaaacagttaagattgatcaaagttcatatgtagtgaagtgaaaggcatgtttttctcagtgaaaacacatgcattgagaagaagatccaagacttacctagtgtatggtattatatagagagaaaaatacgagctttgtttggaagaatgcaaatcaaaaaatgggtttgggatgtgtatataatgtagatatatgtaattattgtacgtaaaaagtttcgatgaaatcaaggtgtgtttgtttgatgtttggtgagtgttttagttgaacttcgtaattgccgaataaggcaatggaatttgggagtgaagaacgagcagcttgttttggcgcccatataaaaggacatttctatccctgcgaaaactcaatacctggactggacctcaacttgggctttttatacgaggaaattaaactctatacattttttataggaaaatttatatggtatattaatttttgctctttttttttacaaaaatactgtcagacggaattttttacttttttactatattttttttttaaaaatttccatactgcagtatactgtgttaagtttcattg

SEQ ID NO: 299242 - DNA, 1482 bp, Cannabis indica
aagtatttatgctgcaatttacctaataaagtatgcttttttaataaaaaataatgttaaaacagtttttagataacattatccaacgacagttaagattttaaaatgtcaaaataacgtttactatttaaaatgaagaaaaaaaagagcatctagaatatcggagaaaaggtaactagagaaaatggaaaaacgaaaatgacaattgagcgtttttattttcaacataatgtaatattttttttaaaaaaaataaaaactaaagcaaatagtaaaaaaatggacagaacaattatggcagaatgttcaggcaaaatagtgttgacagattgatgaattattacaataaaatttgatataacaatcgctacaaataataataaaaaaaaagggcgatatagtaaaattagtagctagttcaagcactccgaacaataacactacgcatcatgtccttgaactcaaagaaatcaactcggccatcatgatttcggtcaacagatatgatcatcttctcaactctgtcaatctcattcccttcgtcgaatccaagctttcccagcaccacttgcaattcctgagcagatatgtaaccgtcaccgtcctcatcgaacaccttgaaagcctccgacagatccgactcctcctgagacatcttctcattcttttccaaattcatttcttcattctcaaattcaccaatattactgtcatcgcacccaaaatacgtgtcatttaaggattgatggagcaacacaaaatcctcgaatctgagaccagaattctccggtcggatgaaggacttgattgttgattcgatttcggtgaactcagcctctaggcctagaagattaagggcttgaccaagctcctcgacagtgattgtttcgtcgttgttcttgtcgaatagatcaaatatacgacggagacgaagggtgttgaggctaggactacgtagcctgaacgaggatgacgatctcgtctgactgctcagactagggacctcagtttctgatgcggctgctgcttccatgatattaagattataattatatatgttttccctctttctcaatttttgttcttcttaaaacggtgtcgttttctgcgttttaatgggttgatttgcggtgggagaaaggagagatgtcgagggattaatatatcatgatagttagcagccgctggtcatccaaatgcgaaatattttgaagacgggactagtcaatatttctctctgctaagtaagtttgatataaatggtcaattaataataatcaatggcgttcaaaaaagtcaaaagaacggacaataattagaaggggtgcgcgtttggcgggcgctcaaccgtgtttgggaatttcttttttaattgtttggctaagagtgctcctctttcttctgtacacgtacgctacctctattcgaaatattcacaatcactaatattacctacacaagcttttttttttttaaaaaaaa

SEQ ID NO: 299243 - DNA, 2073 bp, Cannabis indica
tttacatatcatctttttgtgtgatttttttttttttatcttattcttttgatatttcctaatcttcttctattttaaatctacaaaaattaaagataaaaagcgtagaattgctccaaacaagagtagaactaaattaaaaatatattaaacttaatttaatattaatactaaaaataacctaatatggctttattttttgagttgcggaaggaggtcttcagtgagtttgctatgatgttatggtgggtgtggtttaataggaatggttctctatttgggaatgcatggtcaagattgggggtgttggttcctctcgcgtaaaatgctctgtctgagtataaggggtgtcgagggagtgggtggaaggtggtgtgggaagtggatgctggagtggttatcggggtttggggagcgaggtggggcggatgtcgccaatgttggggaagtttttgctgtctatagatgcaatagtgaaacacaagactagttttgtggggttaggaggtgtgatttgtgatgatagtggtgtggtttgggcggcgtgggcggtggatgttgctggcaggttctcagtggtggtggcaaagcttttggtggtgaaggatgggctgttatgggcatctcaactgtgatttcaggtgcatcgagtcaattgtgacttgttagtggtggtaccttggattagggatgagcatccaatccaatccaacatttttttcccatccaatccaatccaattagtaattggatttggaaaatcatcatccgatctaatctaattagacctcaaaatccaatccaatccaattactagttagattggatcaattttttaaatggatatccaattacacacctaaattccaatattaacttaaaaatatgaagaaaaatacataaaaactaagcatcgcattttatttaagtttaatacttcataaacatactaacgttacaagtgtaatgtagcaaaaagttttaaataattaaaacaacaatatttctaagtaataaaataaacaaaacatcatgaaaataaatacacaaaataatcaagtgttacaaattcaacacataaaaaaaatctaataaaaatataataaatatatattatgttttttattatataaataattttttaacatatataaatgcaattggattggatcggtttttaattggatttaagattgacatccaataatcgatcaaatccaattagaatataacttttagcatccaatccaatccaattgtaattggatgtccaactttttataattggattggattgaatcggttcagttcaattgtattgaattggatgatgcccacccatacattggattaatttagacgttaagaatattatatttcattctattatttttcgatgtttctaatttattagttgcagttggtggtggtacttattgcgctattttgcgttctgtaaatagtgtggctcatgcactaattagatttgttacgtgtcttcgggtggagtatcaatttgggcagattcttatcctcgatttattagtgctatttagttaatttttatatttattatatttaattttatattttatataaactaatgttgatcaacaaaaaaaaaaatgcgaacttatattttatatttaatttttttttcttaacttatatttattatttaatttaagatattgtaaacttttgagtgacaactacaattgtgctattattctcaaatatatctgcctccactaatatcaaaatataaaatgtaaattttataacttgtagtttgtaacatttagtcaaggtaaattataggcttgtatgtaaatttttgtaaacagtccaaattgaataatttgcttaaactaaattgagataacccgattgaaaatataacccacccaatcttcatattgggtgggttgaaaataataccaactcgctcaatcaacacgaactaacctgaccaacccgattaagatgatttttttatatatatatttatatatcatataatttatatgattatttaaaaaatacaaaattgaaactaatatatattttttt

SEQ ID NO: 299244 - DNA, 4298 bp, Cannabis indica
aaaataaaaaaaagtcactttcaatatttttttaaacagttttttttttcttaatcaatattttagattctgaccagacccggatccaaattcccctcccacgaccatggcgctatacacgacctctgacccgaacccgaatctgaccctagacataaacccgacttaaataaaatcaaaaaatgaaaataaaaataaactttacagaacacacttttgttttctgtttttaaaattgaaaaataaaagtgattacagaacgcatttttgtttttcaaaacaaaaatttcactttcattttgtgattaaaaaattaaaaaataaaagtattacgaaatgtcaccctaatattttggtatttattggggaaaatgcttttgtggtagggttgaaaattgaaaatttgtagaagataagcataagggtatatatgtaatttagttgggttagtttggataggaaataggataagtttagaggtaaggggaaaggaagaggtttagattttgacagagagagctcagagctgctcgcttgctcctcctccgagtctgaaagaactaaactcacatttttccaattcttcaatttcattaatggcttctgcaactactctctcactgtgttcttctctcactgctcaatgcaaaatctcacagaaatggcgtacccaccctcccctctccaatcctaatctcacatttctctctctttcttatccaaacctctcttcctccactctctctcaccgtatccattccccacttccccctaaagcctctttgtctgaggcttcgattttagagaccgccgagctcgacgcacctaacactgatgacgccaaaatcgtcgaggtctcctcagaggagctacaagtcgatacttcggaagaactagctcccaagcgtgaggaaatcttcgcggtggttatggtatgtgtttctatgagtggctattttgaggttatccagatgaaattttgttttgtttttaatgggtttttggactaaatttttatttttatatgagttttggttttggacttggtgtagataggatcgcgccagtacattgtttttcctggacggtggatcaatactcaaagacttaaaggtgccaatgttgatgataaggtatggcatttctcttgttttttgagatttgtaactattttgtcaaatcattttacttacacacctcaacgaagccaatgtgctatgaatgtattccaagaatttaatagtgtcctaactcctaagatgattcataacttccttaaggattgtcttaaagtagttatgaagtttattttgaaactaaaaaaagtttttttttttttaattgtcactatgggatttatcatccttctagatatctctgtaggtgaggaattgctgacactagaaaaatagtatgtagtgataataacaaacagatcctccaatgttgacaactttcatgctcaagattttgctaactaagcacataagcacaccaatcttcagcttactatcgaatattttgtggagtagtgtcatgtgagattttttttttcttttcctactgctagaattatattgttattaactttgaccttctactaaataccgagtttgttgattatatcttcaatttacctgtaagtagtgcaattctctactttatacaataagcgactatagttgagtcatatttatgggtcttgtaggttagtactttgactagaatatagtgcaagtcaactatattctcccagtgatattgtagttgagttgctttgtgggcaatctaaaagactctgcaaggcagcacttggattcacttttaccagtttattggtttgaatactttgtaataagttatatgatgaagaacttttgaagtaatgctttgtaatttccattacgattattttatgagcacaaaaggttacttcttttgactcttgtttgacaccagttaaatgataaatttattgtgtactttaagtttggaaggaaggaagttttacattgaaggctcctaataatattttacatgagaagccatgttttttttaatgagatttgaacacatatactgcctcaaatgtatgctccacaaaagctttttgtttctcctctctgactgttggtaaattgaagagtgcacaggcctagaaattggtgttcaatgtacatgtagactctgaataatttgttgttgcactatagtgtatcttgggcttctgagctttctgttcttattgctggcactctgtatctctcaatctgttaatagttttgaagtcattgtgcatggtatgtggagagtgagaaagtaagctgtttgaagaactgctatgttttgattttgagaaaaccattgtcggtttgtgtatatattgttacgctgaataccttctccctagtatatagtgattggtagttggtccctatttatgttctttcaggtctactaattctttctatttgtatttatttctacttctgtgcctaaaacattggtaattcttttataccttatatgacagtttattaggttgattcagattgactcttctggagtttctgaaattcccaattaaaaaaaaatcattattagcttttaatgccattaatgtttctgattgtctcaatagtcaattctttgtagttcttaatctataaaattttggatcttttgcagattgttctgaagaaggttctgcttgtgggaacaaaaacaagtacctacattggcaagccagtggtgacaaatgctgctgtgcatgcggtagttgaagaacaggtaatttccttccttattataactgtttccattccagtcccgtaacggaacaaatgaccatgtttaactgtagttattctctttattctctgacctctaagtctatgctgtttcatgtaggcattagatcgcaaagtaattgtctttaagtacaagaagaagaagaactacaggagaaatattggccaccggcaggtattacacaactccttactcactgcatcttcttcgtttataattcactaaaatctgcttgctggtaaacctgttaaaggtccaactgttttcctataactgataacagtaatcccgttattgcttaagagttaaataacaagctttattttctgataactctgctttttcacttaagttgctcaagagttaaataacaatcttcaaagtattctgcatccttgttctcttttcagactcatgtaactcatagaagaaaactaaaagcttcctaacaaccttataagaaaaaaaacaaacattaatggtgttacttcttctgcccttgcttattgtctaggtcttgtttgattttgatttgattccataatgcagccaattacacggataaggataaccggcatcacaggatatcaagattatcctgctgtcacactcgactcgtaggagctatggaggatggtgtatgatgagaaaatatgaaaattttatgaaggaaatttttgtaatcccttttgtttgtaagatatctttgattgaatttcaattttaacagtgacttttagttcagtcgttattttaccctactcttaatagttatttttatagcaaagactttgccaaaacatataaaaatcagttcatcgctactgagtgtagcctaaaataaataattattgcatttcctacttttcgggatgaacacatccttggtaagtgaccatctgatcttttcaattttcagttctacaactctatttccagcaagctacacaatttataatgacttctatattaaagaaaaagaaattagattgaagtaactaaaataatcagaatttacaatacagagaaacaataaataccactaaaacgtgagaaattcaacctcaaaaaattaataaataaaggggaaattttagcgtacgattccactaaaaataaatttacaataatttttctaaagtttttgtaactgtacaaatcttaatctcgtgagagagcaccacacaagcatattactattggtgtaatttaatattaagttctatattaatttactaaatagtataaaaattattaaccacttacaacgcgctatatcggtatagtattagccaccgtaaggtgcctaatagcaattgttttaatttttaaggcaaaaaatggtactttgcgatggtcagatcatgtgatagttttaagaaagatgattttagagaaaaagaaaaaaagatgccacaacgatgtcctgcgacggggttgggaatgttgtgaaaaataattttatgatgctatattgatggttcctt

SEQ ID NO: 299245 - DNA, 4891 bp, Cannabis indica
gtctcgactgggcctttattctgctttttcttaattggattggtgtacatgatctacagccaatgatatatggtcgtggaccaatgccagccggaatgtcaaattggtgcccatggttcttccagatgggcgaattggctatgttctgtaagtagttactcaatattcatcacatcattttccatctcttaagaacatttctgaccgtgttgggcttgtgcagtcagcagccaggtgtacagatgcccactcctcggcccaggagaattgatcgaaacaatggtccaagtggacaggcgagggcgaggaggaggcagtggcagtgatgaaggaagtcgtaacaggagatacagaccctactagtggtagcttacttatttcagcttatctctgtttcttttcttgttatgtgaaagagatatgttgtgattggatgatgatcccttggaacaaaataacaatcccacccctttgatccctgtcccggaatttacaaaaaaaaaaaaattaatagcaaaaaaagagaaaaaaaacaaaaaaaagggtcgttaggagtagaaaaagaaatgaggtatcacaagttaatgttggtgatatctcaatgacagctaggatggaagtattttatgtataacttatctggttgtaatgctttttgtgttagcatttttttattgacacccatcagagaaagcatttattcttattgccttgccacacaatgagacaactcgcattgttatgcttcatctcttttttcgtttgcttttctctttattgctcttctttcttcgttgataatgaaaaggccaaatatgttggatgtgtgaacccaaaaattgtttgtagttgcatgtttggggcttaaataagttgatcaatcttcttccttcttttgactatagaatagtgtttcctctttaagcaaagttttacactttaatatgttgatcatcatcgattttgtaatgaaatatttcattaagatttttttttttgaaactggagaatataagaaaatggttgtatactttatttatttgggtcaactattaaagttgaaacatttagtctcaagtggaaccaatttcccaaacgacgagtgttgaagaccaagttcataatagtggtttctctttttaatgccataacctacaattgttgtttggtatctaatgtcattagtggatcgtctagtgctataatgtattttagagtctttcatatttgtacccttatagcaagcctcttttctaaagtgaaaagcctcctgcttcctagttggccaaattgtaaaagagatatgtccaaatagagaattggagacaaaaaaaatttacatttcttttacttgatattaacctaaatacttattttctcaacaaccaaaaccaaataatgaaaagtttgaatggccaagaagaaaaactacacaaacttaagttacataaggatgaatgattgttgaaggttttatattgaagaaagcagttcccacagctccattcttatttactttgtctgataaagctcccgaagactcttctctaattcatccaacttagggccccactcagtcttgatgcacaagggtcgaacaccagcaaggtcttcttccctgtcaccgtccacagaggataaccctcctttactcataatcatcatattcttcttcatcttcttcttcatactcttaccaccactcagcttgctcttcttggcggctgctttctgcatagcccaaagcacatccgacccactaatctgcgtctcatcttcctcacttctagcttctcttttggggattgggtttggagtagtagtggtggtgggtttggaatttgagttggagtttagagctgtgagaatggtacggcctaagcctccgacgtcgttttggggtggctgatgggaattggccgagacggggcgaggcgttttggttttggaattggggtggaggagaagatggagttgggggggtggggacaggtagggcagtgcccacatggtttggtttggtttggtttggtttagtttctggttgaggtttgagaatgcccaatttggattttggggattttgttacccaatcacacgcaaatataatgagagaagtggcttgattgtttaacattaattaatgggctactactccattttcctgaaaatagactctaataatcacgttaccccacatttaatatgtttgagtggtttttctacttgaagattgctatttgttaaatgacactctagattaacaatattcctttaaaattattacttatgttatggcaactagaaaaaatactagacatcacttaaaactttttaaaaaatttctttatacttttatctttcagtcttttgcagaaattttcaatttttttttttaataattatgcacattattatagttatttatggctatttacatatattttttaaaatttttaaatagattatagggtaaatactattttagactctatgttttgcaaaagtttttaatttgactttctattttgttaaatgataaaataaaccatgtatttttttaaaatcatacaaataggaccctgaactaattttttgtcaaaataaaacttaataataatctgatctagagatgttatgacaaaactggttacattctttgtatctgttcgtattaaaaataaaattgtcttaaagttggttatattaaaaaaataaaattaattaaatattgaactcagggtcctatttttactattttggtaaagtatatattccattttgtcatttaacaaaatagagggttcaattaataacttttgcaaaacacaagatttaaaatggtatttactctagattatattgtagaaaatattttcttttttgtaaggatataaaaataaatttaaatattttattagtgcccaagtttttttatacatatagtaagtaattgtttaaattttacaatctaaaaatttataagtaattttaaactagtacaatattcacaacaattataaagaaaaaaaagtatactataaagttttcctaaatgttaaaacagattaaatgaactagaatgaccattttaagggtataaattcttactaatttatattattatttcatatattactatatttttgaggagaaatgcagtgcatcgtagttttgtaggctgtcgtccaaattggggtatattgaaaaatacttttttatttattaattaattaaatttacctttaatttatatttaattgaaacatatctctttttatgtatactgaacataaaagagtcacatgaagagtatattaaagtgacatggataaaattggcaaagtatttaaaaaaagagataaaaatgatagactttaagaaaaagggtaaaaataaaagagaacaatataaaaaaaaaagtatagagtttaattttctttcgtgtaaatttggcaagtggcttaagatgagatgatcgagaggatcagaatgaatgtattaggctcaaccctaagctgagagatgggctaggtttatgtctagggcccactcaaatttaaggcccaaaaattataggtaacatatttatatgtagtaaaaagaaaggtaattttgcaaaataggctgaataaatgacaaattcaattttaaatacaaacacacacacaaaaagaaaaatcttggcctatttatattgagggccggccctgaatagtattgttcattttcgaagtcacgcaccaaataatgttgacaactaacaattgtgagaaatgagaattctatgttgtgcttctcttttcctttctattctttgaagataaatgccaatacaaacttttgttttttctgtcatattttaatatttcacacttgtgctataatattaaatgaacaaggttcaatatttactaaaatgtataataatttttatttatttaaatagaatttatatatcataattttataagtgtgaattaaatactagagtgaaagaaaaactccagtcaagtggaagtggtttagttttagattaccaaataaaatggtaagtttgactagggaacaccctttactccttttgtagtgtttgactctctaaattaatgtatgacttaattaggactgagtccaacaaatcttagcctccatctaactaccatatgtttgcacatgatcctttgatgggtataagttagagaaagcttacacaacaatgtcaccctttcattttctctaaccattcaaataatgatgactcacatgtcacatcttaaattattttgcaggaaagctttgcattctgaagatctgactaacctggattcgccacgtggattgggctgctcaaatcctagtaggctcattattttgtagagttgggctgcgaaaattagcttgctcttagtctaaataataaatatatacaaaacaatgaaaaaccagaaccccatcacataatttgaagatttctaaaccagagttggttttcttgactaattcttctactcctttcaatcactgtataacaaattctattgtatacatcacactttattatttttcacaatacataaaattatttattattgtgtgaaattttaactatgcaattgtacctatagctacaaataatatactcacacaagtgaggtcaaatcacaaacattgttgttaactactaataaacaattaaattcatagttctatctcgtgatataattattttttttaagaagatttaaaattaaaattaattgaaagcaataaaagaataagtaaataacaatgatcaatatatttttataaactagcaaaaaattacgtgcgaggcacgtatgttaaattttatgcttaggttttttttatgttatttgaaagtgagatt

SEQ ID NO: 299246 - DNA, 1491 bp, Cannabis indica
ataaaatatatatatctctagttcttcatgattttcctctccttctcttcatatcaattaaatctctaaaaactttcatttctctctctatatatctacatacacatacatataagtatatatatacacatatatacataaatatacatagagagatcaaaaaatggagaaccgtagtaacaataatgggcaatatgggctaagcttggaggaatacatggaattgggcccagtaatagagagataccacaactttgaatcacaaccgaacacgtgtacatcagtgatcacacaaagaatcgatgcaccagccagcgctgtgtgggccctagtccgtcgtttcgacaacccacaaaatacaaacacttcatcaagagttgcaacatcatgaccggagacggcggtgtggggactatgagggaagtcaccgtcgtctccggtctgcctgcctccacttcggtggagcggctcgagatgttggacgaggaaaagcaggtgctcagcttcagcgtagttggaggtgagcaccggcttaataactataggtcagttacttcagttaaggagtttgttaagaataaaaacggaaacgacattgagttgaatcaaaacgacagtgaattgagtggaaacgacagtggtgacgtgtacacggttgtgatagaatcttatgttgtggatattcctgatgggaatacgactgaggatactaaaatgtttgttgatacggtcgttaagttaaaccttcagaaacttgctctactcgctattacttcttttaacggcgctaatgacggacctgacggaactaacggcaacggacgtcagtagtagtgatgatattatttcattaagcgctaaacgctgcgttttatgctctttttttttttactgatttgttatttggtgtaattcatcgatatgcaatatttaatatttaatatttaaagatataatatatctctttctacgtaggctacttcaataattttttttttttggcttctctatagaaaatatatatatagaatttttattttatttatgtttatttttcatcatataaatatgtaataactagttaaaagttatctggggtgtatccaagcttcatgggcaagaaatttaatatcgatgcttgtaatttttataagttcttcaattaatttttgttcaaatatgttaatgttgaacttatattttagctaaatatgttttcattgctataattattattaatgtgtgctatctatagtttggatatcttaatagaataattagataaagtattttttataaaatttttacattaaagattttttatttatattttacggtgttatataaattaaaattacaaaaaaattacaaaaataacaaaaaaatatatataacgtaaattaacaagagtacaatatggaattacattaaaatattatttttttttaaataaaatcataaaaatatttaaaattccgtacaactgtattt

SEQ ID NO: 299247 - DNA, 4868 bp, Cannabis indica
agtatttttagagtactcatttttcattaaatttatgattcgaatctatgacatttttataatatgtcaataacccaaccgactaaaatataaatatttgtttatttattatacattttaatttttacttaaattaaaaacttaatgtatttttttttttttattcggccccctaaaaagtgtaggccctaagtacgtgcctagtccatttatgcttaaggccaatcttgactgcagtattcattgacatgcatatgaaaaattagaattatataactattcatgtgcataaaacacgaaatatataggattcctttagtacactatattatattgaattatttttaatacaatatttttttatgtaaaattatatgtatggtagattgacttttatagatattcctaaatatataatattttagtatgaattaaaatttaagataatataatataagaatataatatataattaaatataatataattttataggatgtattaaacgagctcataatctcttattagcccgggaatactcaatttaatttttttcagtaattagtaccttgtcggagaaaaagagcctcaattgttgatcgcgggggacatcgcgcttggattgaacccatgattcgcaggagaaattaacaaacttatcgtcggaagagtcgtaacagagtgaaatagttttcatgtaaatctctctttcgaaatcattttcaataataacagcaccaacatcaccaaaatcctttggaatatcaacctttgcttcatagttcatcaccttgtcctttttcccacctttttttgattctgggaaacatttcatctttctttgctttccagtttctaatcatcacaaccacacaaattaaacatataactatattattattgtcaaataataacaacataataattgcattatacataattttaacatattaatgtgtgtctagtaattaattattatagttaagtaagtaactatggtataactttaataatgttttatatattaattactaataatttaaattatatatgttgtgtatcttaaagtgtttttgtataaacaatttatgtacacaaactttgatgtatacataaagataaattaattaattgaaaataattgtcacataataagtatatgtaaagtttaaaatttatataatttatcaaaataaatgatcatgacatgaaaatagacactatattttattataatatttgcaaaatgacttttttttctaataatttttaggatcgaaaattttcagaacaattttcataaagattatcaaagtaaaagttttatatattatcaatacatatgtatttttttttttaaaaaaaaagaatttatatagcaaattgtttgaacctgccctttaaaaaaaattaaaatagccaaaacagataatgaagtatccatacaacataaaattttctaatattatataatatgcaaaatatatatgacaagaaaaggctattttccttaaaaaaatagaaagggctgtattttttgtccaaaataccccttaataatatattatttacatatatgtacttttctttttgtaaacattacatatatatatatgtacttaccaagatctttttcagtactcaaagtaaaaataatatattttattcatacacatattttttttcttttttcttttaatatcatattgttttagatgccgaaaaacttgaaaaaattttccttaaaaaaatttcatggataccaaacatataaaaagaaaaactatatttttgcgaaaataccccttaataatatattattttactttaccaggatctttttgagtactaatgagctcaacactgaaattagctacaccaagaaaatcattagttttatccctcaaactctggggtttctcaattaatggagctgtttcacgttgtaccgcaacattaactgtaactctttcagtggctgttttgtctttacttgataccaatcggccaagtaaactagctttgataatattattgcctttgccacgatgagaaattgaaacaccaacattatttttgttagtgtgtttagagggcactaacaatgaaaatggagattgaaaatgataatttccatggatgaatggtttgtttagaacaacactagtttggccactagtaacttgaacatgaggcttcaacatttttgttttgattaattagtacaaactaattaattgggtgtgtatatatatagatatattttctctcttttctctctagatcaagattggttgcaattgatgtggttatgtaatgtatgtacctctatatatatatatatatatatataaaaaggtaggtgtggacgagttataatagatcaagaaataagaaatgaaattattagaaagaaacaaaatatgtagatgggaatttctttgatattatgcacatggatattaattaattgctgggaaaaaataaaataaaaaatgtgtttttttaaaattataatataggttcatttaagtctcaattcctagctcttttaatttatgaaaaatgctaaaagtcagccgtgatgcttagtaatttcttcggtataataatttttaaaaaatatcaataaataataatagagtacctctatatagtgttagattatttaattatttatgtattaatttatgtgtgtgcatgtgtcataaggctatatatataaggtacctaataggatgagtttaattaattattaattgtacataataataaattagtttactataagtttcattcaaatataaaattgcttatccaaaactttttcttttatatatagtttagttatctcatccgaaaaaaggaaagttttgttagattatttgagaataggaagagttgattttattttacattaatatattgattgtgtgaaatgtgtatagtcaaagttcataatataatttccatggatatcaatggcttgtttagaagaacactatagtttggcacttgaaggcttcaacatttttttttattaaaactaattaattgggtgtgtatatatgtatatatatcaagaattggttgaaattgaattatataattatatatatggacctatatataagtaagttggagtacatatataattatatatataatagagagaattatttattattaaagtgtgaatttttatattaacgatattagtacaaaaataattaaataggatggtgtgatatatagttacaataattataagtatagaaatgctaaaaagtcatatatttttattagtcaccaatgatactcggtattttctaaaggcagcgttacacaattagttagtgatatttttttaaagttattattttcttaggttaatatgagatctgatatttaattacactgataacaccgaagagagtgttaggcactagtggtgcttttttttagcaattctcttacataatactactaatgcctaacactctccttggtgtcgctagtagcataacttaaaaaataacttttaaaaaatatcgctaactaattataaagtaccacttataaaaaatgttggtcactaatagtacccacaagccatgcttatatgtagtttgaaatgaataaaaattattagaagaaacaaagatatgcagataagattaatttattattacttgaggctagcttaagtagctataggaggatgtgtgtgttggaggttgggttcgagttttaaattacatatggttgtaatatacaaacctttaaattaataaaataaataggaataatttatttttaataaattgctggataaaagtacaataaaatctgtttttaaaaatataataggtcgatttataaggtctgcctaactcgtttggaagctttctctagctactatatatatatggggcatttatatagtaggaccaagtataatgacctatgctatggggaagtaatattaagctttaaaagggaaaaaatatatataaatttgattatttaagatttgggctttattttttttaggctttagtaataagtaaaattttattgtttgtatgagtttatgtcgtccgggttcgagagttcacaatgagttcgccgtcgggttgccatagggtcgtcgtgggatcgttataatggagagatggcatgggatcgttatattgttcttccaaaaatcagaacgccgttcagatttttggaagaacaatattgtaatggaggatgagaaaattaagggtccttttttttaagttttaatattttttatttttaaaaataaatattttttttagaaagtataaattttttattgtatacaattagttgtatgataagaatatatatcttaaattataataaccatccgatctaaaattaatgattaaaaaaactaccctactaataaagaacttttattaaatcttaccataattttgtcctaaatttatatataaatatatttgaagaatatatagggatataccatgaatttaattattctattcacaaacataataatataaattaattaactatgcacgttccttggattcattcaaataaagaataaataaaatttttctttaactatgacttttgttgagtaatgctttttgatttttttgtttttataatgttacattctatttattttttaaaataatttattttttgagtataagttactgttattttttttttttgaatgagtaagttactgttattattgtagcatatttttaataatttatttattgagtataagttactgttattattgtagcatatttttaataatttatttattgagtataagttactgttattattgtagc

SEQ ID NO: 299248 - DNA, 885 bp, Cannabis indica
tcagctgaggtgagcacaatcagtatgtattgtcttgtcccacacggattaaatcatatataactttacaacatgccaatcttttgagtatgaatgattcaaccgaaacttaagtacggcgcccggtttctcggcaaccaaacagatttagcaaaaggattaagtaagtaggtaagtaaaaaagaagtagtaccgtgcttccgagggcgatggaatgagtggtgagagcagaggcaaactggcggcatcgacgatacgtctgaagccaggtgtagcgtcgagatccatggaccactgagtctctagttggatgtatggtcgccgctctctccagaaaccagagcggagtcaacgccgtgtaattggcggcgttcttcggaagatcgtcgatatctctcctccctaccatacccatatccctgcacttctctctctctctctctataaatatatgtatatatgtatatgagtcggcggctgtggtggtgacaaagaggaaaataaaattaaaaaataaatagcaaaattaatttaggagggtgaagctcttgagctgagtctgagaagattagagaatagagacagatatatatatatggctgaaggttgtgtcactctttgctcatccaacggctctgattctgtatttgaccttttttttaacgtatatttttttgtatatataaacgaacggtttccattggttcggagaggctatgtgcatgtatttatttattatttaattttgggaaggattagaaagtaaatattttaccataataaaacaaattctaaggtggtatttgattggaagcaatgaagacataggaatgagaatgagaatgaaaatggaaatcggaatatgaatagaatgaaataaaattt

SEQ ID NO: 299249 - DNA, 2755 bp, Cannabis indica
agagtttctgatatttcaatttatcacgcgtgttcaaaaaacttcaaacttattttttgatactgtaaattatttaaattttttaaaaatttaccataataatattataactataataaatactgttatagaaaaaaaatattctgacatgtgattttggacacaaaaaataactacgaggttgtaatagtgaattatatatagagaattgtttaaaggaattattggtgtctagtacgcttctcatactgctattgatgtaattaaatatcgagtgaaaataattttttaagaatatcgctaaatgtcacctatataaaaagtgatgcatactagtagtgctaaaaaacattactcttctctacatgtaaaatctctttttactttctcaatgtgtatttattattccatgcatgctcatggatgtggtctatatatgtgtatatatgaattagaataaaagaattaactaggataaatactaattaataagcctctaatttggattggcaatcgttatagccaattacatgtgtattataagcatttattaagtaaataattccacttacattgtaactcccaaatatgggtacgtacacgaacttataatcaataaaatcaccaatccttcccaatttttcttcttttcatatataccctcttctactttccacttattactttcgtataaatatatatatatatatatgtaaacacacacacacagtgtcattagtcattacacatacacatagatagttaaatacccatattttaattctgttagttcaaactttaaaatggagtactctacccaactcatcgtgccaaagattgaaaacccatttgatgttgactgggttttccatgaaaacccaaatgaaaagtaagttttttttcattaattaagttgtaaaaattcaacctttactttcttttaagtttataatgattcatattgtgtgctctgcttcattgatttcacatttctttaaacccccatttgccttattctattatataatatgtatatgtgtgtactactgttgaagattctgtttgaaatcgacatattgatattgtttggtatataaaaactcttcctttttgttttttgttcttgggtattattgcagcttagtatcatcagtactagattttccaacatttgatcaatatgagaattactcccaatttggttcattttcaaaccaaaatgaccaacttcctcaaattgatttcaacagctttgaagattttgataatgggttttcattagaaaatgcctttttaaattttgaagaacccaatatggttgatgaaaaggcccacacaaacatggtcattacttcttttggtcatcataatcatgacaaaaatttgataacttgccatgatgatgatgacaaaaacaatattgggtatgatgcttcaagagaattgtatggaagtttggtgaagaaaaatcatgatgaagagaccatgtcaaatggtagagtcaataataataacaatggtcatcataacaataggaagaagaaaaagaaagctgttcaattagaattggatgagattcaaaggtgcttcaaattaccaatcaaagatgctgctatggagttgggaattggagtaacaagattgaagaaaagatgcagagagcttaacatcatgaggtggcctcatagaaaactcaagagcttaaagtatcttttaaagaatgtcaaggtttgtatacatgtgtttttgtcatatatatgtataaatagtcatgagtaatatacttatctaatgctgatattttgggcaatgcagaatatgggattgagtaataatgagataatgatgttagaagaacaaaaaaggcttgtggaagagattcctgacatggaattgactgagagagccaaaaagctcagacaagcttgttttaaggctaattacaagagtaaaggtactttagcatcctcagttcatcgatcttagaactactttcttatattgactttcatgactttacaggcacacaaagttaaaaccacaaaaaagatatcattttgaatcaaatattgaaaattatagtagtagttgtagtactacttttctagatagaggtttaatcatattagaattaccattgaaacatgttttctaatcaagtagtactctgtacaaagttgttaaatgtcaattttatgatgatgtggtttacttttttctactttataaatctcactttgtttctcttataaattctaattaagggattgaagtagttggctcttgtaagattagagataaatatatatgattattaattggattaatataatatatggtggtggtactactagtagtacacatcacatatatctatatatatatatatacattaattaatcaaagtggttgattatatcaagtattacatcatatcaaatagaagcttttctaatcatatcatgatatactatattagaaatatgttttccagctatatacaaaatcatgaaaggaaaaataaagaaaagttgaagcttatatatagaaaagtcaatgaaaccacaatcaagaagatcgaccaagactactagtatgattatttaatacattatatatatatagatatagatatatagatacatatttattatgatgaagagcccatttttctctgtttttcttgcttgcgtctccatgggaccacttgcttaaaactttcataaatgcttgcctgcatttttgataaaaatgt

SEQ ID NO: 299250 - DNA, 4768 bp, Cannabis indica
taattttaaaactttacaagagtattttgtaattaaaaattttaagctgtaaaattataaataaaacatagaaaaagatattttttgaaattttcctttgttttttttagaccgattcctttgattttatttttattttttattttttatttttaataattttaattaaaaaaaaaaaaagaatacggttcaataggatctgaaacaaaattttgaagctttaatcgcagatcttcaagacgttgaagaaaaatggaggtaagtcttttcaattccattgaattggtttctctttttaaataatgtttgacttctgtatttgcattgaagatcagacactggtttaggatgtttttttctttagacttttgaatcccaaaatttgtgttcactttgaatattaccccaactatattgtgttatgtatataggcttggcggtttcttatcttattacaaagaaagtgggttttttgtagctttgattttgttttgcagacatctttaggcatggaaagccttgcaattaagaccgatcataaacctgaaaagattaaaaatggtaaaggagttcccttgttccattgtgatctgtacgatacagaattagtccacaaaatagctcaagcattcctcccaggaatatctacagcctgtgttgacaacacatcaggagatatctttaggaccccagcctcagttgctgctgaattcagaaaggaaatggttgattacattactcagagaagtgagagttttgttgcagagacttttgtcttaggagatgttccagaagtagacgtttctgctaacccttatgacataatttctgactttgttgatgactttgctactttgaagaggaacttattaagtcgagtttctggatggttgctaagtgaaaagagagaagataagattgatgattttgtccaagaaatggagattaatggattttggttgaccgataaaagggaagccatagctcaaactttgcttaagaatgttgattttaagaatgagtatcactgcaacatgagatttgattctgcagaagagctcactgaacatgttgggagctgtggtttccgatcaatgaattgcgagaacgaaggatgtaatgccatgttttctacgaggcatagggagaagcatgattctggttgtccttttaagataattttgtgtgaacagaagtgctctgatcgtatcatgagacgtgatatggaccgacattgtatcactgtctgtcctatgaggcttgtcagttgccctttctattcagtgggttgccaatcagctatacctcatggtgtgcttgatcaacattgttcaaacaatctccatgctcacttactttatgttcttcgaagtattcataagaaaacttgtgaagaagatctagaacaacgatcaaaccaagttgagaaggtatacatcagcttctagttttttgcattgattaagtttctcattaaactataacatagtacatgttttcaagcattttttaagacatggttatctctcactgtagcattttcttttgaggatctcagatctcatatgtttatagattcctaaatttcaacgtccagctttgcattcctcctattgttaacctgttgtgtcttcttttgtttgatatggtatcccatttctagagttttataatgtatgattgaacattgaaaaaaaattttgaaaaccatattttcatttcaagttgttcttactacttcccagttcccatgtagtcatttattttgtaatttcaagactatgaaattactggaaggttactttgtgttactgcaagtctctgatgtaagagaacgttttggcaggaattatcgcccgatcaattggcaaaagctcgagatttgagatcgttaaccactatagttaaggatatagaaacaaagctagggccattcaaaccaaaaaaagaaaacaaggataaggaagagaaagtagaaactctgaatttgttggatgaaccagaaaaatttgaaagttaaactcaaggccggcaactcacaccagtagcagtttagcaagaaattcaggtcttttaccgagccaaaaactctattatccaattttcttcttgtattatctattgtctcatatattttgtatctttattttgttgactcttaacatgattaatgggaataattctttttttaatccacttgattgagaatagttctggtcatatcacagatgaccttcgtgtttatggtgttttctccattttcaactgacataacagaaaaggattgcactaagccttagtttcctttttggattggaacagtggatatttgaagataaaagaccttcagagcatatatttcaaggctgaaaaacccaagcctaaacttttaaaaatgggtgaaacatggagttttatttaaatttctcactaacttcatataaatggttcacgcagagaccattatgaacctctaaacaacccagaaattaaatcaatattagcagatgtagacatgtaaatcttaagcaaacaataaagacatgtaaatgaaagattgcttttcataacaacctacaaatctccaagtcaagaattaaaagtttagaaaatataaagattcctcttctttctgtcaactgtgagtatccggctgcctaccgccagcagcattgtactcctaactatctctatgcctttaattactttttcaaaggataagaacttccctgtcagctggaatgcttactgctaaaccctgcaatttagtatctcaacttcatggaaaataatgtaatgattcctccagtcccaagttttgttgatctcatcatctcttgcttacaattctgtaattcatgaactgatccaagttcagtgatacatagaatagagagcatgtaaagtaaggatgcaagtcctcaaagcatcttccttgattttgattttgcttttcaatatctataaaatgtcctcagagcttgcaggtatacttgatgatgttatgaaaagttttcttgtagtctcctttaagaaggctcctgattgcagccaccgcatggtctcttgacaatcattttgttggggttctgtgcatatgtgcctctcacttaaacaactcaaacatccgcagaaagctcctacttatgtccttgtgctttccatcttagatgttagtagccatgtttggcacttctagcagcatggcagatataacgtggatggactgcctttaagagccccatgttagtgcaactactgagatcgagattgagacaaaatgacaatgaaaaagactcaagaaagtaagctacagccacaaattttccaaaattactagtggcatatactggtgagggatttggactcagttacttgcatggctgcttgcttatttatctttatcaaaattcaaaagcctctttcaacttaacccaaatattaaactttccttgcattctattaataggataattttcctccccgcgagaaggatttcgttaaggagagattgcgatatcaataaagggaccttgcggtattaagaccagcaatgtcaatgaaaaggcgctatcaatcaactaaaataatagccaaatatttcagtaccattaaagtgagcttacatttactttataactcatgtaatcaatacgataattatggttgtaagtttgtaatagtctatcataatgaccacaatttgtaacaatcacctactacctataagtagtaagtaggtacctccaactctattcaaaagggggagggctgatctgatatgaataataaaatacagagcaagagatctctttcaaaaattgattaaacaagtcgagctcgaactcctgctaaactactataatttattcttttctattatatttttacatacttgcatatattttatacttggagaaggactgatgtgatatgaataataaaatacagagcaagagatctctttcaaaagttgattaaacaagtcgagctcgagctcctactaaactactataatttatgcatcttttctattatatttttacatacttgcatatattttatactatattacttttagtactcgctatgctaagtgagtacttgcatgtttatttttgggtgttcaaatacctttgaatactcgcatagtttggtattatttaaatttctctgacaacatttgacactagaaggaagatattccaagctttccaacaatattcctgtgatttttggaggtgaatcatggtggagaacaagacaatctacaataattacctttattcaattagacacaaataataaaaaaaatatgtgagtgatttctcagccccccatgtatttagagatcatccaaaatcaatacaaatcttcgttcgagattatcaacatcattgttcaaagaaacacgaaaattcttaaaagaaaattcacctcaacaaagcaatctcatcagccccatgcctggaaaaaatccagtttagcaagaagaaacatatacaatacattcaatgaagaacgggtgactcttatgttgggttttgtgccctaaataaaacccatttcaatataattagatttactaattaataaagatcaaaaattgcattttatgttgcatggttcacatgatttatttcattattatgtttaatgtataaattttattaagtccagaacatatgtatatgttcatgattatagtgtcgtcaacacagtggaatataatcatgattatatgttcaaaagtttaattccctgattt

SEQ ID NO: 299251 - DNA, 4205 bp, Cannabis indica
agctttgagggtgatataattaataatcattttattgtgtttattattatttatgatacacacaattttttgaaagagtaagacctttggttttctttacaaaaactatccaatgttttcttgttaatgaaaaggtacttctgtcttttgagtttctcgagatttgaggggtttttggttaacagtacagttgacacatgttgctttattaattgatccagaatttccatatgcaagatcgtggcaacattcccttagtgcattttgaataactattttggctatacataagtgatgtagaaaaggatttttcaactctaaaacatacgagagtttcttgttcggagaacttagcttgcagaaatggcatttttgctcaaggataaatcttctccatccctaaaatagaatctctcttcttcaaacatttttttaggtttgcagcccttgaatcctgcattgttatctttaaatcctttctcgagtttttgagatttcgagcccattcctattcctccaatcctctctctgcggtatgtagttgtccctgcttcgaacatttttcttttaacttaggaactcatacttcgtctcaagtggagccagcacaacccttagcagcatgtccattttctatcatccctacaattcttgctcctattgaggaagctgaagaggacccagagcagaaggagctctacccagactacagttgcgtattaccctgagcttggttcagtgcctaagcttgaaactattgtggatgatggtgattcctcatcaactttttgcatctctgcctcgtctttcacacaagaattgcctcagattgtttctgagactattcgtcccccaacgacgttcaaccaaaagggatgggctacaatgcgtagggctttacaacaatgtgaatgtttttctatttagatgatcataggacaattagctaggaagatggcttctcttttttgtatagtgccatcactactcccctagtttcgaatgtaattgtattaacttcaaaactattgagtatacttgtgaaggaaagtggccttgttgtttgttttttatgtataaagttatcttttgcttctttagctggcttttctttgtgtgtaatctatattttttcgtaattaatcatacctttcgtacaattggtagttttgtttttttatttacgtctgcatttaccctgtattatataaattgatagtctgcagtatttttccctaatgagggcgatatgtatttggtatattgagggttgttccttttttgttattcaccacttctttgccttctctctctctctgtttttttttttaaatctttgccatgttcatgcaattagttttgtaaatgtcatcttattccgtggaagggacttgtactttgcctttcgtaaaaggtctttgctatgtttatatgatacttctataaagtgtcgtgttactctatggaagccacttatctttttcctttcataaaaggtctttgtgatggtctactaatttttgaatctcaccttgattacttttatttatgtatattcgagatttttcctccttatgggacaaaatagtacatagttttagtgcattcgtctactctcatttacaagttttaagtgattacacataaaaattttaaggtacctggtgttccaactcctggccatctcagtttcatccatggtggctagcttgtaagctccttttcccgtcaagcctatcaccaagtacggtccttcccagttggaagataattttcccgccttgtattcctcgatgtttttaaaaacttttcttcagaccaactcctctgggaggaaattcctgggcttgactttcttattgtattgcatggccacttttgagtaatggttttgcattcgaaataaaagcctgctccattttctcttctaggtcttctgccgtctgcagtagcaaaaaggcattttccttggtgttaatgcttgttcttcaagtcgagacctatgtttatgttaggatgatggcctccattccatatagtagtgaaaaaggggtctctctggtcctgaccctgggtgctttcctgttcgctcagaggactccgaggcccacctttctttggtgtttttgagccatttcttgatattgttcataacgaccttgttcgaggattcagcttgtccattgctctatggataatgtggtgttgaaaatacaaggttatttttccactgctcgcaggaatttttgaacttacggcttatgaattgggatccaatgtcagccactatatcttggggtaatccatatcgacacagaatattcttccagaaattttttttgtcttcactatcctggatctgagtaaaggagtatgattcaatacattttgagaaatagtcggttagagccaacatgaaccttttttgagtcggtgcccttcgcaatggacctactatatccatccctaatttcatgaatggtcatggacttttaactaatattagcttccctgggggacccaatatagaaggggcgtgtttttggcatttttcacaatttctagaatactttgttgagtcctattgcaccgtcggccagtaataaccttgtctttggactcgctgtgcagtgatgtgccctccacagtgactgttacattctctttcatgtacctcagccaagatcagttccccttccagtttcccaatgccctttagatagggcccgtgatatgatcttctgtatagctaatcttataataacgtgtatcttgagacctatgatatcactttccaagctttatttgggtcaggcggcaatctgttatctcttaggtattctatgattggctatctccattcttctagtgattatgtcatcatctttgtacattgaacttcttcttccaaagtgatgatgggttcagggatgaaatcaaatggtaatgtcctagtaacctggagtcgggaagaagacccatcctactagagcgttggcgtgcatattggcttctcaagaaactttactaatttggaaatgttcaaaagttgacgccaacttctttacttgggccaaataactaaccattttttgttccttagcttcgaagtccccgttgacttgctataagattaactgggaatcatattaaactaggactctatcggcccccattgccttgactagtttcattccgtgaattaaggcttcatatttggcatcattgttggttgctctaaatcctaacttgagaaactgttctagcatttccccgtctagtgataggaggactattctgactccacttccatggacgttcgatgatccgtctactttcagtatccattcttggtttctagagctttctttgttttgtatgggctttgggattatctcgaccacaaaatctactagtgcttacccttcaatcatcgttcgagggaggtattgtatgccaaattcacttagttctacttcccatttcataaatcgtcttgatacctcgggtttatgcagcaccgtttctaatagaaatgaggtaattaaggctattgtatggaattggaaataaggtcgaagtttccttgctgaaatgacaagagcccaagccagcttctcaatcatgggatatcttccttctatgctagaaaaagttttgctggtgtagtatattggtagtggcatcttttcttgctcccaaattagcacgagctgtgtaataccctagaaataagaaatggattagcaaaaccctaattagataattatgaataagtgagccaggggcatttaagtaattatgacctgagaagggcaaaatgatgaaatgaatttaattacgtgctttagggactatattattatatagtatgtctgtgttgtatttttcaggtgtgttctgagaggttggtagggtatagtcacaaccgggtatttcgggccgaacttggttcgggcccgaaatgtaattggaattgaattattggcattgtatttattgatgtagaatctaaagattatttgagttttaatgggtgtgagaggacatttttgcccttggtttatgcttaggctttatttggccctagggggcaatttggtcttttgacctttaaattacatatgataaaagattgatttttggataaatgaaaaggaaattctggttgtgtttctctcatggccgacccccctctctctctc

SEQ ID NO: 299252 - DNA, 2764 bp, Cannabis indica
gtaaaataatttccaacattaaggtgccatctagatcgctcatattcaattttccattaacagactaagtatattgagataaattatcattttactcgtcaccatttgaagcttaccaccatttcttttacttttttccttcttcattgtgtaacttgtcagtttctttactaagtcacatatgatttttaagttttgttttcttttccggaaactatcaatgcttcttgctgcaatatcatgagtttaagcggggtgttgaataatttaataggattagtttattattttttttgttaatagcttgtataaggtttagctattatttgcatcatttacttttcaaacatcgcaactgaatgaaatttttagcctctgtatttttctctatcttattgttctgattcattctcaaataataatcataacacatatacttttaactaataattttgtgcatagttatttatttagcagtagattaattgactattttatgactaattgtctttatactcacctaggttaaaataaaatcccatgcaatctagtaacactatgaaaaagtgtagctctaccaaaaaggaaaatattttaggtaaagataatttcataaataaggtatttttttgtgcatttttaccctagctaggtgtagttttaagataaataattgcattataataaaaattgtatacagtgcacccatatatataattaatttatcgtttaaatttatatatatatatatatatatatattcattttggtgaaaatggtatatgtcgaaggcctatgatcgcatttgttagaaaataaaatgagtcacccctgctcctcaccaatgattctcatgctctgccacctactagatcagtgactccttgtgtggtccttctctacaacaaatttcttccctttactgttagaatattccttatgatgctgatttggtggtccccatataattgtgtaatgattgttttattattgtatgagatgtacatttctagaatattctttgtaataccttccacttataaatacaaatctagccagccctaattgtgtgtgtgttgagtttttcaatcattgagcatttatttgttttagctaagttttaaacttggtatcagagccattttgtccaccggtggtgaacaactccatggccgaacaaactccccgtggtggacaagatgagtcagcatccaggtccgctttaagtgtgattgctcaatcttcaacttcgtccttggttttccctagaccgcaagttgccagcaccctaactcagccttttgcgctgaagctagatcgaaataactacacgctttggaaaataatggtatctgccattgttcgtggtcaccatctagatggatatctcagtggaacaaaggtgaagccaatcgagttcattcatatagaagagattgtcgatggaaactctgttactgtgaatcaagaattcaaaacctggattgttcttgaccaacttttccttggctggttgtacggatccatgacagagagcattgcaacagaggttatgggttgtgagttgtcttcaagcctgtggcaagtcctggaaaccctgtttggtgcacactcaagaatgaaaatggatgaataccccacaaagatatagatagcaaagaaaggagccatgactatggctgattatcttcgacaaaatcgacaatgggctgatgtgttggcccttgcaggtgacccgtatccaaaaaaacaacttgtttctaatgttttatctggtcttgacattgaatatttacctattgttgtgcaaattaaggcttgatcttctactacttggcaagagttgctggacattttgctaagttttgatagcaaagttgaacgactaagcacactgtctggatctaacaaaaatgcttcatcaaactctgtgaatcccagtgaaaatattgccataacaagacctggcagaggtggttcaaacaatcagtacaatggtgcaaatcgtggaggaaacacaggtcactataatggcagaggagcaaggggttatggtggtagattttgaggacgatgtggtggaaggcacaacaacaataactccaaaccaacatgccaagtttgcgaccgttacggtcactcagctacctattgctataatcgctatgatgaatcctatatgggaacagatccaaataacagtagcaataccaccaaaggaggacaaagtggagctgctgctgcattcattgctactccagagatggtggatgatacagcctggtatgctgacagtggggctaacaatcacaccatagttgatgcaaatccaatggcccagaaaaatgaatacactggtaagaaaactctctcagtgagtaatggctctaaactgcatattaatcatgttggtttcttatctttgccttcacatacctcaaatcccttattacttaaaggagtgcttcatgtcccaagaattacgaaaaatatgataattaagtatatccaagctaacatgtgataataactattctgttgaattttttcctgacttttttgtagtgaaggacctggaaacaaagaaggtgcttctccaagggaagcttaaagatggattgtatcagtttcaggagctggaagaaagtgaaaaagaccaaaatctctccaaaaatgaaacctccacataacaccaatgtagctttaatgtctgttgttaagtctatttgagtcaaggataagtggcacaagagacttggctacc

SEQ ID NO: 299253 - DNA, 3397 bp, Cannabis indica
tgttaataaaacatacttggtagtaaatctagatccttgtaaaatatttcaaacatatatcactcagaacgtggatatagtggttgaacaactttgagttgttcagttttatgctcaggttgttgagctaatccttactgctgagggtgcaaggactaggttacataagaaatattatgaggagatatgcattgaagcaaacgtctggtgttggtcccagtaagggtgttgaccatagtgactgtaagaaaaggtctagggatccatcagctactggagtaaacaagagatttcaaagtaattaaggattttgacgtggaggaaacaaaaattggtggacttatctagaatgtcgaggtgcaaaagacgccatcagggccaatgacaagctaaagcctacttctagtgtggggtggtaagtcatccgaaaagaaattgtccacatatatagcgactagaatagaaggatgatggcactttagtttttgtccaaatgttttctttgacctaggcagaggctaatgctagtctttttaccgtgataagtcaaacttctattgatggtattttgttgatatttttaattgattctggtacaacatattcctatattttgagaagggtgattagaaatttgtataaatttagtgatgtgttactgagtagttttggtacctttcagttgagctaaagttagaagattctgatgttatactagggttgaactggtttgcaaggtataatacaaccaccgattgtgaaagaaagatggttactcctaaacaaaagggtgaagacccattcaagtttgtgggcaaggttcaaggatcctgaactccattaatctcggcgctcaaggaaagagatttgttgtgggggaggatgtgtcagtttgttacctaatatggtatatgttacacaagaaagttggaccaaaacatatcctgatggttcaagagtttttagatgccttttgagaaagctactagggttaccgccgaagcgggaaattgatttttaattgaattgatactgggagcaaaacttgtatctaaagtttcatattggattctaactgtagagttgaaagggttgaaggtttagttacagaggatcttggcttgaaattgctagaccaagtacttcatcttgggtggacgccaatttcgaaaagaagaaggatgaaactttatgagtgtgtactgaccactggaagttaaataaattaacggtaaagaataagtattctttgccaaggatagatgatatgtagatcaattaaggggaaagacccttttctctaagatcgatcttcgatctggttattactagttgaagactcaagaggatgatattcccaaaatagcttttcatacttgatgacttcgtaattgtcttcattgatgatattttgatttcttctgattcagaggaggcatatgagaggcatctttggatggtgtcgcaatgtcattgggagcataagctttaggctacatgcaggacatgcgagtttttttggccctaagtaagtttcttagagcatgaggtacatatagatagtattttgatagattccgtaatgattaaagcggtttagaattggcttccactcgggcttgcaactgaggatagaggtttttgggaattaacaaggtgctacaaaatatttattgatggatgtctacactcttactggaattaagtcgaaagaattgaaatagaggttaactattgtaccagtgttaacattgtcactcagtgaggagaaatttgtgatttagtgtgacacttctaaacaaggattagattatagtttgatacacaccaggagagttattgtctgtgcttctaaacagtttaagaagtgtaagtaatagtattctagttatgatattgaattgatagcagtggcttccgccttgggagtttggcgcttttacctgtttggcaaaagtgcaaagtttccacgaatcataggagcctcaaatactttatcatttggaaggatttaattaggagacaacgacgatggttagagctggttgaagattataatggtgtaattccctaccactctgggaagcaaattggtagtggatgctttaaatcgaagaggtctagaacaagtttgtaaaaagaaaagatctcaccaaaggttgccggagatataaccagacctggattgagttcttaatagaaaaacctgttaatatcacactataatctgatttgttagaaataattaatatggcccaagagggtgactccaaattacaggggtacaaagagagattttgaaccagttcgacaaaggactttttgatttcgtcagaaagaactttacgatatgaagataggatttgtgtgccaatcagataggaatattgaatagaaggttctaattgagtttcaaattgcatcatactctttacacctaggagcaactaagatatatcacgatattaaagtcctttgctaggtatgaaagatgacattgtgaagtatgaactagatgtccaactagtcagcaagtcaaggaacaatagggttctatgattcaatctgggtaagtaggagcaagtgtacaaagtcagtacagttttctttatcagagcggaatatgatcaaaacggattagtgtgctaatctattttgtcaaggaaatagttcacccctgtgatgcttcaaaagtaattatctcagattgagatttaaagtttacaactaaatgctgagagagtctatagcaagcatgtgtgatagattttgagggttcctaaaataagcatcatttgctgaatgaattttaatataataacagttattagagtaatggtaatatgatactaatgcagtttaaagatccaagttcgtatgttgctttatataattgatggaaaagctatgctgatccaaggtgtagagatattaaattccaagttcggaactttatctttcttcaagtggtttcaatgagaggaactcggaaattgggaagaaagggaagttaagttctaggttaatcagttcgtttgagtttcacgaaaggagaggttaggtagcttattagctagccatactccctgccttacttggagttcataatttgtaattcaatgttgagaagtgtgaggtagatacgattcctatactgagttacgaaaatatggaattttgaatagaattttcatatgagaaatagtcgatttaggtttatgaacgagaaaaggaaaaagtactgcaaaacaaagactatatcgttagctaaatcgctgtagataagcagcaagattaaaggcgacttggaaattaaagtcgcagctgtgggaacggtgttctgaattgtttggataaatttcgaggacaaaatttctataaggaggggatagttgta

SEQ ID NO: 299254 - DNA, 6473 bp, Cannabis indica
attgtttatgtattaaactatgctccgcagattttaatatctaccaaatcatgtccttcaaactttgatatgtactaaatcatgcccctgaactttcatccatattaatttttttttctaaaattagacaaaaaattttaaatctaacaatctcaataattcaaggagaatttttaactgccaacaaaactcaagagaaaaaaaatacataattagcctttataatatatacatgtaaatttgtagaattacatttaataatataatatctcaatattacacctccttaagcattctctaaatttttacaattagagatgctcttaataagtgtgtagcagaatcaaaattcttactaataaatttatttatggttgtgtcaactgtgtccaagtctaaccaaaatcaaaattcttactgaactgaaaacttcaaacttttccatattcaattcgccgccggtgtatttctccgatttaatttcaccggagatacggttatcctccaatgatgctaccctaaccatctgtctccctcatcttctccaatttcgcctattttagctgatcatgcccagcttcttctagggtttcgtaaaagcccattatgtctgataagccgcctttgaagcttctctcagctcaagaatgggagccctaatcgaagatttccagttcggcggtgcacgtcgcggaaagtggaacgcagcctatgctatcatcccttccctcctggatcaagctctctcatgtattctcaggcggggacttctcttctaagctttccatcattcttttccttgaagagtttgctgactcgctctttggggttgacgatgatggcgagtccaattccagggaaaattctctccttcgtgttattgatactctccgttcctttctccaaaccccggtggatggagtctctgtgggaatctctcttaaagagcaaatgatggtctctgtgacctcgattttgatctcgctcgaaacctgttccgatcgaatcccggtgaggctcttagaggggttggtagagttgcttttgatggttgttaataggcctaatcatgggcctgataggcagattcgggtggtcgcctgtgaatgcctccgagagttggaacaagcttacccttgtttgctctcggagattgttggccacttgtggagcctctgccagaacgagcggactcatgcttgccagagctacattctcctgttcacttctgtggttcgtaacatcgttgcccataagctgagtgtttccatcctgagtaattctgtgcctttggtcccgtttagcgtgccgcaggttctgctgagtggttttggttcagtcaaggagggctctgccgggttgaacttcaaggagctgaggagggctttggcttttttgctcgagtggccgcaggttttgactccttgtgctatgatggagttcttggccatgattatgccggtggcagtggctttggaattgcaggcatcaatgttaaaggtgcagttttttggaatgatttattcgtttgatcctatgctgtgccacgttgttttgatgatgtactcccaatttttagacgcttttgacgggcaggaaggcgagattgcccgtaggcttatgttggtttctagagaaacacaacattcgttggtatttcgattgctggctcttcattggttgttgggtttcaatgaattgctgctgaaaagagatgctaggaaaacgaagtcacttgttgatatgaatctaaacttctatcctagtgtgtttgatccccttgctcttaaagccatgaagcttgacatgcttgctttctgttccgtttgtcttgatatcataaatatagagactgggttggttgggggtgagagcaatggaaagacagtggtgaagctatttcaagatggccttgtctctgtctcagcctttaaatggttgcctgccgagagcactgaaactgcactggcatttcgtaccttccgtaagtttttgattggcgcgtcatctcattctgacaccgatccttccaccacaagaactctgatggagtcaaccatctttcatactgtgcaggtactcattgtgtttcaaaatgaaatatgaggttttgcatctgctgcaggtttggagtagctttattgttttagttcttgaacctgttgatgataggatatgttcagttccttcagattttcttctttctacttactgttgttagagaccgcttagttcatattagtctaaatcttctatcaactgcatgttttttgcttcagaagggttttcgccactctattatgaatgtcacagtatgtgtatgttcttcattagtctgtctgtattttgcaaatctcagtgctgaatacttggtaactaggaaagaacaaaaagaactagcttacgaatttcatggtactttgcgggatggggaaggaggaagggtcaatgttcagcctcagatctgcgtaaattttaatgtttacatctttatttctcttttcttcttcagggaatgctagtagacgtgatattgcagtgtcagagattggttccagtgattgttgcattgattgatcgctttttgagttgtcaaaagcaccagtggttgggagagagactgcttcagacttttgatgagcacttattcttaaaagtcaagatagattacaagttggttacatgcttccctatgtttgatagaattgctgaaaatgatacaatccctcctcgacgactgttggaacttcttactagtttcatggtgttccttgttgataaacatggcccggatacaggattaaaaacctggtcccaggggagcaaagttcttagcatttgtcgaacactgctgttgcaccacaaaagctctagattgttccttgggctatctcgtcttcttgcatttgcttgcctttatttccctgatttggaagttcgtgacaatgcaaggtacaataaaactgattttcttctattcaattagaagtaagaacattttattttgttttttaatggtagtgtttgccatttttttcccctcaccttcaagtattgctctttgcaggatctaccttcggatgcttatctgcgtccctggaaataagcttaggaatatgcttaaccttggggaacagtaccttggaatttctccctctccacctagttcatattttaatgttcaatctcctcggtctagtcataatgtcaagacaccaagaaatatatcatcctttgtccacctagaacgcttgattcccctactagtcaaacaatcatggtccttgtctttgtcatcttttactattggaaacaataagtctggctatatagaggacatcagggacgcagagcccataatagaggaggaggaaattggtggtgatagtactatccagattttacccgaaaaagataggattgatcacccacccgagccattgcgtgtgatggattcaaagatttctgagattttaggaagattaagaaggcatttttcatgcattcccgattttagaaatatggcagggcttaaagttagaatatcctgtagtttgaggtttgaatctgagccttttaaccgcacatgcgaagtaaatttaccagctggtggtttggattcgatagacacccttcctgctatgtatgcaacggtcctcaatttttcatcctctgcagcttatgggtctattccatcatatcatataccttttcttcttggtgaacctccaaaaaatgctaacatctctgatcaaatcgttgcattagacattgttcctttagaaaatggttctggagaagacagaaggtttagagcgtctgtaatgattgaattggaaccgagggagccaacgcctggtctggttgatgtttcaattgaaacaaatgcagaaaatggtcagattgttcgtggtcagcttcagggtatcactgttggaatagaagacatgtttctcaaggctattataccacctgatgtccaggaagatgaaatacctggctattactcagaattgttcaatgctctctgggaagcatgtggtactagcaatactggaagggagacctttccattaaagggcgggaaaggtattgcagccattaatgggactcgatcagtgaagttgctcgaagtccctgctctatctttggttcagtctgtggagaagtacctggcttcatttgttgtgagtgtaagcggagaaccactcatcactcttgtgaaggatgggggaattattagggacatcatttgggaagatatggcttcgcctgatgatagcgactcgagggctgattttgagagaggccctcttcatcttacatatattgaggatgctggtgaaagggaaagcatcatcaatatcagtaaaagaaacttgggtagttttttggttttgatatttcttccaccaaggtttcatctcctcttccaaatggaagtaagcgatttttcaactttggtgcgaattcgaaccgatcattggccttgcttggcttatatagatgattatttagaggccttatttttggcatagaatgatattcttttggcaggggaggtctttcataaatccccatttagggagtactttgttcaatgaggtctaggcattttgtttaatattctttcaaaatatttgtttaacagtgagaagggtaattttttgtacccagaataagcttgtgtacatacctctgcgggtgagagtccttgtatcattatctattgttgtctagaattttgaaataataattttatgccattcttgttaatttgcttcgaaattggaatacaagcttcttgtcttaaataaggtggttttttttttttattatttccaatttgtataaattttactgtgtatgcaaataatcttcaggaacaattaaaattgtaaccattttacatgtgcattttttttggttcaactttagtgtaaatggttcttttttgtttgctttcataacttaaaaactatttttattttataaaaacagaaaataacttttaaaaattaatatgggttgtttagttaaatatttaaaaaactgagttttataaaattaaaaaataaaaaatattacaatgttttctatttttaaaaataattttttattctaacatattattttatattttggctcacatatctagactttagacctaaactaggattcagatccaagaattggaccccgaccctggatcttgatcatcgaccctaacccgaaactcaaccccgaacccgaacccaaacacggatctagaccccggatctcagactcgaactcggacccgaacccaaacctcggacccagactcaaactctgactcggacctcagaccaagaccaaaatcagaacctaaacccgccccggaccaagacccagacccgaacctggatcgagacccagacccaaaccttgaactccggacccaaaactccgggcctgggtcttagtccgggatatgggctcggggtgggatctggggtcggggtgttgggtccaagtctcggtctcggtctgaagtaggattggttcatgtcatggtatggtgtaaaatattgagttttttagtaaaaaaatctaaaaataatttaaaaaacttgagccaaaaccattaaatttttaaaatggcataaaactatttctattcttacttctaaaaacaaaatttcgaaaattgaaaaacacagccaaatagcttgggcttaggtttttttttataatcatgcttagttggttggacttaggcgttgtttagctttataacttaaaattgtttttagtttttaaaaacaaaaaaaaatgaattttaaaaattaataggagtcgtttggccaaattttttaaaaattgaattttaaaaaattaaaaaacagaaacatcgaaacgtttttttattttcaaaaataattttcaaaaataacttttttttttttgttctaacataatatattttacatttttgctcatacccggatcccgaccatactcggacctcggactcgtactcagacccaggacccaggcccggaccccaaactcaagagcccaaatcttggacccgaactccaaacctggacccagaccaagacccgaactcggacccggatcccggacccaacccaggacctcggacctagcctcgagtctagggtctgagttcaaggtccaagtctagggttcgggtcgaagtccaagatctaaggtttggggtccgggtgaccaggtctggcgtccgagttcgggtcaaggtttgggtccgagatcccgattcagggtccaaattcgagtccgggtctagggttcgaattcgggtcgaagaatccaaatccgagtctgggtccagggtgcgaattcgggtccaggttcgggtcaggggtccaagtccatgtttggttacaaggtctggtccggagtagaatcagttcatgtcatggtatggtatagaatattgatttttt

SEQ ID NO: 299255 - DNA, 2729 bp, Cannabis indica
tagatgaaatcctatataaagaataagatgactctcattatcataacctacatcagacttattttataaaaaaaaaagaagaaataaagagcctctctagaattttgaattcttcttctctttcccacttgaaatcgtgacctatagtgaaagagtacatgcccactcatatcaagttaatattcacatagtgtagaagattgtaaaaaattccatcattaaaggagatccaagttcagatcttggcaatactctatgatagaaaggaacaagagttagagatctgaatggaaagagccataatattctgttgccaccaatataaggttttgtagaactttatatgcgtttatttcattattttaagcaattcatgtttaagatgttagattatagaatataatcaaccatacatgttagtaaatctagatcctggtaaaataaattccaacattagcttggtcagattgcgatttaagattaaaatctaattaccgtatacttgggaaaataaaatatgcgtttatttagctatcaggctactattaaatttcttatccagcttttcttgtcacatactaataaatcaaactactaagcatataaggcttactgaactgtgagtcgagcttatctatgataatgattgtatatatcatgataatctttaaaagataacctgacagctctgatactaaattttaatgccctactagatcaggcatcttaccatgttttctaattactgttcactcccttgataatcaaagagtttattgaaaacatgaataattaaaatatttgtaaattaacttacattatactgcaggtgcaaagccatagactgtatacttgcacttatgctgaacatccaaactcaacttcttttcatagttcgccttttgttttaacatatctttttgaagggtggacacaagtttggaaaatgagtacttgccctgaggaatccgaaaaaagaagttgaaatcttcaacatatctaagtatgtcagatgtaatgtaagtgttaccttcacgacatagtaataatacctccacaaacaagtacaagcctaacttttacacgtcttctgaagtatcacaacgtaaaaacataacatgaagtactttcgtcttcacattatcaaattggttgtaaaagcagttgatcaactgctttgaccctaagtaagaacccttcttttcttctgttggccccgatgtgaactttaggcctgtaatcagtgcaaacaaatttggcctcattttagccaatgtaaaactgtatatcttctgtcttctcaacatcaaccttcattttatgcaacatcaattggtgaatgacacagaggaaaatgaaagaggtctgacattccaaaactgaccgaaaaggcttgcctttgcccagtaagtcaagacgtatgtgccaaaccgtgacttgatcttggtaaatacaccactgcctttatgagttacacgacctataaaatggtttgatgaactaaaagctgtggagccatctgaaaaaattataaaaagaccacagtcagcacaccaacgaaaaataattgacaacatatcgtgaaccattgatacgctaaatggacaaaaattaagtaaaaagggaaattatcgataaactattaataacataacaatattctatcgataaataaaaaataaatgcaaaccaaaaagcatgcatgaaccatcaataaagtatagatagggtggtaatattctattgataaatacatactaaagaaaaaatagaacaccaacagagatcattaataaataatagataatatgttaatatcttattgataaattaaaaaaaaaaattataagccacaatcctaaccaaaactatcgataaacaatagataatatgtcaatatcctatcgataaatgcttaagaaaaaaaaaatagaacacaagcaaaatgtcaacgataaaccataaataatatattgacatttattgataaacacaaaattttaaaaaataaattaaaagccacaaccctaaccataactgttatccagttttttgcatattgacgtggcgaaaagactgagcgacacgtgtctcacattttgtggcgagagaattgagtgagacgtgtctcacatttccgatacttgggcggaggtaaatgtccctagaagcttgcacataagtcgtcagtatctatgattgtcgattactcgagcagagttgtaaagaaggcattcgactaggtagaagtctattttgccgagctacttacaagagataattacttcagaatgaaattgttatgtccagacacaaagacaatccctataatagtgggattgagtcaaagaaatatggcaacctgttccagtttcttatttcgtgtattgtaattatgtaatcattgttatttcctattttatgcattgtaagtaaaacgaaaatcatccctcatgcattaaacccctataaatagtgacgtagcctcactatgaaagggatcgaaagaatttcttcagaaagagattttagagagaaaatagtgatataagagagttactcagagattaattgtaagagctttcaaagaggaagaacactttgttccttctcttaagtcaatacaatagaatgggagtaggctattaccacgttcacagggctgaacctctttaaaatctggtgttccttttactttatcatttttgttctcttttaattatattatt

SEQ ID NO: 299256 - DNA, 2548 bp, Cannabis indica
atagaaaagacaccaaagctaaaaataccagtttcaactaaggtaactttgttcatgctggcaatttgagaaatcacattctactcattaagtattgtaagattcattctagttggtttatatttgtcttttgtctaaactgtcaagttagctacggttcaatctaagcacaatgttaattgcacatgtaatcttctaaccagaaagaaataaacagagtttagaactgcataattttctggtttccgttgagattaatgttcacaatgttagcattcttagagtctcttttgtttgtctaataaaaccaggcggacaatttgcggctacagacgttacaacagatgcatcggatattgacaacccgtcagtctgctcgtgcgcttctagcaatacatgactatttctcccgcctacgtgctcttagttccctttggctagcccgcccgagggagtgaaatgggcttgcagttttcttttagctgatctctgaaaattgtggagttctgcaaatatcttaattgtcacattgacattctcacatagggtgctgcatcatcataacaaggtttttttgtttttggaaaattgttgtgtattattagtattagtcttgacaagttcattaatgttgagttattatgtcctctagaaaaatgttattggtgatatatatatctgcatatttttttatttttgtttctaataatagaaagaatcatcattgatgtaataattctacatctctattatgaattttatagtctttttttttttcaagtatacagatatatttatatacaaggcttgtcttcaaggagatcagccatggtccttttaatatgaacctttgtagagaccagaaatacaaaattgttctgcaaaatagcacagagcaaaaacacaagaatcaaacaaagctataactagagttttgaatggttcggctcactggttggcttggcggcctgggctgcctccgctttttgctttgggtttcttttctgctcgagaggtggaatccattgtttcagccatagaccttttgccttgacaggttttgttcttttacaatgaatttttatacaaatacaccattacatctcttagaaatccaatgtacttccaagctagctgaatcatggaacctcccagccaattcttgtgtgtttgtagggattgcaaaacacccaccagaatcactttaaaagaattacaatgggaagttcaattgagcagcagcctaggcaccatagcagagtgtcataagctctccttcccccaatgatttatggttaatgattttcgatgtatgaatactaacgacgcccttcctcgttcttggagacaatagtcactgcagattagtgattcgatatagatacattcgtgttgcacatgagccagttttgaggtgggagttgccatggcatctggtatagcaaaactctgcaacttctctcctgaccattgctccttcaacataaaatttatatgcttagtgagcacctatataggtgttctagtacctccatggtggagtttgagcttggaaattataatgggattttaacttggatagacaaaggcttgaataaggaaatagaggtaaacttatatttaatttctttgttaagtatagaaatctttaaagtatatagttagaatttatgtgggattgatttgggttgtttcagaactacatcaattttcgtgccttaagattttctagtgtatttccactacttacgtttatagatagagatcgattagttttgattttaatacccattagtattttgggtaattacttatcaatttttttaccgattaggtgacttaggacaattagacactaagttgaaacaaattaaagggagagtgactgtgtattgtattcgaatagccagttatcaatttacttttgtaagaatccagtttatcatgaaaagagcaaacatatagatataagattttactgaattagagagaagatagaggaaggggtggttgatttagagaaagtcaatatagaagataatcctgttgacgttgggactaaggtcttgacttgttcaataatttcttgaacttgatcaatctcaaaagttagtatattgagatttttggaacaccaaccaccatgatggctgcattctttcttcatcatcgtcattcttttaatttgaagtaactaggtgaaatttgtggtatagtttctccaaataaaaatgtctccacaagttattttttcattcctgaaaagttgttcattcgcggaagccagtcctaaaatgcttttttgtccttccgggaagagtcttcaggaatagctagcctctctctgggatggagttcgtgttggctagttattcctcttaaaaaggaagtttcagatagttgacttcagcaggttctatcctatctgaaaacttcttcagcaaatgtctttggtccgtaataggggtgttcatcaaaccgttcaaaccgtccgcactgcaagaaaaaatgcagtttgaaattttttgcggttgcggtttgaattttt

SEQ ID NO: 299257 - DNA, 5004 bp, Cannabis indica
ggccgaacttaagtccgtaacatcacccccatcgtcgaaaataaccttgtcctcaaggttagtcagctgataagtctggcagaaagaatgaaaatcctcccacgtcgcatcttcgggcgcactcaaagtccattggactaaaacttgcttgctgcgagagttaggatgctcaactacccgagttgccaatattgctaaaggaagcatgagaggtttattggccacgctaagatcaggcagcgggtaatgcggtggaatagattgacccacaaacggtttcagcaaggacacatgaaaaaccgggtggatgcggctctcttgtggcaactgcagcttgtaagcaacattccccacacgagttacaacaggaaaaggcccgaaatatcgacggcataacttggagctcagtcgcttggccaccgtcgcctgacgataaggctgtagcttgaccagtactaattcaccagctttgaattcaatatccttcctctttttatctgcttgttgccgcatacggtgttgggcccgcgctaagtggtcttttaaatgctgtaatatgtcatctctggtcaataagtcagcttccacagcctgaatggacgttgctcccctcgtataagctaggatagtgggcggtatacgaccataaaccgcttgaaaaggtgtcatcccaatagccgaatgatgactagtattataatgatactctgcccacaatagatacttactccattgtttcgggttgtccgctgtaaaggctctcaagtattgttccaagtgccggttggtgacctccgtttgcccatccgtttgaggatggtaagccgaactcattttgagagtggtgcccatgaactcaaataacttccgccaaaactcacttgtgaagatgggatcgcgatacgaaacaatcgttcttggtagcccatgtaacttaattaccattgtagagaatagttcagccacctttgttgctgaataatgatttggaagtgccccaaaatgtgcatatttagtgaatctgtcaaccaccactaaaatgtttgtgaaccccgctgaattaggcagtcccacaatgaagtccattgataaatcttcccatacacgttccggaattggaagtggctgtaagagaccataaggtgctgtcggcgaatatttaattgtttgacatgtcggacaagcacgaacaaaagacttgacatcttgacgaatgcccggccagaaaaaattcgtcgttaatcttatgtacgttctgtcaacccctgacgtgaccaccaagtctagatgaatggaactcattaagtagctgactctttaagttagagtttctactcagcagcaggcgatgacggtgatacaacaagccctcccgagccgaatatatcgaattgtctagaatcccctgctgaagttggttgtgtaacacccgtaagtctgggcaagttatattctcttgacgaagttcctccaaaaattcaaaagagcccgtgctcattgcaagatgcaaagacgaatgagtttcagctggtaaacgtgacaatgcatcagccgcgttgttttgagtgcctcgcttgtattcaatggagaattggaaccccattaatttgtgtaggaactgttgttgctcgggtgtttggaccacttgtgtgagtaattctcgaaggcttttatggtctgttctaatgatgaaatgtcggccaagcaggtattgtcgccacttgttgacagcttctacaatagcccgtatctccttactgtaagctgacgtgctagcaaatttaggacccattttcttgctgaaataagccaagggatggccttcctgcatgagtacaccaccaatacccacattagaagcatctgtctccacaataaaagttttagagaaatcaggtaagtgcaaaacggaagtggaaatcatagctgttttgagtgtttcaaacgcagctgcggccttcgggttccattgaaagttatccttcttcaataattcggtaagtggggcagccaaactagcatactgtgaaacgaaacgacgatagtatcccgtcaagccaagaaatccacgtagttgtttcagcgatttcggaattggccattccaccattgctgctatctttgcaggatcagcttttactccttctgccgaaacaatatggcccaagtattcaatggtgtcttgaaagaattggcacttacttgctttagcatagaaactgtgggatcgtaacaactgtaatacagtcctcaaatgtcccacgtgctctgccaaactgctgctatacaccagtatatcgtcgaaaaatactgtgacaaaacggcgctaatacggtcggaataggtgattcatggctgcttgaaaggttgacggagcgttggtaagcccaaacggcattacaacgaactcatagtgccatcatgtgtctgaaatgccgttttatgaatatcccgcagatccattctaatttgatgatagccagcccgaatatccaacttagaaaagaccttagcatgacccaactcatccaatagctcatcgattgtaggaatgggaaatcgatccttgattgtgatgccgttgagtgctcggtaatcgacgcaaaagcgccatgtgccatccttttttttactaataaaaccggtgaggaatactgactattgctcggccgaataaagccgtattcgctcatttctttcaccaacttctcaataacgtctttttggaaatatgggtaccggtatggtcgaacattgattggggtcgtgccttgctgtaaaaagatacgatgatcatccttccggtgagacggtaactgcttgggctccgcaaacacatcctgaaattcagacaataacccagatgcttccttcggtaaaatatcagccaaaccttgaagtgagtgattgtcttcttgttgcttcatgactgtcgtatataacttcaaacagtctctaatgtcaccttccctgaacaacgcatgtaactgagagaaagtcaattgatggcagctacctcttttgacccttccagttttacagtactaccattccacccaaactccatggttaatgccttgtgatcgtgaatgcacgggccaagtgtttgaagccactgcatacccaaaaccacatcgagtcctcgaatgggtaacacatagagatccaccgtgaaactatgtccctgtaatatcaattccacatttcggcacaatttagaacaaagcaagaagtggccattacccatatatactttgaagcgtttagtctcctcatatggtagtttcaattgttctgcgagcgtctcttgtataaagttgttgttgctgccggtgtcgactagcacttcgactgtttccgacccgtggtatgccataagacgaaaaatgcgggggttcatcgagttcgatagagagtggagactaacttcttcctctgttgtatcctccatttcgcttactaaatggtccagcccaggttcgttttcttcttcatcttgggcacaaagaatcaacatcctattcttgcacttgtgaccatggctaaacttctcgtcgcatgtgaagcaaaggcccttgtcccgtcgttccttcaactcagctggtgacagttttttaataggcagtagtggtgtggtgggtggtgaaggaattgagtgccctgaattcgatactggagacattggtttgtaaccggaacccgaactgtttggtgtgcccataatggttgttgacgaaggcgcgggtttcccataccagcccgtccgaggtgtgtccaatcggcgtcgactgcccaaatcttcattacgacttcgaatagttgagcctttgccatagcatcactcaagttcaatggcgcagatagaagcaattcccttcggatctctaacttgagaccccaaacaaaaaaattcataaacatcgcctccgacactcctgtaatgcgaggcattaatgcctcaaattcggccctgtattcagctaccttccccgactgagtaagcttggatatgcgaccaaggggatcgtcataaatcgaagcgccgaaacgttgttgcaacgctttgaggaacgaggtccagttcgtgattgcccctcccttttccatccattgaaaccaagtggatggagctccatccaagtgaaatgccaccatcgccaaccgcatcggttcatcgattttatgcaagtcaaagaacttgttaatcttataaatccagtcatccacctccgatccgtcaaaccttggcaccttaacccgaagagttttgagtaaggtgttcagctcacgatcatcactcgtcatgtctgaacgtcttaccccagcctgagcagattcccgatcaagacttctcccttccgactcccccaacccagtattgggaagctgattcaatcgttcctctgtcttggaaacatgctgatccaaaagagccgagaacttttgaaattgggcatcagaatgttgcttgaaattgagttccatagcttgaagcaatccagcgatttcttcgttcttcatgatgaagaagctcaatgagagcaccagtaatagcaaatgcactcttcaagtcagtgccaaactccaaaagccaaacagccagataattctttgcataaaattccatagtttttacagcctctatttatatgaaataacaaactcttcaataacgaaattgcaaagtaacagaataacaacttctagaaattagcataggctattcttcaactcctctccagcctaacgaaatccttcagccagttgggtctcatctgcaccctcttctctttcggctccaattcctcttctgcgtgagaaaggcttgttgtttcccttgagctgatgccagccgaagtctcctttttctcagccatcacacttgggtcttcttcttggatccaatcgtggatctgctcttttatgcttccttggtccagctggattgggcctagctcttgggccgaacttaagtccgtaacatttacccaacataaattacat

SEQ ID NO: 299258 - DNA, 1120 bp, Cannabis indica
taatattttagtataaattaaagtttaacatagcattatataaaaatatgatatataatccaattcaatataatacaatacaatacaatacgacctaatacgacgttccaaacgagccctaaatgaataaaaattaaaatataaagaaattttgccgccaattactctactaattatgataacaaaataaagagattaaatgtataaaaattaaaatataagatattagtagttgggtaaatgcggtctttggtctaatttatcagaaaaaatgtcttacttgtagagtttatattacacttatacttaataagattttagcaattggacaaatattgtgtttgggcattattggacctcttagctaggcagagtgatctacttttccttgtgtacgtacaattgcaaatagtaagctaagttgtattcactaatttttccaattaaatttaacatatattatacactaaatttagtactgtatggttttatggcaaatttagcttattaaaagatgaatctgattaaaatttgactcaaattttgcaaccacaaagtacaaattaacttccaaagtcagcatgattgataaattttgattgatttttttattttttttaaaaaaattaaacagatatatcaaatattaaaaaactttaattaataaaaataattaattagcggcaaataagtaaatgagtaaaaataatgtataacaccactataaaatgatgacactttgagaggtttttgtacctgtaagtctaataaaaagttgcaagactgaagatttgagttggttttatagtctttttgagcatataaataagcaattttgaagcttgagatacatcttagctttgtattctttttattgagcaatatacttgtcttattcgcaaaagaaaaaatgactagtgatattctatataaaatataaattattggaaccgataatttcacccataattatacgaagactcaagtggtgtacttagtatttttcaaatttaagagtgtaaatgggtcggattagatctcatccggttatgatccgacctgatccagatcatgtaagatctgcctcgttctgccccgtcccgctagatcagatactcgg

SEQ ID NO: 299259 - DNA, 7709 bp, Cannabis indica
caaccagcacatcttggagaagagaagccttaggaatctaacatcttggattgaaggcatcacaataggagttccaattcaaccaaggaatccacggcgaagaccataagtcaatagatcagccattaccaactaaccagcatcgtttcatttcggataaagtcatggctattcataatacctttagccaccaaagtggcattctgatggatcgaaaggttccaaaatgtctcaccttgtttaccatagttacgcaaaaacatcttagaccaaggtctaataagatttgaggccaagctccaacccagcttagagactaaggctaagttgaaatccccaaattttttaaagcctaacccgccacagcttttgggtttcataatgaacctcagttcgtaagagttaagaaatgagttttttttttttttttttttgatttcccaatccaccagaaatttctaaccattttatccatagccttacaagtcatcttaggcagatgaaaaatggaaatggttttaatagggatagtagaaatgactgacttgattaaggtggtacgactagcttatgatagcagtttgcgttgccaaccagataagtgagatttgatattctccaggacgtagttaaagtctcagcgtctactatttgagaaaagcatagggaaacccaaaactttatcctctttagtaagcacccaaaaccccaataagttagtgatatcatctctaaaaacctcatcagtgttattagagaacaccaaggtcgatttggctgaattgattttctgcccaaaccacgaccaatagaaatccaaacattcgtttaccctcaagacttcgtcagtctctgccttacaaaaaaggaaaatatcattcgcatacatgaggtgggtaataggagggtagcaagcattacaccagaactcgtggatgctaccagtagattcctggtggggaataagtctagagagaatttcactgcagatgatgaaaaggtaaagagatagcagatccccttgtcagatccctcgggtaggccaaaactttttgagaggaccctcgttcaagagaatagagagactgactgaactgatacatttagagattaaggcacaaaacttaatcccatagccaaaagcctcaaggactttatccacgaaattccattcaaggtgatcatacgcctttgacatatcaagtttgagaccaacaaacccattaccacctcttatcttcttgaacaaatcaattaattcatgggacataataccattctccgtgatccagcgattcgggacaaaggcagattgaaagggagaaataaacccaaagagcgacgggtgaagtctattagcaaggatctttgcaataatcttatacgcaaagttgcatagagagatgggacggaaatcgtcacatttagaggccttcacgttcttcgggatgagcactataaaagttatgttgaggtctctatgaaactccccaaacttgaaaaattctttgacaattgccacagcatctgcaccaacaaggttttaataagcccgatagaattttcgtggcaggccatccgggcttggcgatttcaacagacccaaagaccacacaagttttctgatctcttcataatctgggatcctcacaagttccttattgcaagcctcaaaaatagttgggtttactaaatcaaaaatagcatttccaatcgggcattggaatgcatgaaaaatctccttaaattcatccataaaataattatcgatattgttccggccagagatctaatgaatttcgtcctgagaatcgaataaatgaaatttctctttttgcgaataactatggagggttggaataatttaatgtttcgatctccctcgctgagctaagtctcgcgcaatttctgcctccaaatagttttctgacgagccaaaatctcgtccatttccaggagaatatccaccttaagttgggcattctcaggggaaggaggcctgagctggatattaagaaggaatttatccaatagcctcagcttctcattgcacaacccaaactattgtttattccaaatagctagctgctttctgatatttgagagcctcaaaatcagttggaagctcttggcgccattcaccacaagttgccacgcacttctgaccacctccatacaatttggatcacgagtccaagcatccaggaacctaaatggtttgagacaacgatcctgctccaagagaagatcaagaatcaggggagcaagttcagaatccttaatagtgagagctttcactcccgctttagggtacatcaaaatccaattaggatcagtaataactctatcgaggcattctttaatcaaatccaaattacttctctttttagaccaagtaaagaagttacccacactacccaagtccacccccagtggcatcgatgaaatcggtgaacaccaaagtctcttgagagtaagctttacggcccccaagtttttcggtctgacttgatatacagtttaaatcacccaagagcacccatggatgttggaaagcactaacctccaaagccattttctcccagaactccttacaatcaccacgagaaggagtagcatacacaaagacaccaaaccaaaccttctcgtgaagaacattcgtgaatttgaccacgatcataaaaaaatctaaactaatgatttccacctcaagcccagccttccaacacaagcatagccccctgcacacccaatagcctcaactatttcagcataaaaaacccaatctctgccaagtgctcctcatacgattataattcaatttaatttccataagaaaaagcatgtcaagatcaaccgaatgaaccaaaccccgaagggccttaacatcacgtgattgacccaaaccccaacagttccaggatagagccttcatgaggtattggggagcatgatacggcttgcctccttggccatcaaaaaaatcctcagttataaggatttcattttgcacaattttcccattcctcattttgccatcagataacagagacatggaagcattatgatccaaaataaaccctctagaagggcgagaatctttggattgtggatcatgatcatcagcatttgtttccacttcctccatgagaccatcgtcttgttctagagcaagaaggctctctggcttatccaatttacgtttcttgttataatttcttgccaattcctggaattcacattcatccaccattggggtcccctcgttagggccagtctcccctctctccacggtagggaagtgttgagggcaaaccacttcctccacggtattgagcctttcaagaaatggagctttttctttagggatctgagaatcatgcttgagctctatcatggagttggtactcatttttgcaaagacttcttcgacatgaacgacatcaaaaaatgcacattaaggagcaaggctttaaccctagaacacaaagctctaaacattacgatttagttttttcctcttaaatccagaagtcgtaaattcaagatccgttaagcttccgaaaatgggtcttataggaattcctcttggcttagtcatcttgcaggctccataaaaaattttcttgttggccttgaacttagatccaccaagggtaaatgaacccctgccaccactattatcaacctctaattgggccttagtcgaatggggcttctcaacagacgaaatggagatttgcctaaatggatgagggcattggtcctcctgatccaaagatggaataactttggagggatgagcccgtctctcgtcaacgatagagaaggaataatctcctccttggaaaatgcaaccaactaacttcaccgtcgccattggagcttgtgtacccgaaactgagttttcgtagggaatagcatcagagactgactcattttccatgtggattctatccttgtagtcttcggccgcaagcaccgcaaacccattttcaagtcttgacacatgcttaagccacagaccgtaaagagggatgctgcgtccatcatcaagtatcataatttactttttggctaaataagcttcttccagatgcctgatcataccacatttgtagtagaataaaggaagtcattcatacttgaaataactacacactttccattctcatcgtccaagcccgcacccactagcagtatgttcgagaaattcaaattgacttgaaatctaaggaagttattcctgatgactccattaatacgaatcttgttggcagtaatgaaggtgccaaccctgttggccaacttcttgatgttctcattagagtaaaatctatagggcacccctaggacctttacccatattctcacatggttcagatcagcagatgcccatttaccatgaaatggcatcatggtcaggaggagaaaaccaccacaaggggaccacggtcccatctcgaagatcttcaaagcattattttctttagtgaaatggaagatttaggttttagggtgaacctcctatcaacgccatcctcggttgacgttccatatccctacaagaatgaatatcagacgaccattactaactttccttttcacgaagaacttacccaccaccgatctacgaataagagccttagccgcgtcatcatcaagggtgaggtcaagagagaagtcattgacatccacattcttcaccaagttaactacctcatccaaggcagcatccggagtagcattcacaagattaggctccatgtaagaaaactccacaccccgcaactcttggatttgatagacaatgaatagcaccaaaagcttatcataagacaacacagagcacactttattgcaaaatggagagaaaatagcgttaataacacgagaaaaggccttatagaaataccaagagagtataggggcagctaaaacccaactattggggtcgaaaacccctaattatggacaactaacgcagtgtcgaggccgtactgcagaataattttgttaatccattctcttaatcctagggtattacataaggtttcttgaactttatatgtgtttaaattctattgttttagaaattcatatttaagatgttaaataacatacatggtagtaaatctagatcttaataaaataatcctcaataacatacatgttagtaaatctagatcctaataaaataacttccaaaaatgaggtggtatcatattattgttttacctctcgtagtattttatccttaaatatactttttttaataaatccttaaatacacgtagttccttgtaaatgaaacttctgtaagcttaattactaaaatgatgtctctttcatttaactccttgaaccaagctaaaaggaaactaatatttcatttcttgaatagaagctacagttgtccatatttataattaatactctcatttaattatgctaccaagttcttcatatgtatgtatgagctagaccatatgtaagcttgtaatgaacaagaactctaataacataaccagctagaacattaattactcaagattaagattaatttgacctatcatcaacttttgcgatttgactataatagatatatagatgtttattttgaatcaagattctctattaaaaagtagtgttccatattgtattaaatcaatctaagtttgaaacgttgattaattttttatttattaaaaaattaaacctttaattgagtcaacaaaggtagttaacatatttaatataaattaagttaattgttgtgtcaaatttaaattagtttaatacaatatggaacattatttttttaacagaggatcttgattcgtttattcttatatctatattaagtcaatctcgatccagcgtcatgaatataaatacatttgcatgtgtaataagaacttatcgtagatttgttaatcagtataaatgtaatgcattaattaatcttaggactttaataaaattgaacatataattataattattttcccgtgatttacaccacaataattatatttatttttatgttcaagatttaataaaatttaatattaaacatataatcatgaaactaaatatgtaagcaatttgattaattaagtcataatataatttttattttctttattaataataaattaattacataaaattgaggttttatttacgatataaaacctaacataatttaggtacttttcctgtaaatatctcttttcaaatttatgaatgaaaatttcttttattttttggcaactagttacccatatcaaataatttgtcaccctaataataatcaagtttcaaatcataatagtaactagctacttaaccacgattacgatgaagaactccaacaatcttttttcttggtgatcatcttgtttattgttttgtttgaaggatgtgagatagagaaataaataattaagaaatgaaaaacattaggtaagtttgtttgtgtttgtgttttgtgttgtgtttttttttttaatgatttatggatattccatatttttttttctaagaggggatatttcatattttaaactttttttttcattctcagtgaggaatggtcattaggaccctacaagcgagagtgtatggttcttgagccttgatccctttgtgttcgactctttagctggtgccaagggcaaattcaataaatctaaatgtggttgaagaactgataactaagacaaactcaaggaaagtagtttcaataaaagaaagtgaggaggatggagaggagatggaaggaagagaagtggaagagtcaagtgatgaatgtaaccaagagaggaagggagattcggatgaagaagaagaagatgaaaactgggtgattgatgataatatggttaccagctttgggaacctgtcattaattggaagaattttctcaaagaagaggtgtaatgcgaacttcatcaaaacggtgttcagcaggatgtggaaaacagaagaaagatgggaagttaaagtttataaacatgacaattacatcatgtatacggggttctccttcaactgtgagaatgattttgggaaagcaaagaccattcttccatggcgattcatacgtggattaatgatagtagaagagtggccaaagagcggacaatgggaggatgcttcgctaaattcggttcctatgtggataagagttgctagttttcctatgaaggcgttcaatgaaagtaatgtttgcagaataggaggaatggcaggggaggttttgaaggctaattggaaaaatagcagtcgactattgcttagctgcactgctaggatgttggttgcgtcccatggtaatcggagtataatggtagggaagcacattaagtttgatggaaggaagcagtgaatataatttaaattcaaaaaaaaaaatgccattgctttgtgacagatgtgggaaatgggggcatgaccagaaagaatgtagagaagaatttgtaatggaaaatagaagtaattgtgagagatagttaagctataaagtgattggctacatgctgaaaataacttagccaaacactgttttgatactagcaggaaggaagagatcattaaggtagatcagagaccgaagaggtgttgggttttatgccctaaataaaactcatttcaatataatcagattcacttattaacaaagatcagaaataacattttatgtt

SEQ ID NO: 299260 - DNA, 1061 bp, Cannabis indica
aaaaatatgatgatgaaattaattattagccatatatggaatatgtatatttatagaaaatggttaataattagctagggcaaaaaagtggggtggtgtttttgatataggtcctcttagttagctagcttactatttttttgcaccaatatatccatataagcttctagaagtggtttattattatttttgggactgaaaagaatggtgagaggacgttgatgcaatattagagattttagaagattttagaaaaattcaatattagggcaccacttttcttcatatccctaaacacattgtctagttttaatactttacataaattataattcaaaatttttattatatgaatgtttatatatatattgtagttatatttaatatagtattcatttctacttatttttaattaaaaaattaaaataatttactatgtaacttatttttcttatacatgtgtgctcatgcaatcaactatgccaaaacatatagttcaaacatgattacttacacgagtgcttgtttttctctattcttcgattttgttgagtttgttactttattttaactcctacattaatatgatattattcgttttaaatttaaaccctaataattttattatttttggacactttcttaaaatatcttataattttagacaactttgtttattctatcataagttcatacaaatttaattataattattctaatatgtgagacttgagttgataccccaacatagtaggtagtacaatcatagtaagttcaaacaaatttgattataacttttccaaatctctaaaccccaaaataaaattgtctctaatctctatatcatttaatttagattaaaattatataagaaatgtcactcttaccattatatttttgtactcacaaaagttggtattgcgctggtaaaataaaatttacttgtggtgtattggcaaaaaggggttagcaaatcaatgttggtattagaacttttgccagcataaaatgaaaagcgctgacaaaaatgacttttttcagcgcgtaaatgtgctggtaaa

SEQ ID NO: 299261 - DNA, 2385 bp, Cannabis indica
aaatgtagattcctattcctatgttttaagaccctagtttttttttaataaaactttttttaagcgtttttcttaaaaattgtaacatacaaattaataataacgtgtgcattcttactaaaagttaataaagaaaaattagttttattttctcaaacaacctactcaataatttttttattcaagtaaaaaaatagctagggacaatcctgtctcaaatcccgtgctagtattcaatctccatttttttttttttgaataaaagacaaatctcacacatttttttgagattaaagcctgttataaccttaaatcctgtgggaaaaatctcaatagcaatgcacaaattgcattattactgattatataatatccaaaaaaaagagaaaaaacagtttccttagtactcttctttaaattagtagaaattgtaataaccattttcatgaaaatgtcttgcacaaagtggcagttgaattcattataattgtcatgttaataaatgtattccctaaaatacatagcaggatgcatgaatttgcctttccagtgtttttgatgatgatactaatctcttacctatcaatttggtatcatcatatctaggatgggaaagaagtcgaaatcaatgaaagatttgttggcttcatcaggaggttcttcacctgtcaaagagagatcaggactgagtctctcagcagtaaagtctctagtactacgtgaaaaagaggataagcttacatctgagtttggtaacaatgccaaggttttgtctttaattaggtcgctctttggtggaggtaggcataattttagtaacatgatcattgaatataattacactgttggattatatggatataactttgtgtctaatttatgacttatataatgtgatgttccatttatattttcatatatgcaaaatgtttacagatgaagtgtttctcaaacggaatattaaatcttgcacggatggaattactattacatctttttctagagaaattcatggtgcaccacctgaaagcctcgttgtaaaactagctgaagttattgggaacttcagaactctgcgaaacatggcattattttggtgcagagttgttgccgaagtaagtcaattgttactaatttgagtttcgtaaactctttgttgttgttatattagaactcttggtgtgtgtttggaagttagtatctaattagtaagagcaataagttatgtaactactagaaacaatctagtaatctagtaatgagtataatcacattattttaaaatagtgttatttaattaatataaattcctaatgttgtttggcaaaatagtaattaattataaataaaataatatgtttttagtaaatatttaatatagaaagcttttagtaattataatgtaattaattctttctcaggattacaaagttaattgtaattgcacggtgagataaatgtactaaattgtgtaattaattccaattacactcaaatccaattctatctttaagtttttttttttaatctcaaactatagctctttatactggttattcatccttcgttgggcactatataattctctatattggtgaatcttttaactggaaatttatgtatcaacaattttattaaaattatcatggaaaactttgacaatcaattccttaattttatggtttaacgatagatccttactctattttgtggttgcagctgagaaaactatggtctgaggaacaatatatacctggcatacctctagatgataatccagatctgaattcatgtcttctatttcagcaacttcaagtgataaattgctgtgtatcacgaaaaagacgtcgagaaattgcctctcaatcattagactttgtccttaaagaaggcaatataaatgaagaagagttggctacgttcaaagatgttcatgcaagttctatattatatgctagattaaatactggtgaacttgttctccgacttggcgctgatcgcccaatgggagatctaacaatgttggaaactggagaaccaatgtactatcctataacccaggtttgactaatgaccttaccacaatgaaactatttgtaacaaattttccaacaaaaattgggttaacacaggaagttttgacacaattcaattattccataaaagaaatatgtatttatactgtttgtgcttacttcttttattgagattttcttcacccttaactgcaggaaggacccttgctgactgaggatcttattaaagaaacagaggaattcgtgcttagaactggaaggtttgtattttagacacactttaagataatttgtttttacttaatatatcatattgctattagatattgtaagcttacactagttttaa

SEQ ID NO: 299262 - DNA, 3504 bp, Cannabis indica
tcgtgtgaattgatattaattgatttgaaaggacaattttgtccttgtcgtttttaaccgtgaacattgagttggtgtaggttaaacttggaatttcaccaagcaaaattcctacatagccaatgaaaaccaaggatttcgatgaattcccttcaacacgtttattctctctagctctcttgaattcacttgattgaaaatttggcagagaacgaaactgttgaaaatcatggacttacttacatgctgctgatgccgcttacgaatcctcaaaaaatacagtatataatgccctttgaattgaaatgtgaccaaaatggtagtctgatataatgcctggatgattatatttctacacatggcttttgaaatgagaggctcatttggtctgattggaggcttctgcatcagctcattattgggaagttccatcagtagagctggcccaattactagagttgtgaccaaattagtccagatcagttgaaagccggtaatagagtttgatcccaaccacatcgtggtgatggatgctatcaatgttcctgcaatgttggttacaagatctagttgaatgtacttttgaatgttgtgataagtacatcttccgcactttgtaacagtcagcaaggaacttaaactcccatcgaaaacttctatgttagaacactctctaaccatttggctgctccttctccccattgcaacaccaagattagcttgtctttgcatgggaatgtcttctattctacttccaagactgataacaacatctccattactcttcaagatttccattagaagtattatgtcagatggaagagaattgcccattacatagattttatccgctttctccttcttctcttgctcgttgtagcctcgaaaatcttcaccactaatcaccagcccatccggaggaagaatttcgcaagcagtagccatcctttcaagctctaacttgtcatcttttgaggccaatatgaacttcacttttgcatcattaaaatctttcagtgtcttttttgttttggcgcaacaagtgtactccttgacaccaaccattgctattaacactaaaccattttcgcccatcaacgcattttcatcctcaactgatgcatcaatctgcttgcaagcaaaagcaaccgtttttagatcttgggacttcatctcctcaatattcctctcaaaaaattctctttccctaccattcaatcttttttcatttccattcttgtcatagtaactcgagcacattcctagtattgttgatgcagggcctttaaagtgcaaagacatattctctatcctagtgttcttattcttcttcatcaaaactccacttccttcctcatttgagcttaaccccttgatctttactactgtaaatctttgccacaaagtatcaagcttcacccccaaatttgacttagcccaacttagaagggggtcctcattttccttactatcactccagtgcttcacaagtggtgcgctgataccattaccaagagcttcacgaacgagtgttggcaattcagcaagattaacgactttatcagtaccaacaaagcacacagaaacatcagctgggttgagcggatcacaaataactactgtagctgatcccattatcacagaacccaacagtcctggatctgaagctattttagacagcaacttctttctccataaaatggaagtcaacgttatgactaacgacattccttccataagtcccaccattactatagtcagcaatgttactaaatttgtacccatatttcctcttggcttcatgacaagtctctctattaaatctatgatttccttggtcttggtcgtgtctgtattcccagccttgagctttggataatcagagtcaggatcaaaattttgatcaatcataaaacgcacaaaagggactaccaaaatcacgatagagattactaggccagccatgtgcgtcaccttactcaacctctcaagttgagcaggaaaccgcgtgatcctgtccggggtttgagaggttgcagcacctgaactcacgagcttgctaaatttggtttctcctcccacagtcgtcactagcatacgtccacttccatgagtcacggtagaaccatgaaatagaaacggacattgttcattaatggtcgaatttaaaccgtcatgcaccactagagactcacccccaatgaataagccatcagcagggactagattctcggtttccaaccaaaggacatcaccttggactagctgggaaatgggaattttctgcttggtgttccctcttgaaacaaagaccaaattctgctccaaatgcaataatggctccctccgagaacgtgcaagtagccaaagctcatgcaatgtaggcccaactacgagtatgactacaccaaccagtatgaaaaagccctcgtaccaaccagtctcggtgccatctttcttaattccaaatccaatagacaacaatgcggctatgataagaaacccaattgcagcatcattgcagtattttaggagtattcttaagaagtcaaaagaaggctgagcttcaattacgtgctctgtactctggcttgtgctagcatgatctgaattactctgcccctttcgccaacttagatcattttcatcgccagagattccagcttctaaattagtattgagagcaacagcgattcctttgacacctccgaatcggttcaaggaatccaagtccttggtattcactatctcaacgatgttggcaaattgttggctttttgcatcatcatcagtagtggcagccgtggtagtactagtagtaccaatacttgtctccgcctcctcatgaatatccacatggatttgatgatagtgatcattaggtaatgcagttgcaacttctaacacttctatgccgtttgatcccttccaaaattaattaaataaaggtcaaaacgttgattgatttatgtatacatatgaacaaatgtagtactatccaaaatagttagttgcatatgtatctatattctaaaggttaattggtgaccaaacttaattatattctaatttttatatacttaattctttctcttatataataggttggaagttttaatggttacatcgtaactattatgattacatatatttttaactattaaattattgttgtgtttgtgattaatttaaaaattaaaaaaaaataataaataacttataacttcgtactttattttcttttaaaaacttaattaaaattaattatatttaaaattaaattactaataattattaattaattttatgcaatttgttaataattaaagatatttagcaattatttttttaacttaaataattgaaataattgcaacaaaacttcttataatttatagttattatacacacaatctcaattaataaaaaatagtatgaatgacctctaattagaggtaattttaggctcaatcttattttttaacacttttaagtgtcaaatta

SEQ ID NO: 299263 - DNA, 3626 bp, Cannabis indica
ttggtttttggttttggtttttgcatttttacagagaaaggctcaggatttggaatttgtaatgtaaagtagccgataaatgccctttcgattaaaataataaaataaataatgtattgaccattgagaattgactgagttttatctttttattttttttttttagtctgtaattctacgttactatttagtatttacacgcacgttgggggaagttgtctgtctggtcgctaagagcacaactccattaaaatacctttatatgtaaaaatttagctaaaaatggtcaaatggatcatatgagttactgtaaatttatttattttttgttttgagaaaatactgtaaatttattttaaagaatggtattaaagttattttaaaaaattgtactatagcttctctaaatgtagctacaattattcattaagctatatttattttattattattttactttattatttctctctcataccatctctttctttattttattgattttttttcattatttttatataaatgaatattgaacataataatatttaaataatatggagataaaaataaaaaaattaatgtatgatgtaatgtaaaaatttgaagtaaaataagaaaaaaatagaattttggtaaggtattataaaggatagtttagagaaactattaggagtgctctaagattataatttaccatcaaacttttttctcgaacttctgaaattaaatatcaaaatattattttttaaaaaaaatttacaacaaaaacttttaaattttatatacttaaatattatattttttttttacaaattaaattattttacttcattctgttactactattctgttagctatgaaaaataaatgtgtgtaaagctcagactaaattccatttatttcttaaaaaaaaagtaaatcaaatatttatttatattttttttaacaataaactaaacttttattgaaattaattaaaatagtgtacaacgaaaagcaaagatgaaaaactatacatctaaactagttaattatccaccctaagtacgtgattaactaatttattgtaagataaatatgaataagggatacattaagaaaattagaaagcaaactagtaataacttctaatagagtccaaatcattagagaaagactatctcatagataaaacaaaaattcaaagttgcatagccaaatttaaaagaattaagtggaagtcccaggcccaaacgaccaatccaacgccaccatagagttaccgtttcggcgtagatagttgtggaatttctacaaaaccaacataatacataataaggtcgaaatttcataaagaaaaaaaaataaaaatgaagcataatataataaaataacaataagatcaccagaataaaatgaagatgaaaaaaatgaacataagaatctgagaccgaaggaatagcctcccatcgtccactactataagtaaaaaattattgttgtaggtgactaaaaatatagtgtaacaatcaatcttccatatatatcactaaccaaaacataacataccagtcttgccttttggcatgtgtttgtaagtttctctcaaaagttttagtttgtcctttctagtttggctttttatggtccaatatctcaactcttttgtccaatggcttccagtagtcgtgtcgtgcatgatttggaggatcaatattcgaatatcgaacttggagatgaagggggaatggtagagtttgatagcgtggatgaggaagatttactggtggatgatcaatggtgcttggtgggtcattttttgaacgtgagagcgctggattttgaggcaatgaaacacactatggcagggccttggaagccaggaaaaaggttatttgttaaagagttggcttcgaatctcttcttatttcagttatactatgagactatgagattgatattaaaagtgttattaatggcagtccttggacgttcaatgagttgccattcttgtttggaagggtgccaaaaggtggtgatccaaaagcgatgagtttgaataagcttgatatgtgggtccaaattcacaatctttcgtctgggtttatgactgaacaagtggctaaggaggcggctaggaccatcgacgattttgtcgaaatagacccgaagaattataatgggttattgcgtgattatttgcgtgttcgtgtcaccatcaatattgatctcccgctaaaatagaggatgaggatgaagaagacgggtggtgaatggttttatgctaactttaaatatgagcatgttccgactttttatttcatatgtagtatcattggacattctgagaatttttgccacaaactttttgatacgctggctgaagagattgtaaaattgtatgggaattggatgcatggttagcctcggaagtagaattttttgatgctttctcagtacttgcatatgggtactgaagcaaatgagcattttttagcgagacaagacggtggtaaggaggacatcatggtggtcaacagttaccatttacagttagggaaagaattaatgtgctgagtgggagtatcaatcaatctcttaaaacgggtttcgtgagacccgattcagacctaattgggtcgggatgaaattttgagcaaaaatttgatgaaaattgtggaaaattaaagggttttattcaggtttcaatttctaagagatctagaatttaattttgagtatacatacataacttaggtagatctaatgaaatacatccaaaaactatgagctaaaataaatcggactatagtggtaattttgatctagtccaattcaaaaaataagttgtgtagaaatattgtggattacttagtaatgaggtttgcccaatcaattttgatcaataaacaatttaatgaaaaaccaaaatttgatttcataatgaaaatttaaccctaaagtttaattttaaattttttttccattcattcaataatttcatgtatataatatattaagataaagagaatttaatgaggaataaaactcctaaaattttgatattaaacaacaaaaaaatctaacatataattgcgaaatcaatatgtaattagaagttaatatataattagagataattaacctatatcaatcaattattacacaaattattgatcctaaattatatacaattggcgatttgatatcataaacttaagatcaatttttatataatatagaacacaatgattatatataataattaggtatgtgtacctaattaatccatagcaattaccataatttgataagggaattttgattttatatacttaaaaattaaaaaaatatattattaaaccaaaactctaaaccctaaaaaaactatgacatttttttcaaaaccccaaaaatacccccctcacaattcacccattatctctctgcatcatctctctctctctatctcacatcccaaccgcccaccctcaccaccacctccgacctccatcctccgacctccgaccctcaccaccacctccgaccacccgcaccaacaccccgacccagccccactctctcggaccacccaaaagtcgcaccccctcagcccactctctcttcctctctctgaaatcgca

SEQ ID NO: 299264 - DNA, 1926 bp, Cannabis indica
tcactctcaatctccataccgattccccattcttcacagctgtacctgcaattagtctgttgctcagcgaagaatggccagcacagcatcggaatgccgccgcagatactctccagcgtcgagttccacccactatgagtcaagaaacctccgaccgacttgtggttaagaacatcttcttgagggcaccaactcgttaacaaactccggttctccgtcgccgccacaaattccggcgaaagaacagccgtttcgccggctacaaggtcgggacgtatgacccaaagaaacgttttttcgctgttggctagtccccatgcgaactcggtaagttgagccggtgtcataacggtgatgctcccaaagttaacgtaaacgactgagctgggttgtttagaatcaagccaatcgaggcaagtgggatcttctttccagaggtttgacccaacgtcggagttgggaatggtggaaggtatttgattggctaagaggcttaaggagccaatggagtaaacgggtggtgtcagaatggtgttgagtgagtccaatacatcgcgttctagatcgtaaaatgtgtttaggattattgctgaagctttatgtgctctttcggtttcagttaacacaaattgtagcatgttatcgtttggatcagttgttctcatgaaggtgggtatatcccttaatcggatatttttcatacctggtatccaatctattggagtattcagataaccatttgtaagataactctcatctgcaaattcacaaaattatttaaagttatttatttactacttatttatgctatgacaatatttaatcatgaccaatctcttattataatttttcggtcaaaaacaaatgtcaaaattaaatatttcttttcaaaatttatttcattataaattattgagaatttttaaaaaaattataatgattaaaataattaaataacaattgagttatatttccagcggttgttatatgaaataaaccattccatcagtgctatcatttgtataggaccactaacaataaatgaatgaagatgtagccttttttgagaagaaaaaaaatgaaaaaacagagttgatcatcaacggaacagagccaaccctggtttactctattgatttatcattagttttcaacaacaatatatataaatataaattaaagtaccttttaatggagtaagacccttctggacgagttccttgtaatgaacgtaacccagaaaaccacaagcactagtggtccagaagagaacttctgggataccaagctcttgagctgcgtcaagagtaaagctcattaccccatcggaaacgacacaggtgaccggaggaactccggatgaagaagagttcaagttggcaagaaggtttttaaaaggtactaagctattcctaggagttgagtaacaaagagagggtatgtcttgggtggcatctacgtcggtcggagggagaccgtcggggatggtttggaacgtaaacgaagggagaccgtcaagagaattgggaccacgagacttgaggaggcgtttgtggttgaactctgtgttgacgaaggttatatgaaaccctctggagtggaggagtttggctagtttaagcataggatttatgtgtccctgagctgggaagggtatgcaaacggcgtgaggttttgctagtaatgagatggaacccattgtaattgaggagaaagcaacagaaatggagttttgatttgtaaaagatacatatgaaattattgttctgttctaaagataaggattgtgtattttggagagacccataagtgtttatttatagagttattgagaggaagatacttgaaagattacattcaacactactaacaaaaaataataatagtaacaatttttttatgaaaaataatagggcaatttttatt

SEQ ID NO: 299265 - DNA, 7059 bp, Cannabis indica
gaatgggctgcctgaagggagatgattgatatcgatggccgaagagatagagatgtacatatcaaaggtgaaaatgaaatgatcttaattagatataaacaccacaaatgatacaacagtttccccaacattctaattttcttaattagcttcaaaagtatcaagtctgccattatgatagccatactatatttttttaatcgttattatctgtattattattgttattgttcttgaatgagatccatgatcatctactttggtcattagttgtttaataaagaaaatttacaactattacgtattttaatatatgaaatcatggtttttagaatttttatttttagggattatatgtttggcgtgatcagtactaaatattttctgattttttttccctttttgttttgacttttactatttttactttgggaagattggattttgctttttctatattgtattactttgaattgtagttgtcgattgtccagaatccagagcaaggatctggtttgttataaagttatttcatttcccaactaatcttataagcccattttttagggtggttcgacaattcttacatgtaaattaaaattaataagaggttgaaaataatagaacaatgaatttgaggatataataaatgataaatagaagaaacaaaaagaaccctttacttttgtgatttccgattactagatataatataaacaaatactaaaaacagccttcttaaccacattgtttaggatgtgattattcacaataacttaataataccttggccacacaagtgaaaggagtatagaacaataatatgattatttgacagagacttagctgctagaagataagaaaccatcgactttggcattatctttaccagatagaaacttcatgcaaattggtggtttaatcccagcaagagcaagaattgaagcaggtaaagtccatatgccatcaccacagattaaacccgaagcaactgccggtgcaaaagcctctgccttggccttgtttatcttagtccatatgaacaagatcaagcttccaatacacatgtcaatggcaaagtatgatcctatgtagaatggtattgccattgccattgggattggaatgtattttcctttatcctttcctatgaaatccttgatgaggttaaccgcaatggctataccgaagaaaatgtaacaaagcaggaggcaatagcgtggcagagagccaaacccttctactccaagtatggccatgtttcgatacacaacagcaaatggagcaggatatggagaactggggcttccgaggttatcatatgcattgtaaaagagccagaagacacagggagaaatgatacaacccattgctgttccaataacttggctgaaaaacatggagcgtggcgaagctagagttaggtaaccagtcttgaaatcttgagtcaggtcagaggctgttgagactatgttcatcatgactccacaggctgctagaccagcaagaacaccaccatttgacgcacctgcccatgctccaattgtgaagatggcaagttttccgtaggtagaagcaagggaccaatccgtgaggccacacccatatgcattacagaaagccaaggcaggagcaaagatatagattaccactatgtaataccatttgagttgggggaatatgtgtggaagagtaccaatggagatggcagctattgcaacatagcctccaagagcaaaccatactgaaatttggtctttcaaaaacagttgtgtgcggcgttggtcatcaaaggatggctcttctttagtgtaagagggacgatctgccactggaagagagctgtctgccacatctttttcttgcagctgattatacaagccagaaagggttcgggtcagcaccttcacgaagttgtatagtccgtcgcccaaaattatggcaatggcgataaacacctacaacaatgtttggaatttaaaatgttagggccaagaatgcatattgtggttcaactcaatacaaaatccaaatatttcaattgaaaatcaccttgtatccttgaagggcatgcatattagatggtttgagtttttcatcgaaccaatcaccctttctattctctattagaggccacatgacaccccaagaaagaattcctccaagcagcactgatatgttcacaatgtatgggcaaatcattcccactccaacatatgttgaagagaaatcaaagtaaaacctgcacggtagcatgttgtttagtcattaaagaatgaaacttttctcaagaattgcaaagaaattaaattctgtacacaatgtacaattctgatataataaaatgcatcagtacttgttctcgtatgccttcaatcctagtgtagggaaattagcaaatccacaatcatctgcagcagtatagaaccattgaaagaaaccccagaaaaaacttaaggagaaaaatttgcccaacgttctcacttgtttcctacaagtgtgaaaattacagggggagaaatcattaaatccaacacaatcataaatatgcatgcgtcaaaatgaagaaacatgcgttggagttccttactttgctaacttggctccttcaggagtgtggaaactgttaatcagatgagcagttgcagtaccacttgggtatgtcaatttgaagtcaatgatcatgatctgaaacaaaccacgagatataaaaattagggatggaaagaaaaatgaagatattatggtgataactacataatcaaatatgtgtaggcagcgtttaattaaatttacagtagaaacatgtaccttacgaagaggcaccactgagaagagaccaagaaagctaacaacaaaaagaaacccaattatccatcccaatgatggatttttgtaatcattggtatctgaagactgtttagcaacactttcactcattccaaagaggtaactcccaaagcctcctgatttgtttgaaaaaaaaagatttttaatcagaacaggacatgtagtgccaacttaaaatccatatactaacaccaaatataagccattatgcaaattacattcattcagaattacatgaagaaaagtaattcatagatgcaaaactataaacttcaactgaaaaggaatgtggtgaacattttattaattgcttaacaaaaattcaaagtttcaccagtttccataacatccaaagagtatttcatcgctggattaataggtgcgaggcaagtacatttcaaatttcccaagtggtcttaatcccatgtcacaatataagaatttcattaacaaaatcattcaaaaaaagaaaaaacatcattaggtctcaatagataccaaattcaaagcaatgatttttatttattatttattatacataagaatcaagtcttctagatacttaactctgttccttcgtatattttttcatttaaacatgtaatgtgtaattcttacaaagataggcaaagaaagacaaaaggcggctgtttggcttggtacctcaaattatgactataggggatggtggaggtcttcatcagaatctactttattccaatcatactttaaagaacataaaacaaaagattgtggatcttaaaattttcattttaaaattaattattgagtgggaatggtaataatggtgacatagtagtggagttgactgtggaaacaaatcatgagccaactcacacgcttcatccaaagaactagcagctcttatatatccacatctaaaacttattattttatacaataaatttggttttctttataacacacttaaaaacaagatctgggtttccttctttagtccaaaaaagacaaaaaatatgatttaagggggaagaaaggagatgtggataagtactaccaatgtattattaatgaatacccaccaccactcctctacttgccaatttttcttcacaaattttattgtttggtactacatttcccaaaaaaaaattcaaacagacacaaacaaacaaacatgtttgactaaaccaagattaaaaacagtaatctattttatttaaaaaataaataaataaaaaaattacattaatcttatttcttggctagtttggaattcgatgagtgtagtgagaaaaatacaaggaaaaaaaatattaataataatacatttccctgaaatcaacctttttttttttacatttttctcttctcaatacttcatttccacacatttttaaatccaaacaagagaatatgaaatcgtgtaaatgttcaaatacataaataaataaattaatagaagtttttccattattaaatctatgttaaaaatataattagaagaatggaaattaaggaaaacaaaaacatacaaaattggtttctgaaatccaaaatcaagattgaaaaccaataaaaaaatcacaaaaggaatgataataacatcatcaatattcaataatacgatttcgatttcaaaaattgaaataatacagagcaataaataaacgatgaacaaaagattagagagaagaaataccgctaaaggcgatgccagaggaagcaacaacacaggtctgaataacagtgttctcttgtctagtaaagggttgcttcaatagaccagatttagaagcgattttggtccaagttttgacgaagaagaatcccaaaagaccagcggaaacattgagcgaaggaataatccccgtggtgagattgagcttcatgacaatgaaagtgaagagaatgctgagcacaaaactcaccacaaaagccctcacagtcagctgatcctgccatgaaggaacctcttgactagcgaagatctgttccacagataacgccgccgccgcaacggcgtcgtttcctttgttcttctggtttggatcgtcatcatcgtcgtaaacgttgtcgtttcgaacctcaatggcattttgatgattgtgaaccgcagcttcgtcctcctcacgacccattttctcggagaagaagatgggcttcttaagacttttctcaccacagagatttttttttttttgttatcactctgcaatagaatcttgaatcttaagacttatatatatataactatatattatatacactcttggtccttgtactgtaccatattttccatctggtccctcagttaaaaatatattacatatatttcttttttggtttagatttcaaatccaattggaatgttgcgaaaattcgacactaatttggtgtgatggtgtagtattattgtaaataatataaaacgtataaagataagatgaacgaggttttatctcaaaactaaatgagaaaatttgtgagtgtacataaactaaaaattgacacataccatgttataatttaggataagatgaatgaggttctatcacttaactaattttttttttttttggaaacagtatcacttaactaattgataatagaaaaagtagtacattcatcttattataataatttattttcacacataacaaaatatatttatttggtgaaatatttagtgtgatatttgatatgaatcattagaattattttacaaaaagtaaaactttttacacaattgatatagattctatactaaattagtgtaactattgtaataatctttatttaatttaatgaatggtgtaatagtaattaccaattacataataaagacattataatattttcaaagccaaaccaaacatgacaaaattatgaacataatgcatggtttgtactttatatttataatattaatgattatcaaatatataattgaaatcattcatattttaggtgttgtttggctaagtgtgtgatagaataataatgagaataatattaagatgttttgtttatttataaaatgattggaaatgagtgtgtattgataagaatatcttaattttgaattattttggtaatggaaagacatgaaataatgagataagagtaatttatattatatgaatagtgttgttaatagtgattacacatatatagaagtgtaattcttatttttatgaatggtcgatgattggatgtaatgatattataatatttttaaaattaaactaaaaaatagaattgtataatagtgatttttttaccattatgattctctcaaaccaaacatagccttagtattatgatacgtgacaaatgaatctattcttacttacaagtaacaaacataatacttttttatttaagtacaattatcgatcatttaaggtacaaaattgtatgatttttaatttatatatatagacacaataaatattaaagttaaaacacataacttcttatatatttgttttgtataagaattattttctattaatatgaaggacttgattataaaactgaaaaataaaaaaaacgtgaaacgttttcaaaaagggcaaaagatatcataattattaattaagatttttttaatcaaattaagattaaaattaggggaataatgaggtgtaaaataggtgtggttttagctatgtgtaaatacagtaaaaagagtggaatatgtcaaggcgccaaccacggctatatcaaaacggcaaatttgttaaattgttaattactatatttgtgtatttattttcttatattttcattttattattaatttatcataaatttataatttaagtctatctattggtctaccaagataacgtcctcattgggaacagctatttgttattttcaaaaaagaaagaaagaaaaagaacagcaatttgttttaataaatgtaatatgtgaaacaaaaattaataataatgctataaataaatagtaaaatacttggtatgttttcatttttatttttcccacctattcttatgataagctagtaaaattacataacattttttctcacataattaaattcattagtttagtacatggcacatgcacaattacaaaattatattgtgtatggcattatcataatcatcaccttatttttttttggcaataattatcactttaattaacattatatatttgaaatttttacatgaaaaatcctttttacacacttta

SEQ ID NO: 299266 - DNA, 1757 bp, Cannabis indica
gcataaaacccaacacaaacttcccctttttgacactgttcctcccagagttgttggtgtcgcgcttgtttctagtgttcttgatactagaagtctgagcagcactactattgtcttccagtgtccctggtgggtcatgaggctactgggtgcctcgcgactgcctgctattgacatgccctgcttgggcctgtcatatggcttcttcaagtttgatgaagttgtctgctctatcgaggaactccttcatgttattggtggatatcctctggatatctttccaaaagttacttagtgggagtatgccctcagtatggtcatgtatcgaccttcttcaataaggcctttgactttggtagcctcggccatggatctctgaatataatccttcaaaggttctccttgtcgctgtttgacttcgacatggtcttccaattacgatggtacaactctcgaagattagaattatgtatagaattctcgtgagaactcaacccaagagttgaatctccccagggtgagtttaaagtaccattattgggttgtcttcgacaatgtggcttgaaatatgcaataacgcacatcaccagtgaccttctgaaggtcgagatacatctcgaagtatttgatgtgggccagcaggtcctcttatttgttataatgatttaagtaggttcttatcaaaatcgatagacaagtatgtcctcttttaacctgctaagaggcagcaagaagaacatccaaagattaaggagtgggagaaatctttccaagccttaaaagagcatctcgtgcagcctctggtcctagaaaagccaatgtatggtgaggtcttatttgtctacctagaagtcactatgtacgctattagtgttactttggtgaaagagaaggataaggtccagcacccgatatactatatcagtaaaagggtagtaggtacggagtcaaggtatcaccctctctaaaaactagcctattgtttggtaacaacatctcagaaggtatgtccatacttctaggctcattctatcgaagtcctaactaatcaactactatgataagtcctccaaaaaccaaagacatctggtcagctactcaagtgtgcaatgaagttagggaaatttgatatcacctatcggccaaggataacgatcaaaggaaaagcattggtggacttcatagctgagagcactaaccttgaagacacttcacacctatcgaagaatggaaaagctgagaaggaaggacaaatccttgtatggaagttgtatgttgatggagcatctaatgaacattgctcatgtgtagggatcatgttgatcgccccagagaatcactgtatcaactatgctctcatatttgggtttgacactccaaacaacaaagttgagtatgaagcattactagtaggactagcttatctcgcgatgtgcatgcacaaaccttagagatattcctaactagtaatgtgtcaggtcctaagggagtatcaagcaaagggacttaggatggttcaataccttaacaaaagtaaagtaattattggcatagttcaagaaatactcaattacacaagtctttagggagcagagcaccaatgctaaggacatatttgatttctatttataattatattaatttcaactatatgtgtaatagtgtaaagcccgcttagtttaatttggaaattagcagttaatcttgattaattatggaaattatttatagctatttaaataatttattatgctgtt

SEQ ID NO: 299267 - DNA, 2391 bp, Cannabis indica
aatccaatttttactaagtacattaaaaactagaaaataaaaataacaaagacgatgttaaaaataaaaaaaaaaaatacgaaagatgatagaaaaccacgtgattatcacgtggagattcttatccttcaccggatttaagaaccggataatcgaatgtccagaaactatcatccacatattattcgccaagtgtcaacatctccttttgtttttaataacaataacaatcatacaattattattttaatattttagggctgacgccaaagcagaggaggcaaactcaccgagttagggctcgccggagcttttgagcaaaaagccacggagcactcaaatgtggtaaatgaccctccgtttcaagcatttcgatggtgttacggccacccaaatggtctctcaagtagtcggccactgaagccggaaccgagacgtccttatcggtctgcattatacaacagggcaccttgactaagcccaaaacccctctcagatcactgttaaaaacggttcgtgacacaaatagagtgatatcgggtcgcatattgaaaagggttcgactgaattccctgactgcctccggtacatccgccccgactgctagcggagcgaacccgcttacccacgcttcgtaattagcttccattgccttgaacaccttctctatctccccttcctcgaatccaccgtggtaatctttgtcatttaagaatctgtaaagcaattacccccaaattgtttttggtgttttttttcatagtcttttcaaattttcaaatctcaagaaatcaaaactgaatttttggggattagggttttttttgttagaatatttttaccactattatatattattttacctaggtgaagctccgactaggatgagcttggaaaagaggtcggggcggcgaatagcagcgagaattccgatcatggcagaaacggagtggccgacataagcgcagcgatcgagatttagggcgtcgagaatattgagcaaatcgtcgacgaaggcatcgagagtggtgtatcgccggaaatcgaagtgagccgggttgacgcttccggcgcagacgaggtcgtagagtatgacacggtaatttggggtgaagtagggaagaatgcgttgccaagccgattggtccgttccaaacccatgtgccagcactaggtttctggtacccgacccgacgacccgaacgttcaatgcttccaagatattgttgttacccatgtccgtacgtatcttttagttctctctctttgttttggtctctcttctttttgtgtgtgtgctgtaaataatataataggatgagaaaaaaaattattaaattatatttatatttaagataattaggtggagaggggtgttgggtagggtaggtatgctgtgaggacttgctatgtgttttcctgtgtggattagattagaggttgctatttataatgggaaaggagtatcttgcacagtagacccttttctttttctttacatatttttttatttttctggttgtagaaaatgtggtatgatatgatggaactgatttttgtgggattggatttggatcacggcattctgtgggagagttttcattttaatgtgatgtttctctttcgtgataatatatatatatatatatatatatttatatcgaagcaacatagcatattgagcaaaaatattaattagagataatttggcatttgagtttgataagattgtgaagctaactgtacaccctacctattataacctttgcatttgggcacccaccacaccaccagaatagcattatctaaaaattagaagcaattctttaaagatgtggtctacaatcactttcctagcgtgtccttattattaaccttttaatttttttttagtgtagtggagtggtgtcactccaataatataaggattttgggttccgattcatagtctctccccttttcctactccttcctcacaattgagttagcctccgtggcttatcaaccttttaaattctaactactatattctttcatatttatttttcagtcctcctaataacatgtatacgagaaatagaaaaataaaagagcacttggaacaaccgtttcgaatgaaacttcaaactcaactagttttgatctcaaaatctcattatattacttacgagcctttcgagctcctttctatgatcttattgtcgtctttcatctttggtttttctttttttggtgtgaatggattttctttcgtctttatagctgccactgtgaatttagcaacaaaaaataaacgacaaataataattagaaaagataaatacaaaggaaaaaaaattgggtcgcagtctttcattcatctatagttttgtgtactaaagtcccataata

SEQ ID NO: 299268 - DNA, 4692 bp, Cannabis indica
agagagagagagagaatatagtaaaatgtatgaaatatagatgagaaaacaatgcacttcttaacttctccttttaatatcagtgtccaatttgcaagaaaaatcttgataaagattctacctaattaattatgaccttttaaaacataaaatatttattaaataaaaaataaaaaagccaagcaaacctagaaaaagaaagagaatatcatataaattgaagctgatatggacctagccgttaagctgcattaccatagtaacatacatgtaattattttctactacatatttataaaggttgaaatgtcattgatggtgttgaaaaaacaactgaccaaaattttccaaaaaccgtaaagctttctcaaggaaagatggacttccatcaatatcttctaatgcaagcaaaattggtcgtccaataactgatgacttaacaggacgcttatccttccctataaaaaacaaggaatattcataagtaaaggaactcgaaaaatttaataccatcactaaatgaaaaactaaaagaagtatcagttgctcaagtacaaacattgatgagggaaagacccttccattgtgtcatttgtgtcattacgaaaaatcccattatgtcccataacaatggcagcacttggtgcttgtgcaagggcatgttcaagggcagtcttccattcatataaatcttctgatgtctcagcctgaaaattgacaaagtaagagaacatgaaaataatttctcagtagcacagtacattttacactgctcttacagagaagagtagacaaaacaaaaatctaatagtccagtgcatcaccttaagggtaaaagctcggccatcacgcccatcaggaaataaaactgtcaacagctttttatcttctctaacaacaacactataagaaacaagttgcaaagattgagtatacagcaaaagcaacagcgtagcactaataaaattccattgttttcacataccttccagaattgttcaagtcaatgccacccaatgtaagatttacttcaccccctttttgcggaagtgcactctataaatacataccacacagtttataacttgtattactttgtcatataaatgaacaccaactcagcattataatactatagaaataaagctaagtacaacgacaacaaaaaacttagcataaaaataacaaactgtttctcaccaaacatgcacagtaaaattgacaactacttgagtaaccaaaataaaagggataaagtatgtagcactaacaggatcattcttgaagaaaaccagagaagtgcgtgtaagaataaaccaccgcttcttccaagacttccagccaattcctgaaatttcaacaaataaaaattgagaaggtaagtcgtaaggtgaccatgttatgtgagggcattaacagagaaggcatatttcttttccttttaaagatcataaaatatccatatacgtaagaagtaaatgcctctactacaccatgagccgtctagttaaattaaaaatcaatttaaaaagcacataaacagtaagatgattgaaaaagaaaggaaaaaaacagcacacgccctaactaccatattgtccacatatcaaacattcaaatgcagaagcattgcaatttactacattaggcataatacatgtcacatcttcgtcactcatttctagagcttatggaaacgattttcagttacattgtccatttcaatacaatggcatttctccgaagcaacttgcatcattttgttcaccttactttgttaattaatatatcccgccaatctaaaagtagaataattgaatcatacaaaggattaatactaaaattctatggattctatatggaaacatttaacatcattcctatatgaaaacggcagcatttattgataaacgttacagagataacgtatagacaatttagtaagcatttttaaaatgtatagataaatttataaaggactgttcgtacttccaaaatctaatatgttggacaatctgaaagcaagttcaatgagtgccataaacagatcaaccaaattattgattggaacaaaatataatgtgtttgtgcacatgcacccaattagaacaatttaaaagaaatattctagggaaatgtatacactaagggaaggagaaaactgtttaccaaccttttgaagatatgaaaagtggaccactcttgaaaacctgctgaatcatcatctgttagtaaagggcccacaaaggcaggcaggggggagttcatatttacagcaagcacaaagatatagaatgcaacaagaaaattatgaaacacaataagctataaatttaacaaacagcattccaaaaactccaatggaaaacaacagaagaaccaaaaaccaaacaaatatatcacattcaaagaaactgccaagtgactgaatttacattagacaaaacaaaatgatcacatctaagagttacaaagcttgtacataacaactataaaaattgaagtgttgcaaaatagattcaaattgaatttggtaactgtttacatgaagttatagagcgaaaactcatcgcacaaactctgaacttatgataactttacggagaaattagagcataatacaaattccaaactgggcaccagggttgcttaaatttcttcccatcttcaggaaaaaaaaataaggaaatgtatactgtcagaaaagcagaaaaattaaacttaaattattgacatgtataccatcaagaggaaaaaataaggaaatgtatactatcagaatagctgaaacataaaatcttaaattatggacaagttatcgcacaatttagaatcatcatgatatgtgccctgaactattcctcagtctcatcataaactttatataaaatgcaatttagaactttaaagaaaaaaaacaaggaacaaacaatgatctccctctctttccctaactacgaaaatgagtaaggaaattaagtcatcaagtatatatttcatttagaagcataacaagcttgcatactccccagtccccactatgtgataataaaaaaggaaaaaaacaacctgcatttcaagttcgaacaacacagtccacattcgtttaaacctagggtcaatttccatcaaactaaactaagtaaagtataaatgccataagatccaaacactttccggtcaatcttcagttcattttctcagtaaccaaacaaatgaaagaaaagagagatggataccgtattaggagcaactggtcgaggacgctcgaaagtcgctaaagaagctgccattttctccgcttaccattgaatgtcaaaaaacctttagacctctcagtgagttcacaatgagtcaacccggccgagacgagtgccacattgatgataatcgttagtagatcggagaccaacgttaaaaatcgaagcgatctgaagacaagaacaaaaagaagttttcagaacgattcaataaaaccctagaaagcaagcttaaggttcgattgtacagatagataaacagataagaattaaataaaacaacaaccgtaattattttaccacagtatcttactctgatttttcgccatatttatctcttgaaattgatttagagagagagacaaaaaaaaaaggggggaatgtgagacaaggttcggaattaaaagggttagctcagaaaattttgccggaaaattaatatggtagaaaatattaattttctctctaattttcccttattggattaggtagaaagcaatagtggttgtcgtagtaatatggtaatgttattaaaatataatatgtgggcgagtgagaaagagagagacagaacatagtctttgctttttcacctacttggagaagaaggatctggttgcgtgaagtcaagatttagtcaagctttgtagcttacccaataaaaagatgacacgtcagttctctgagattatagtcgtgtgttttatattttttatttttaacatatttaattatttatttttctaaaataaattcgttgctttattagaggtgtaattgatcgatggttggccattatggtgggctaaaagttggtaatctttttttatttttattactatacaaaaaatcatatggtcgtccttaccaaaaaaaaaatggtcgtttatagaaatcataactatatgtcatattttccttaaaaatatatatatatattcctaaaatagattttttattttcgctaagtatatagattaggattataaattggatattaaatttgctaagagatctaatccctatcattttgcaaaattgaatcaatcattggattgattttatgtaaatgcatctggtaaatatgatagatttgatcaagaaccatctaatattctgaaattaatatttattagaatcgaattcatataatatttattgaattagattgaattatctttaaaaagaaattaaacttaattgggaaatagagtaataagtggaacaatgtagtggttgaatccgatagtatgttgtgtgttgagactatacgtagtgatcaacgcatgaactctatttttagcttggttattcttaattgtcaaactttataatcttctcttcttaggtggcgcttgttggattttatgccctaaataaaactcttaacaatctaattagttatcaatataagaaatttgaagtgatttat

SEQ ID NO: 299269 - DNA, 1700 bp, Cannabis indica
aattattttgttacaatattaatcagtttgatgttgttactagctcagagattaatgttgcatttaaactaaatataacttaaaagcaaaagttttaaatagtttttttttttttaagaaaaggaatggtagtgtcttcaaatcactcccattagtttctatattctataaaatattttactaaaattctaatttcattattttatctctcatatttatattacattataaattaacttctctatatcttctttatattacttaaataatctatttttctaatataaataaatatagtaatatcgctcacacatattcaagtaaatatttgaaaaagtaatacaatatttatagttcaataaatatttttaatattatttttaaaaattaatataattaaaaacactatttataagccaatttttttaagggtagttaacagtaaaactatctaaattttaaaatttagtatgtcgaaccccctctaaaatttacatgtgttttggtttttaaagttttgttagtgagctactgttaattggcagcatagatgtttatatgtatatttagtgtacacatgatgtttatatcgccatgaatttcgcaacctctaaaaccttactcatgtttgtccttgtcccgttcatcttagtcgtagaagaaatggagcctcttgctggctttaattgtgagtctatgaccccgccttctggccgaagaaacttaagaactctggtcgccaaaaccccatggttcttcccttctacccctcgatctgctttctccatgtgacaagagagttgatcttctctctctgtgcgataaaggactcgtcccgccttcttcgagatggcggcaaaccaccaccatcggcgacaacctgtaacggaaccccaaccattaaatctcgaactccgaaatgccaacgtctccttttcatttctctccgtctctttctctctttccctctctgtctctgtaacgccctactagttaattactgtgttgacatttgctaatcaaaagatttaatataaaattatgtataattaaaactttataataataataatatagtttcataaataaacatcataaatgttaactgtatacaaaacgagggattccaaaatctatttttaaaaaatgaacataataaaagtgttgcccacgactaacaaatttgagcctatattgtcctgaagattcaaacaattcaagtctaatcatctaaatatgtacaatctttactgagtttaatactcacatctttacctacacataaaacatatatttgttagtcgaaatcgaaagactctgtaagaaaagcataaaatataaatatataacatgacatgtaactaaacgtccatacacctactcacaagtttaaaattgagccacaaacataattgacatagtacgattgaccacaatatcagtttatattaagtactccagtcgtactaatgtgatagcatcaatccatactataagtacaaatgaccataataccagcctatactgtaacgcccgtattttataataataaactcggaaattaattttaataatttatatctttaataaccatatggatcgggatccccaatatcaaaatacaagttaaaagtattttactattatatacattatattttatttatttttttctttaaaactaactcgctaaaatgcaa

SEQ ID NO: 299270 - DNA, 8122 bp, Cannabis indica
caagctcgaagaaaattattgtttcacttttaataattatagacgctatagattccatatctatgattagcactcccactcaattgtactgccatgttcccaagatgtaagtattgggaagatccattgggtcaactttaacgaacaagtcaaagaacatgaataatacatttaagctagaacctaaccatctcaggattaagatctattaacctaagatcaactaagtgatattgacataaaaagatgtcacagtaagtttatgatatcgtacacaatgtcaatatcagttcagtctaatgtattccatacatctgatactagtatgctttaccgaaaccctggaaaggacataccacatatcaatgtgtaagtaaactttatcgctgattatcacgtcagtgtaaatccaatttactgacaaatcatgggacctagaactttaaaatatataatcatgattattttccactgtgtagacaacactataatcatgaataactatatgttcaggatttaattgaatgtatgcattaaacataaaatcatgaaagtaatcatgtgaaccatgcaacataaaataatttcttattttttattaattagtaaatctgattatattgaaatgggttttatttagggcataaaattcaaacaaactctcacttgcactaatttaaaactaaaagtgtatttcaattaatcttaatatcttaatgtccagatcaagtgtagtatgcagtattatctttgtaatagaatctgacaagttgtattcaatacaaactttctccaccattacatctccttaagtcacaaaattcttgatattgtgaaattccttttgatatgtttactcatcttagggtattggattctttactgtttggaaactatatatgtgtcattaagaagaacactagtagttaatccatgaatggaataacgttaaaaattagaacttttcataggctaaataattatctagtagccttctaggtcactttaacattcaatctcaatggtagagttagagactccagattggtttttacacttttctaaaattactactctacccccaaagtaatcaccatctcattagtagactttctagcattaacccaagtctagcaacatgatttggtgcagtctagtctagtggtattaaaatacaatccttattgactaacacatagttcctttgttgatcttaagatttatttgattgtcttctaatattcctttcttagattaaactgatactattgttcaaatttctgcaatacatgacacgtggaacccaatgaagaaaaacacattaattctctgctgattagagccttctgccgtagcttctataaaagggcttccctgaaaggtacatccttcacaaaagtaagggcacgtggaagctcaattgcacctgcctcctcttcctcctggatgcgaaagaaagggtgttccttccagactcaaaaaagactcgtggaaaggtcctcctcatttatgtccatagaagtagcaaaaagactcaaaatgggtttcactcccatgcagtttcacagacaatcatttcctacacttgtcagaccactaaagtgaggataatgctttttctagtacaacgtcactttttgtcccccacgttaggccatagtacgatgcatgcgcgttgtacctgtcttttgcccaacagccattcaagagggtaattcttaaaggcaagacctttgggtgtcatgtattgtgagtccacatggtactaatcataacctctatacacagcacggtggagcagccacctaccacacagatggtcggatttcctgtagtagggtttgccctgaaggcatgttgtttaagaaacctcctataaatacccctacttgtacaaggggaaagaggaaaaaaaatttaacctagagaacctctatcaaaattcctacaagcttcactatgtaatttcccatgtaatgcattgtaagtagaagggaaatcattcctcatgcattaagcccctataaatagtgacgtagcctcactatggaggagatcaaaagaattgcttcatagagagagaatttgtagagagaaaatagtgatctaagagagttgctcaaagatcagttgtaagagctttcaaaggggaagaacactttgttccttctcttaagtcaataggggagtaggctattagcacactcacggccccgaacctctttaaaatatggtgttcattttactttattatttttattctctttttaactattttattcaatcgcttaattatttgactcattgtcgttggctaaaagcgatgtcaacacgttcagaattgattcatattcctttcgttggacacatgtcaacttctggagtgaagccaaatttcgggtataacacatatataagagtatattttttagatttagacaaaacatgataaaaagtgtttaatttaaagaatttagtataacacataccaaaaatcattttgtttaatgaaaagatgatgtaaataattcttccaatttataataattagtttcatatctatcataaattaataaattatttttatattaatatagatcatagattagtggttaaatataattataagctacactattattaattattaataatagatgtggatgtgagttactctattgataataataatagatttttagctaatattattgttgaaaaaataaataatgacaagaaaaaaaataaaaaataatgatagaatacacatatagattgccactttaattttttaatgctttcctttatatatataatgtatttcttaagtgagagcactacttttgttctgacaagtaaggacatttttatagtctttgatcttgaattaagtggtggtggtggtttctttacttataatagggtatctggtattggattatttcttgcatttataattttcatcctatgtggcagctatacgttaaaatagtttttcaaacttaatgcaataattttagcaaaaaaaaaaaataagaacttaatgcaataaatatgattatattatatgtgtgatttacatgttactataatttaactctacttcttttcaattgtaattgtaaaatctcactaaaattctatctccttctaacataaattatatataaaactaaaatcaaagtaattttctctataatattactttctgtgtctaaaatgactaatcatcgagagaaagtttattctacaaaatctctttctaccctggctgttgaaaaaccttgaagttttttacattctttttcttgtatatatttttctgagaattgtgttgctatgattttgatgtgtgtcggcttctttgctaaagatgtggatgggatatttatgaggaaaaagagtacagagcactcgagaagaaaagaaaaataacaggtgaatattgctctgtattattcttattattatgttttatggatacaaagagagctatatatagtagtagaattaatccaaataagactaacagaatcaagaacggtaacagaatcaagagaccaaataaacaggttataacagactataaccgactcaattaattgaactaacatactaatcttaatagcccccttcaagatggagtgtagatgttggagacactcatcttggacataatgttggtaaggctttggtgaagatgtcagccaagttttgttgagattgaacatgaagtaacttgagaaacccttgttggattttttcccgaataaagtggcaatcaatttcgacgtgctttgtgcgctcatgatagactagatttttgcttatgtgaattgctacggtattgtcacagtatagagacgcaggccgattgagaagggtgatgatccaagttacttcagatgtggcattttccatagcacgatactcggcttcagctgaggagcgagaaacaacttattgtttttttttatttccaagagacaagagctttgccaaggaacacgcaatagctagatatggatcgacgtgtgtcttggcatgtcccccagtctgcatctgtgaagaatgataattgaacatttgatggtgataagttggtttcagcaaatgctgaaacatgtggagtggtatttgatggaaagaataggccttgtcctggagtacgtttgaggtattgaagcacacgatgagtggcttgtaggtgaggtactcttggacatgtgaggaattggcttagatgattcacggcatacgagatgtctggcctggttatggtgaggtaaatgagtttaccgattaggcttctataagtggtaggatcaggaagtggttttcctttgtccttactgagcttaagattaggttccattggagttgaagctggttttgctccaaggttacctgtgtcagcaagtagttgcaaagtgaaaggtctttgggagatggatatgccttgttttgttctgccaatttctaggccaaggaagaatcgaagggagcctatatctttaagtgtgaatttcttgtccaaaaactgtttgaaatgagtgatggaaagttcactgttgctagccacaatgatgtcatcgacatatattaggacagtaagtattaatgttggtgttctttgatgaacaaagaattgtttgagagggattagtggaaactttcaattttgagtgtggtgcttaatttttcgtaccactatcttgaatcttgtttaaggccatatatactcttgttgagcttacaaatagtgttgggtggggccttgtatcctggagggattttcatatagacctcttcatggagatcgccatgtaaaaaggcaatgttgatgtcaatttgatgaacatcccaattgtacatgcagctagtgcaagaaaaattttgagtgtattaaatttagccacaggtgcataggtctgatcgtagtatataccttgttgttggttgaatcatttagctacacggggagctgtgaatctaacaacttcaccttgttggttatacttgattttgtaaacccatttacatccattaatggctttatggccaggaggtaatttggtgacagcccaagttttatttttttctagagcttcagtttcactgtccatggcatgaagccagtgtttgaattgtgaagcttctgaatatgaacgaggttcaatttgagattaggctgcaagaacgacagctctaaattgaggactgagtttggtataggaaaggaactattcaatggggtaagtcgtggatgttgtgtggaagacatagtcctttatatatttaggtttattgatatgtctgccagtttttgattggagaagtaggtctacatctgaattttcagaatttgcaggtgatttctgctggaaatcagtatgtaagattgggttttggtcttcagcaatagtggctggtgtgggagagacaccagaagtgactgctggtgtatcatgtgcattaggatttgttgtgcattttgtattatcaacgagacttgttgttgtatggagatgagtatgaataatatcttttggtgattgattgtcgccaagaatggttgttggtgtgtgaaagacaccaggttcatttgtaggagtttgtttaatatcagtaatagttgctggtgtttgaaggacaccagatgtagtagctggtatgtgattgataccaggtgtgagcatgggtgtgttgactcgattgagttgctctataatagggatgatgagtgggtgaaagaactgatttatatcagtagtggaagtataaccatttagagggaatatgttctcatggaagatgacatcccgagagtgatatatttgtttagtttcaatgtcaagcaaggtgtatgctttcattccttgaggatagccaatgaatactgaggcagagcttcttggtgaaaatttgtgcccactggaagtgagagtagatgcataggctaagcacccaaaactttgaagatggtcatagatgggtggtttattgtgaagtattttataggaagttctgccttgaaaaagagcagagggagttctattcatgagatatgtggcagtgcatataagatatggccagtatggaagtggtaaatgtgattggaagcacaatgctctagtaatatttaaaatatgttggtgttttcttttcataatagagttttgttgtggtcgttcaacacatgaatggtagtggataatgcctttggatgcatagaaggattgcatattaagttccttggcattatcagactgaattgctttaatatttttagagtgttgtgtgcaaaccatgctatagaacatagggataacaaattgtactttagatttggttttaagcataaaagtccaagtaaatcgagacttattatcaacaattgtaagaaaatatttgtacttttcaatgcttattatgttgaaggggccccaaatgtccatatgaattaaatcaaatgtatgttcaacaaaattgctgtttgaaatgaatggcaatcgtttttgttttgcaagatggcaaatatgacaatgctgatttttagaaaaagaatctgaagaaaaaattttattgaacatattagaaatgtacatagagggatggccaaggcgcttatgccaacggtctccattatttgtagaaagtaaatgacaactagaactagctatgggaagagaatcttggataagaacatatagttgtcgaagtcttttagccgtgccaatcaccaaactcggagaaagagcctgtaaaacacatgaatcatggtgaaaataaaccatgttagcagtgttgttaaggaaagtagggatagaaaataagttgatattaaatgttggtacaaaaagtactttgtgtagaatgagatgttgattaatttttactgttccaatgccttaaacagggatattagtgccattagggagaagcacatgtgagggtaaggcatgattggaaaaataagaaaaacaagatttggtggaacacatatgttgtgtagctccactgtcaattatccaagagaaattttggaaaagaaatgagttaccagccatgtttaatgctgcaggagcatggttagtgtcatctcgaggttgtgcttgactgaattgctggctgagaagtgagatcagttgttgacattgggtggaaagatcaacaggagaattggtggcagcagcttctggtttgttgctggcagtagcacaattggtagaggttttgcctttgtccgattttttttgtcaccataacccggtggaaatccatgaaggaaataacacttatcaacatagtgtcctggttttccacaattagtacatgatggccttggtttcttggatcgagtggggttgttggatgatgagagtcgaacagaggaggcaagtgagggcaaatcagatgaaccaagagtcctttgcctctcttcttgtacaatcatgaaaaatacgcgagagagattggggataggtttattgagaaggatttgagcccgtatagatgcatatgactcattgagaccagttaaaaattataggacttgattttgattatagtaatcaagaaacactttcattgcaccacaagaataggtggtgttgggttgaaattcttttagctcatcccaaattggtttgagctttgtgaagtaagtggtgacggattgattaccttgctgcaaacgtgtgagttgtgtttgcaactgaaagattcgaggtccattgccctcattgaacctttcttgaagatcataccacatatccatagcaagatcgaaatacatgatactctgtgcaatttcagaggagacagagttgatgagccaagacataatcatgttattacaacgattccaagaattaagaaaggggttaccagtcgcaggtcgagggagagaaccatcaatgaaggcagatttgtactttgctgttaaggccattgtgatgcctctttttccaagactggtaattagctattgggttttgtgccctaaataaaactcattccaatataatcagatttacttattaataaagatcagaaataatattttatgttgcatggttcacatgatttatttcatgattatatatataatgtatgaatt

SEQ ID NO: 299271 - DNA, 2482 bp, Cannabis indica
aaataaaataaaattattttgattttttttttttgcagacagttaataaacaacatttaattattttatattttaaactcattcatttatccattaattattctgattctagatataatttagtaaacgtgccataacattaatgacttataaagcttcttaacttttattaattagttttattaaaatttaagttaatttgatagttttttgttgtattaacttatattatagtgaccaataattaatgtgcttaaatagaagtatagatttttttagttagctgaagctgttgatgagtagaagctccctcctaattctataaatctatattatatacgaattttgtaagtatctgggtttattaatttttctaacaactcctaccatagtcttatatattttaattggggaggggaaaatcaatagaacaacgaataaaatcctcatcaggctcatgaatttgacgaggataaattttatttttgaaagcttggcgaggataaatttaatgaaactaaaaatagataaatgaatacgtatatataatgtaaaaattagtaagatatataataatgtaggtataacttaaattagtaaaataattgcagacattgtttacataaaaatataaggtttcgtgtgactttattagactgtggaaaacgagcaagcagagcccatcgaaagtaaaaaaagaaaaaagtcaaaagcaggcccccaccgattaatagtgtatggatttctgtttttaagcccttgtttctctattctaagaatatgatcaagatcaatataagttaatataccaattaattatctctaatttctttctatatataacgaagaacaacatatggaagatacgtactaatggagaacaagagcaagatccaaattctttacgatgcttgcagtgtcgtttttactcagaatcaaactccaaattttcaacaaatccaatggctcaaaagtcttcttggtatattatatatatgtactgtactgtgtgtgtgtttgtgtcatttttatttttcttatttgtaatctcttttttctttcttaatatatatattgttttggtcgtaggcataatcgaagccaaagatgttggaatcgatgaatttggaatatcatcatcatcatcatcatcatcattatgtgaatcttcattttcaaacccaaataaggagaattacaataagggactaatctgtgggctaaccatgtctgaaatcacgtatattcatatacatgaatgtaacgacttttctgtaagtacatatttaattatttatatacaggcttttttgtttttatatatacaagtgaagtaattaataatatgtggtaatgagcagattggtgtgttttgttttccggctggaggaacatttccacttcacgaccacccaggaatgacagttttcagcaaactcctctatggttctctttacactaaagcttatgattgggtcagtgtgtataattcaacagcaaccactagaacatgtaagattataattagttgctttttgtatagatatagataatttattctcttttcattattgataagtacatatatgtattatattattataatatttatcctttttgagtgtgtaaattatttatagttgggttaggaggtttagtaagagaggagatggtaaatgcaccaactgaaacaagcatactgttcccaaactgtggtggaaacattcatacattcacagcaataactccttgtgccatattggatgttcttactccaccttactctgatgaccttggaaggccttccacttactactttgacattctcatcccctctcttcccggtacatacctaattaatactacaatttggtatcaaattttaaatatttttatttaaaatacttaatttcacccgtcaatgttagaattatttatttgtggactaatataataccataatcacaatcattaactatgtgcccaatatttatggttaataattaataaatgtattagaggcacatgggagcaccctaaaactataattggcccattaaattatagtccaccactaattatactcattaccccaataagcctaatataaccaattagggttaagtattgtatataaaaagggtaatatgtgtttagtatgagttaagagagggtgtgtggtgaaaagaaaagggtttgctctcataggttctcttctaccaatttggtgttcattctcattgaaggttttggtgtcttagcaacaaaatggagaatagcaatatgggaggtatgtgttttacatttgtgatgctctaaataaagtattgattttggttttaatgattatgaacaatgatgtttaatgtatatttagatagttcataatctatgtgaatgtttaacaattggtatcaagagctagaatacttgattttagagctccaaaatatttgaaataacccattaatttatttttttc

SEQ ID NO: 299272 - DNA, 1437 bp, Cannabis indica
ggattggttcggtctaaattttaattgagatatttacacaattttctgaaatctttaacttcttttttttttttattgtgggacagaattttatccaataccgttgttttttttttttttttttaagaaattacacttactatgggattttaaaatttttttttttcgtttttttttttgttatcttttttgatgaaagggtgggtgccaaagcacccaattcaataaaagataaacatccaatacagaaacaaactaacacagagaacaaagcccagtaaacacagacaaactgctgggaagaacaaaacaaacaacataataagaaaacaaaggcaaaagccgaaatacaaagtcaaacactcatccattatccgggatccattcttgatagtcatctatgatctttttgtccaattactcagtgtcaagaaagcctgaggtattcgtagtcttggcccacttcgccacattgtgcaccataaagttgcattgtcttgcaatgaatgtaatgtcccactccgtgaagatgctgcacctatggaggaaacgagtccgcgctgcttcaagtttatggtgttgctcagtcgaccgagctttgaaacatctcacaactgagaagttgtcacattggaaaatcacccttatgtaccccagagagattgccacttcagccgccatacacaaggccaatgcctcccctagtttcgggtctgtgacagtgctttgactagtgttaatcgcacacactgccccaaaatcattgcgaaacactcctgcaaggactgagaagtttggtgaaccggtctcgcttggtccccgtggactttcttgtttctttgcttccacacttcttccacaatgcatagagtattcaacatgaattcttcaaaagtggtttcaggcggtctattgcaatcccagttgtcgactcttacctgttcagttcttatgccccatctggtatgaaaccagagaacttttgatagctcacactcccaaaagaggtgtatagtagtttctgtcttcagctcacaaagggggcagaggttagaagctagattcaaaaaattgaattaagcttacctttcgttgggagcacatcccttaagagttgccaccataaaagtttaagccaagagtgtatccctgaatgccagacaagcttccaaaccgaattaagctcattgttcccatgacatgttgagatcaaacgataggctgatttcactgagaagttaccactggcttcccccaactaaatccaagagtcatctgcctcacactctagtaggtcaatatttagaattgctttggcatccaaagggtgaaaccattccctaaccatgggaacattccatctattgtgcggaccaatgacatatattttaaaaagttcttatgtataaatataacacatttaagtttgaccaattt

SEQ ID NO: 299273 - DNA, 3514 bp, Cannabis indica
tttttatataattttatttaattttaaaataacttatgaaataaaaatattatgtgtacaaatataaacgtgttatgtgtacaagagtgtacacataagcagtccatggtggtaattaatcggatgacgtacatctttaatttgttaacaatttagtagtttagaaagttttatcaccaaaattcgagctttgaaaattatgtataaatgaaacaataattaaaagagtttaatcgctaaaaactcatacaatatattaaatagctagattgagtttttcatttcgtcaagttattttgtaatgcaattaattattttcttttttatgtattttttatttaatctaaataatttgtgaattattagtaatagtgcatattttattttgtttatttattcaattagtctatattttaaaagaattagcaacttttattaaataaaatgttatgagattaagaaatattacaatcaaaatacttaaaatataaataaaagttatgagattaagttttttatttcatcaagttattttgtttagtgtaattaattattttgtctttttttttgcctattttttatttaatctaaataatttgtgaattattagtaatagtgcatattatataaggtattgtttctcacaatagatttctcttggattttgtttgaaaggaactcacggccataacacaataatttggatggaattagcttagagaggatgcatgcaattacatctaaataagaagctacaactcaatttctccatctcattattttgaatgaaataaatatataattatttgtgttttgtgagtaaacataatggtggaatatattatttaaaatcatttacttattgtattttgttttataaatgaaggatgctgcattttgatttctaaaattactattttatttcaagtaattttgaatctttttaatttatgtatttaaatggtatttttataaagcaaggtaaaatatcaaagtgttacagacgatctcctattgttggggttacgggcgtcgcaataaccaagagcatgaccgcaacggctgggtttagaaaacccaaattttacttttattatgcatgtgatgtctaagtccacagcaaaatgaatgcaagtatacacaatatcttaaaacaacacttgctcaaataagatataatcaagctcaactaaccacatgattcaaaaatcaaagctttaagaaaactaactcaaaatcaagcttaaactcaatatttacacacaaaatgctcaaaactacatgacccaaaactcaaaatatttagagaaaattatattatatacccattttaatttacttattttaatttttacgtttacttttacattctttaagttatacccatttttataaatgatgttcccattacaccctttaaattaatgtaaataatgtgttagacttaagtcgaagatgaaggtatattaggtaacccacttataaaagtaggtacaatttaatgaaatataatataagagtattttttattaatgaatacaaaaaagaggtattttttaacttattcccaacctaaaaagtttattttaaaaatacctaaaaataataaaaataataaaaagaggtgtttgtttacatgtctatttgtttgatatcttaagtttttactaaaactcatatgctactttatattttgaaaatgaacatatttgtatgttgaactcaactttgaatttgatcaataaaagtttaataatttaactataaaataactatgtatataattaaataattaaatttgaatggataactcataaatgaagatattttttttatccatattagtaatattttattggctaattaggaattttttcctccaaactttgacatgtatcaaattatgcctcctgaacttttttgactgttaaaaatttcacctgaactgttgagattgttagatttaaggacttttgtctaattttagcaagaaaattctaacatggatgaaagttcataggacatgatttagtacatatcaaagtttaaggggcatgatttagtacataaacaatcactgaaacactaaaattgaatgaaattagacaaaagttcttaaatttaacaatctcaatagttcaggagaaatttttaacgactaaaaaagtttagggggcatgatttagtacatgtaaaagttcgggagaaaaaaaatcctaattagcctattttatttatcaaatttaaatataagtatcaaatacatgtattattgaaaataaaataaatattattttaaactctgtattttataaaaattattgttccaaccttcagttttgtttaataactaattaaaccttgtattatttttttaaaaaaaaattgtgcaaaataataccctcagttcaatattcattaattttttcttaacataactaatctaaaagcagtttctactatgaatagatctgaaaaaaaaaaaaaatagagtaaatatgatttatcctccctaaacaataaacaatggcacttgtagaattttgcctttgaatttttttcttttgcaaaattctcattgaattataaaaattgttgcaaatatccccatgcagttgtattctactcattttttaaaataatttattgatatgacatagacataatgttaatctagcctaattcaagagtccatataaaaaataaatacataaataacaatctaatgattaattactagattatgtatgtacattcttaaagctaccattcatatatttaatgtcaattaacttgattttagataacttcaaactattaaataagtcattatactacaatcatacctgtaacttatagccatgtaaataaattgttttaaaatatgagcaaaatatatctggagggagatatttgtaacgatttacatagttcagagcaaatttttgcaactgagaaaagtttaaggggcaaaactctacaagagtcatagtttagtggcaaaaatcctatttattaaaaaaaaaaataaacaatctagttataactcctttgaagattctttggtacaccgtattgtgtcatattatattgtataatattatattaaattgtgttttatatcatatttatataataccatataattggtattaatttgtatgagtatataatatatactattttaagattaattagaattgacacaatataatataaaaaaatatgatataaaatgtaatttaatataatactatacaatacaagctaatatggcacactaaatcagtcccaagttagattattatattaaattgagttttttgcggccaaatcctctcaactatcgtattactagcatttaattctccaagttcaaattttgacagtaaaactctcaaaactactaaactagtagcaaatttaaggtgtcattcaattaactgccaccatggactgcttttcttgtacatgtggtacatttatattgatacactgttgtgaaaattatata

SEQ ID NO: 299274 - DNA, 4568 bp, Cannabis indica
aatagagtattcttaaatagaggttctactgtatttataatttatattaattttacaatataaataaaaaaatactttaaaatgtatagatgaacaaatcccttaataatatctacctattaataaataagaatatgaaaaagtatatcatagaaaatatcatcagtattctttttgtgcaaaaaatttacaatattttttttatttgttctatagattgtaaattaataataaggaacatggaataaagaaaaagacaatcagtcttccaaatggtgttacaagaatgttgctgagagtcatctcggctggggctatgtttttcccttaataacataactaatcacgctctttattcattcaacaaaaaaaaataaataaataaaaaaaaatcacgctctgcattctgttatctttttttcacccttaattaattgtgaatgttgttttatgttacagttcttctaaaaaagaaatttcactgttcttaattattaattgctttattccaaattagcttgccttggtattcacataataaaattccaaatgtgaaagacgaatacaaaatctacactttttgatatcaattgggaaggtaagcctgtctgtctcccgtgattggcgacgtgatttagaagtagtgctcccagaacctaactttactgcagttttttacgaaaatggtcaatttggcaatacgcgctcaaattcgtcttttgtgtgttgtttctaatatacattttcataaacatatatttatataatcattgattagactcttagtcttggtggtagcatataaccacttactacaactttgagacgaaaagcataacagaatcagttggtcagccaaaatcttcaccacagtagggtcgcctttgcaaagttttgtagtctagctgttagtcaaaaatatttcatatttaaaaatattaaaatatttgcaaaatacaatttcacttatgtcgaatttatagcatacaaatttattaatatacgtgatctatacatgattaaaagaataatctcttaaatataatttttttattcaaagaaaacactttttattctaattacgataatattaaataattgaagtaaactttagaaaagttaaggtgaattttaaattgagctgaactcactaaatttaattaaacaagctgcttatatactttctttgtgaaagatcaatacacttgtagttcgaatatgatatttttaaatttaaatataagaatttcgatagatgactactttcatgaattctttgctatttacaaatttgagaaaattgctaagtggatgaccttttatggaatcttgagatttgtattttatacgattttgtggtattggcgactacacttagtcttagcaactcagttgcctatgtatccttttataggaatcaagttgaacatagttcaaattttgtgatgcttagataattaagaggtgaataacctctttttgggatgttattttttataaccttgaaacacgatttattatggctttttaaagttactgcacttttgaattttgaagtaatattaccattaaagtgtgcttgagtggggttcgtacttttctctgatgcagttgctcctttctagtttttcccctgttttcccttgtttctatcttcttcttcctcctcgatctgactcccatgaacccacatccccactacccttctggtttcccaatctggctaccacgatcttccctctctgatggaatatacatatgctcgttattctataaatactcaaactcagactctttttgatctattccttcggtttcttttttctttcactgaatcaaacattttcatggattccataataaacaacatgaattcaacattggctttgccttataaagagagggtggtacataccttttctgaagcggatctctgtgatccaaaccaaacccctaaattttttctcgtagcccaatgtctctctaactattaatcccaaaatcttcattaactgaatgggagctttttggtcaaacaaatgtcgatttgaggttattattaatgacacatactgaactgacttttctaaggcaaatgtccacccttttactttcatctctaaaagagccattagacaagccatcccggcactaaggttgcaatcacaatttagctattgggaccataccacatcccttacctcttacacttgctgaatcttcgtccaataattcatcaagttcccaaccattagatttcatacccgaattttcttctcctttttctgcatattaccaatccatatcatccccttttactaatgacattcacaatgttcctcttacatgacactctaattccccaattattgccccctccatttccattaatccttcacctcactatataacacttatccacctattgatgctatttttacaagctttccagttactttaacttcatgtctattttcccaaagtagtagctctactaccaatgtttttgtgaacaaaaggaaaggctgttgtttctagtgaagaggattgtgattatgaggtgcataatagagtttttaaaagacatgttgaccccgataattttagaagtgtattgaagagatgcaaaaataataatcagtgtattttagctgttgatggtcatctcactcaaccagtttcttgttcttccatggattctactgagattttgccgtcttgtccagcagaggttgtcgacctacaaacccgctctcagccatgaatgtcaaaagctggaatccacagggtttggggaacccaagtgcattccgtcgtcttcacttgcttgttcgtgatcattcttctcaattttatttctgatggaaacaaaagttcttgatggcactcttactcgttttaaacagtctttacatttcaacaatggattagatgtatctcatgttggtttgaaagggaggattatgttattatggcaagaacatgtaaaatgtaaccttaatttcaatgagtacaaatcattttgattgctatgtgtcctttaataatggccctcgttggcacctctggtgtttatggctttcctgaagctacaaataaaaaatatacttggcctttgataaatagattggccgatgtttctccattggatctttggatgttaattggtgatttaaatgaaattttctctcacactcacaaaaatggtggtccactttgacatgataatcaaatgattgcttttcgctctactttggacggatgctttctgcatgaattatcttatgatggggataatttcacttggacaaaaaataacaaaaatcctttggctttgaaagaaagacttgattggtgctttattaatgatgtttagaataatgggtttagcttaccaactctaacttatcttgattactatggttcggatcatcgtgctatacgtgttcatgttggtttttcatctataactgaagcaaacaataagaagcaatctcgtgttcagtttgagagaatttggttaaaagaaaaggattatgctgatattatatctagttgctggctgcataatagtcagggggatccttgtgtggatttgcttaatagcttacacaaatgtgctcaaagtttgcaaacttgtcataaaaagaaatttggacaactcagaactgacatctccaatgctcaaaaaagggtaaatcacctccatactgtaaccacacctgctcttaatcattcccaagctattgtctcggctgagaaaattctggatgaattattggcttatgaagagcagtattggcagcagcgttctagagttgaatggttgcaattaggtgatcaaaatactaaattttttcatgcaaaagtctctgctaggaagtccaataataaaatcaaatgcttgtaggaccaaaatggttatactattactttaaaagaggagattttgagcatcatttctttttattttgagcaactttttactgctactgaggaggatcattgggtttaatcacatgtgctctccactatttctactaccatcacagatgctcataatgacattttattgaaggattttattacagctgtggtccttatagctttgaacaccatgggattagataaaagttcaggcctaaatgctatgtcggttttgttttatcaatataattggcatattgtgagacacttagtcattatagtggttcttcatgtattcaatgatggtggtaaccctacggttttcaataagatattgattactttgattcccaaaattaagaagcctcttactatgaaagagtttcgtcttataagtctttgtaatgtcatttacaagtttatttccgaaatgatagttattcggtttaagaatgttataccctatgttatctcagagacccaaagtgcttttcttcccaataggttgataactggtagtgtacttgtggcctttgagctagttcataatctgaagcatcgaaacaaaggttccaaaggctatgctgcacttaaacttgatatgagcaaagcttttgacagagtggaatggtcttttttag

SEQ ID NO: 299275 - DNA, 4600 bp, Cannabis indica
ataccaaggattacatcagcttctctgaggtccttcatatcaaagttagcacataataataatttcacagcattcacagcatggatatttgaaccaaatataagcagatcatccacatataggcatataatagtgcaaatgtccttatcagatttatagtaaatacatttgtcactttcattcactttgaaaccatctaagataacaaattgtcaaatttctcatgccattgcttaggtgcctgcttaagactatacaaagatttatctaacttacaaaccttatcttcctggcctgggatcacgaacccttcaggttgatccatgtatatttcttcttctaattcaccattaactccttttatgctagtcacataaaattatttcaatttttaatctcccctattagaaactgtgcattcgacaccatttattttggcattggcccacttactgaaacggtaaaaatcgttgtcgttaccaacactttttatgtcatagaaaaagctaaaattctcgactattggatttgcatagccatactctttgtacaacacatagaactccatgataattctatagctatttggggtaatttgaaaaggtgtgatgttgtagtagtttagtatagcttttacgaagtggtggaatgggactataactccgcaccagaggatcgacattgagactaccatgacatctgtaacgtcgtactagtttaggcacactattgtatttacttaattattgtacccatctttactaatcaaagggtttaatataaaatcatgttcaaaaactttataataataaaatatttttcatgaataaacatcattaatgcaactgtttacaaaatttgggatcttgaaatctatttttcaaatgggaacaaaatacaatataacaaaagtgtccccaatgactaacaaaactgagcccatattgtcctaacgatttgaatactccaaatctaaccatctagatatgtacaatcttcactaagctccaatactcactaatgttcagccctagcctttacctacacatgaaagaatatttgtgagtcgacagactcagtaagataagtataaaacataaacacataactgacctgtaactaggcgcctacacctaatcataaagtctataatccatgtcaaacacgtaaaattgagtctcgaacgttcttgattgaagtataattgaccataatatcagcctatactcatcactacagtcgtactgatgtgataacatcaatccatacgacaagtacaatcgaccataataccaacttatactcaacactctactaatgtggtagcattgattcttactttactaaatttccaaacatatatcccttcgatatccagtacaactctatgtacaccaataactctattactaatatgtgatctaattggcaggcatacacatgtacgctaaatatgtgcatatgtgtgtgtgttatactaatcttacctcacttccgtaatcaggtatgctggtcaacctgagtgaaaaaaatattgctcgaagatctgaggtcctaagtcataatcactaaaacttgtaagtgagtcgctaaatcacttttggggactttaactcgaaaataaaagttttcctatttataaatagcatggcaataccctaaatatctagaaaacatggaaatcaaggtacaaaaatcaccccaactggttaccctaatccccaaatggtacaccatttttggggttctacctggggaaacgaatcattgtttttacagaaacggtggaccattttgtagcaaaaattccaaacctcaagttttcttcctcaaatcttacccaaaccacaccaaactttctagaataccttaaaaacaagttctaaacataatcaaacaattaaacacaaccaaaaagctcagaatcgaaaaccaccactggagagctaagtttgagttcacaaactcaaactcactcaacccaacatacaattgctaaaatcttaggtactatatcatatcaaagtgacactaatgatcaaccgtcgaatttctactattaccggacataaaatattaaaataccaaaattcatatatatcaagtatagtacacctaaaactctataaaatctccataactgagaaattaatcctctaatatttatttctaacaataggacttatttttctactaatacaaatattataataaataattaataattcactaataagttggtaattgtttgctaacttctgtgtctaattatgctgtcattacaacgtatgtcttgatgatcgcggagttagtaaaaagacgatggagtcgttaatttgcaattggcttcgtgcaactagttaaattaagttttaacttctcaaaggttactaagtccgattgccttgttttagaaatgagatcctcacatgaatatggttcaggtgcgtcttcgttgcttaaagcctcagcttcttcatcgccttctatcccaatgctcgcgtcgtttctccctcgaccatgtaattcaatctccagctccacctctttgacctttccatctaagatgactacctcattaatataactgcttcaagcaaaaatggtggattcacttcctcgtggtaccataataggctcttggagttccctgaccatgcgagatatttcatccatggacattgaggccaatttttctttaacgaactcctcaaaaagtgattctaaaagaaagttatcattattttggggctcatcgttaaatgcacctccttgcaattgatactcctagctatctaagaaactggtcatctggaaagatagaagatcttttagcatattgtgcatgcaatttaaaagaagtatcctcactcatgcgatatcaataattgcaatttttccaaaatttttaacaagtttttcaatatagcttctgggtaaatgcatgaccatttaagttgttctaagtgaaaaacctacatgtatgtgcgagcattcaaagcgttcttcatttttccacttattcaatatgttctggatgtaatattgcgattactcattgaggcgtacaacaaatatgcgattattcaatgcacaatcttaaataagttatttttttccaaaaaaatacaactctatcttatgatttcttcttctctttctccatttgagctttgagaacctgattctgcttagttaaagccttaatgagcttttcagttctttccttctcaacctccacaaccttagctacatctaacactgccttttccttgtcgatcaatgataacttcacctacttcacttgttcttgtagcacaaactttttcttcttgagtaactcacgatcttttagcatttgtcgtgtggacatgagtgagcgagcgtacttagtcattcccttcaccatgtgctcagaacaatgactccacgtctctacaattgggacactctcaagactcaagaagaaattgtcattgaggtaaaggtcatgaagagctccaaagttgtgtgtgcgttggtggctgggtcaactatagatttcttccccttctcttggccaactttaggagctttcttcgcgaggtctattataggcatcccaaggacatcaattttcctctttgtcccagtgttaggaggattcccagttgatggtgtcatagtatccttgttaggagtggtctttggcttacggatggaaggtgcgctcttcaagaaaattcatatcttccatagaagctaacatcaataattgcatattattagagtaaaagcgataatacaaggggcatcacatacatgttaaagtctgttgtttcaaaagtcttttttctatcttctctttttatttcttggagggctccttgtaaattgattctcgctatattgtggcgtttatagggaacaagctgtgttatcgtagcttggccgatgtgcacaaaatcctacaattgtgagctttgaagtctaactcattaagtgctttagcagtttgcagttattctcctgtcagaactgtgcgagctggtctccatgcgaattcaaaagaaaggtcagataaagtattggaaaataaacacaaaagttgtaattagcaacttacttggacgacgaataaaatctattctaactcctggaacaccggctgcgtaaaaccactttaatttccattcttccatattgaaaatcaccccttcaatgccatttatttacgcattagcctattttttaaagcaataaaaaccattctcgtaaccaatattttttatgtcatagaaataactaaaatattcgactgtaggatctacatagtcattctctttgtatagtgcagagaaccccacgatgatcctatagctattcaaggtaatttggaatggtgcgacgttataatggtttaggatagcttttatgaagaggtggaatgagatttcaactccatcggtatcgagactaccatgacctccatcttcataatcttgggattggtaaaaaggatagtgagattgatgtcgcccaattagttacactgcggtcgcattagtaaacaggctatgtcgtatctacatgaaagtaaaatcacactcaaaaggaaagt

SEQ ID NO: 299276 - DNA, 3553 bp, Cannabis indica
tgtaatattacttttacaataataaagtaattacgtttttcacgtgttgtggtgtccaacatatttttgggtcacttaagtaatgcataattatgaaatactgattagttgtaatgataatttttctggttcgttagctactaaggttatgaaagaattttattattttaatagtattgttgtggatgtaaagctttctaaatgagtgtcctttctttggaagagtctgttataggatcgtgatttctaaaaagtttgagcaagatggcttgtgggaagtggtgatattattagtattaaagagaatgcaagaattcctaaagattatgttggtcgtgcttattctttccgagtacaatcgggttagtgatatgaagaatgacatggggttgtggaatgttcctctcattgaggaattgtttgattcaacaaaagctagggtggtgttatctattcactcttctttctttaagcttagatcgtcttatttggcactctacggagtctagacattacaatgttcaaagtggttagatcgtcttatttggcactctacggagtctagacattacaatgttcaaagtggttattagagtgtggtaaaagatttgggtttaggccaagcttcttcttccgcatgctaattttcttggtggacatttatgtgggctttctctctcccttctaaggtaaaaaattttatttggaaagcaaccctttaattttttaaaatttgtcaagacatgggctctcctctcctttggtttgtcctatttgttgccaaaacaatgaaacaataatttttgagcgtgttgttgacttaagaaaattcagtatgagtggctttaaaaaggtttggatcggatgggaggtgcttcatctttctatgaagtgcctattgggttcatggatattcttggaaagaaagaggtggaggaactttttgtcctttgctaaaggatttggtataaacaaaattagtttatgcatgccaataaactccttaatgatgtcttggtgggtttttgggcgttgaactatctgtggcggtatcaagatgctcaacaaccttctcagagtgaccatattagaagttcccctactatgtcgagtactactattaacgagacttcgctagctaatgataaggtgaatttatttgttgatgctaatctgaatttatttgtattaggtactgtcgtgtatgatcagtcgaggctagtaagatattcttcgaccatgcctttaaaggcctccattgccccgcatttggctgaaggtttttctatccttcaaggcatgcttctttgtattcgattcagctttcttgagaactgtatcaactctaattgtctcagagtttgtcaaagcattaagagcaaaaatcataaacaatttgaatttagaattcgtggttcaagatatttttcatgtgtgtaatttttttttattttcatttttcattgtaataagacaaatgactctattgctcattctcttacaaacctttgttttatctttggatgctctaaaaatttggtggtcagagctacctatttgccttaagccttagaacttttgactttgatattttattatcttgccatgtgcctaatcatatttgttatgatattttatttaaaaaaataaaataaaaaataggttataacaaattgatagtagtggaaaatagaaaatgatttgcttccttctttcaactatatttcatcaatgaggaaaaacaacaaacaacaacaaacaacaataataataataataaactcttatctttcaaatgtcccaattattaatatatttatttttgatgaaatctcccatttattttgattacattatccatggcatctaccttggagagtttgtaatatgacctaacatgtctaaagctacacatggttgatcagcaggtacctgtaaagacaaaacaaaatcaattgaattcaaaccaagatgatgaaggctcacaccccatcataacattctcaattttttcacaataaggaagaaattttttacaagttaagatctccatgcccatgattcatattcaatatttatccttatgacacaacatgaattgcagaggttaagatactgacattaagtaattttggacactgagtactttcataattaatgcctgagaatgagatatgaacttggataggcagatctcatcacctcattatctctctctctcacatgtaattgtcactgacacttgttattataccaatgcatgcaatagccatgaatgaatgttatgggctatacccaatagcccataggccactccactcctataaagattgagtgtgtgtggctcttacacacagataaatattatcatcatcattagcatgcttggtcaatgaccattgttcataaacatatgtgccaaaattgtcttgaagaggaacaataattgaaaaaggtgacataatttttttttcacaattttaaactctaccctgaaatagtactttattgttactactaactgtgtttttttttcttttttctcaaggttctactaactgtgtttacttgtttgtttgtttgcttgcttatagagcctagttgttatgtactatgtagtggtcctatataaaatatgtttgttgtaggaaattacattttaagatagcaggtgatcaattaaactatctactattgtacatgtaacaatatatatatatatatatatatctatatatatcaatactcttatcttaatataaatgtggaaaacatgtaccgacatgggcaagttttgttgttttcatcttattaataatttattgtaaagaggggtagattggttttcagccactcactcactataaaacttatccttctaacctatttgggattcacaaccgtacaaaaatgacaatatatatatataccttagagaaaggttagatgagtgagtagtaaactaaaacatgtttttttttctagaatgagtttcgatacaatataagtagtggatgggaaaataataaaaaagaaagaaaatgttcattgagttgagtggtaatgtaaatgtgatatggaaagtttacttacatcgtgtcctgctccaaggatccaatagaaatggaggttttggtgtgaagacatgaaccctttggttgggcctcctttcccacaatacagaggagttctatccttgctcaaaaatatttggagtccttcccacctaaaatatgttcaatatattaattaagcaagaaaaccactaacaccaactataataattatatatatatatagagagagagagagagagagagagagagaaagagaattactgagcttctaaccaagcttcagttcccttggttgcacaaatgagatcaagctataatcaccaaccaaaattatctcataagtaaatgtcatataagtacatctaaacttgtaccagctccaatcgagtgactttctctcattgagttcattactatttcatatcatccaaatcatcatgcatcaattttgtacaagaaagcaaaaaattccaaat

SEQ ID NO: 299277 - DNA, 10222 bp, Cannabis indica
acatctacttttatttttattttggcgagatagatgtttaattagtgatatgcttccaaataggtatcttttttcacttagagacgagaggttgtagattgactatgcatagaatctttaactagacaatcacagtggtgtataagaatgacattttaggtcaatttgggatgagcttggtttggataccatgttatggcagttattgtttcttttgttttgttttttagattgcagtggcaatatgttggattttaacctcttataagaaatagaaagtccattcataaaattctgtaatagaacaagtagtctccacaaatagaacaactgattgaggaagaaccagtgatatttaagtttttatataacttgtcctaaaatcgaagtatcaaatacaataagaaaacatagatgcttaagccagtctagtataattagatgaacagagtcaggtgttgggtggtgataggaaccaaaatctgtaaatggctattgagccttctccattgacattcaatccaagatttacaagaaatgcgagccgagccatcccttaagcctgctaaagaattctagagaatctccaaagttcacaaaaaaatccctgctcgatattttcttccactcttacttacaaaacaacaataaccatacaaccaacatttagaataccccatgattaacaattaattacttaccatttctacttctaatattgaccaagtatttatcaatcgactttttaaacgatgaggcggaagagtttatttgtattgtattgggattgttaggggcctagggtttgggaatatcttgtcccctgtactgtactgaactgaactgttctttttttaaagaaagtagttatatgcatagacactgaaggatctagattttgcctaccatgcccctgaaaatgttaaaacacttaggcaagttactgtttaacaactcaaaccaaactgctggaatacaagcttattaacgctattgacgattcctgacaaaaaactcatttttattttgattctctaaccataaataacttgaaactttgaattgcaaatgacttctgatccttgatactatgtttttgtctgcttcttttatctatggtagagcgatagttatggtgaatttgttgcatagagactgctccctttaattgagagtggggtgtttgtttaggagttcttagaatagatgctggcctctttgtattttgaagaataaaaagctatgtgccaagttatgggatacctatacttggagtttttacagtgctggtacagtgaagatgacatttttctccgagtaccatataattattaagcttttggcaggctgtgactcgtgtgaagccgtatatctgcaccatgccgctaaaaatggatgagggctggaatcaaatacagtttaatctagctgattttaccaggagagcttatggaacaaactatgtggagacattgcgagttcaggttcatgcaaactgtcgtctgaggcgtatatatttttctgaacgcatgtgttcggaggaggaacttcccccagaattcaagctgtaccttccaatgcaacaacaggtaaaatatcttacctgatgatctcatgtcagatggtgcttgaatcaaatctaactacaatttttactttattgcagaaagcttgatatggtaattttgaatggtgtgatctgttagagaagggcttcaactctcaagaccgtgaacttgattatgccatatatattatatatattttaagaatatgtttattaatctatagttctagttgatcaaattttttcaattctgatggagcttcatagttcttagcagattctgaactttatctgtatggaatggtttacatttttcaagattctaagctttattattttacatgtttttgtgctcaagacatttttcagacaacattctccttacatatcaaggtctttttttatttatttttttattttttttatttgcaaacgccatccttgatttgcaataaaggataagttgtagtcacggagatcccggaagccaagaccaccaacatgcttgtgtttagtcgaactcatccaactcacacctttgcttgaagaattagattgggacttccaccaacacttagacattcgtccttctaaatccgaacaaatttccttagtaagcaagaagacgctcatagcataactaggcagcgcttgagcaatagaccgaatcaaaacttatttgccagctttagataaaaattgactcttccaattaaaaatcctcttcttcatcttgtctttgagaaagtcaagaattgtatttttatttcggcccataatacaaggtaagtcaagataaaggctattatcaaaagcttcagccatttgtagcatgttacacaaacaggactgagcatcggcgagagtattcttactaaagaaaattgatgacttaaagaaattcacttgtggacccgaagccatttcatacatttggagaatatgaagaatactagcagcctcctcctctttagccttgcaatacacataactatcgtcaacgaaaagtatatgcgagacaacaggagcacccctcgctactctaataccagaaatacgatgatgtcgttcaaaagccttcaatagagaggagaacccttccacacaaataaggaagagataaggagacaaaggatccccttgtctcaattctcttccaggagtaataggccccatagtatgcccaccacgagtaatcttttaccttaccgtgctaacacaaaacatgatcaaagaaaccacccttctattgaagcccttcacaacaacacagattcaataaaaggtcattcaactctatcatatgcattgctcatgtcaagtttgagagccatatacccatcattccccattcttttcctctttaagtaatgcataatttcaaatgagaccatgatattattcgatatcaaccgtcctgacaaaaaagcactttgagattctgagataacattaggcaacacaagtttcaatctattggccaacactttagaaattattttataaagtacactacaaagtgatataggccgaagatcagtcataagctccgcattcttcttcttaggaataagaacaatattaatctcatttaaagaaggaggaaaaaacctgagacaaaaaaagaattgcaccagcaaccgaacatcatcacccacaaccggccataatttttggtaaaaatccggagtcataccatcaggtcccggagatttgtcgggatgcatttggaacacgttttctttatgtcttcatcagaaattggctcaagtagcatcaaattctggtctcgcgaaacagcaactgaaaccttatcaacaacctcgtgaacctccactaaaccaggagtaaacaactgctcaaaataactagtaatcaaattcggaagaccaccttcccatgtttcccataacccatcaacagtcctaagcctatgaatagagttgtttcttcgacgagaggaagccatagcatgaaaatacttcgaattttgatcaccttatgtcaaccaaatttgcttacttctttgtttccaaaaaatttccttttgaagtaacatattactaaactctaactcagctgctttgtaattttgcaccgccaacgggtctcgaactttgacatgtaccaaatcatgtcccctcaaactttgacatgtaccatatcatgccacctgaactttttttggccgttaaaaatttctcctgaactattaagattgttagatttaaggatttttgtctaattttagtaaaaaaattctaacatagatgaaagttcaggggcatgatttagtacgtatcaaagtttgaggggcatgatttggtagatatcaaagtctggggaacatagtttactacataaacaatcactgaaagagtaaaattgaatgaaattagacaaaagtccttaaatctaacaatctcaataattcagagagattttttaacggttaaaaaagttcagagaccataatttggaagtaaggggggaaaaattcctaattagcctattataaattattttaaatttctcattatttacaaaaaaatatcatacatagttaaatttgactattttttttttctcaaatggccaaaatatattggggctgttcataacatttgttgaaggagccgtaaataaatatgcatatatagtttcggaaaagcgtagaaaaaaagctacaacaaggtcgattcgagttcgactcccaatcttagctattagctacactacactccattcctatttatacatattatataacgcaactccttctctctctctctcttctactctctctctctgtcccatccttgtggcgggcaccccttttatattgtccctcttcttcatttcatcatcattattgttattgttttcccaggacttccttttacgcagaaccccccacaaacaggtatcaccttcttcaattcttttgattttattatgcttaatcgattctgattagggtcttttgctttttatgtgaatagttattttgctcttatttatttcgatcccaatggaatttcttttctttttgtgtgaattgggctcttggtttcttaagattatatcttaaacagtgatctcgttgattatatatatagattgggattttttttttcctttttcttcttttttgggtgtttaactttatagcataatctggagtttgttggttttgagtgtaaaggttaagcttgctactttgttgtgggctactgagattagcgttgaaaaacttcagtccatgttgtgataaatccatatgattaggctttgatttggtaattatttggggttaaatattagcaagtcgttttagctcctttgatttgaaattttccatgggtttggctaatgaaaaattggagcattaagaattattggttttgacttactgaagaatgaaaggtagggttcaaatgaattgatcttagttgtttaaattatggattagtagtatgctaatgcttcttcttgtaattggtttattttatttgttacccatgtattataggggttgagagttgacttaggtgagtggtagcatgatatattgatcctctgaagccctagattaagtgaacagtgttcaacagttgttcatcagtgttgtcagatttataaattgatttactttttctaattttcttactgtcattgtgattatgtgttttgagcaattctaagtcttttaagtttatttttattcatgtataatgccccattgatgtgcttttctttttggcaactagttctcttgaattatgctagactgcaactttatgggccaatcattgttgttttttttactatcattgcagaaaacatgattagactatttaaagtgaaggagaaacaaagagaacttgctgaaaatgccaatggaggggcacctgttaagaagcagtctgctggggagctgcgtcttcataaaggttaccctcttctgtctaactatgacactgtttcttttgtgcttctttttcaaaaagaacatgtttaagtgttacacttttctttcttcgcacatagttcttcttgggagccaaattttgtaagaaaatggtttctaggattttatctgtgcgtacaacaaagctttaatccaatcctttttatgagtcttctccttgaattcacggagatgtgctccatcggttgttggattacatttaaaagaacaggacattctgttttggtggtttgaattacgaagacaattttcacataatatgactcaatttccgttgggcctatccttctcttgagaacaaggagaagggttaagtagattatggttgtgaagtctgagattttacctatttggtattaaatcattagtggattgctcttagacttgaagagtaatttttagtttatctactgctttatttaaaatttgaagcatatatatgagctaatttcacatgttctctgtgatttccatgcatttatgaattccacatacttagtctgcagacacaataagaaagagtagttcttcttttgttatcatatgccttctaaaattcaatgattcaagtttggatttttttttctctacatgaattacatttctcatatttgggacgtcatgtactgcagatataactgaactgaacctaccgaaatcatgtgccattgctttcccaagtggcaaggatgacctgatgaattttgaggttacaattcgtcctgatgaaggatattatctgtaaggaagttctccagtgctcatataaaatctgacccttttatccatctttctatgcataccttctataattgttgacactaataaacgtgctctggcttcgttgattgattattacagaggtggcacatttttgttctctttccaggtttcgcccatttatccacacgaggcaccaaaagttaagtgtaagaccaaggtacgtgctacaacagatcgatactcgttttgttttcatcatctgatgtttttacgtgagtaacttcttttagtagtgtagtgttttatggtaatgtttacaagttaaatttgctccttcataatgctttccactagcaggtctaccatcctaatattgacttggaaggaaatgtatgtctgaacatcttgagagaagattggaaacctgttctcaatataaacactataatctacggattgtatcatcttttcacggtactattcctttcgatttacagttacatcgcttatgattattgccatttttagttctgaatattgtttttgccaggagccaaactacgaggatcccctgaatcacgatgcagccgcagtgttgagagacaacccaaagatgtttgaatccaatgtgagaagggctatggctggtgggtatgtggggcaaacctccttcccacgctgtatgtagccttttgtatggtaatcaagggccaatggttataatatattggacgcttcaatggatgtgggttgtaaaattttacatgcaaagtacattttcttcccatttctttttcttttctttttcccctttatttttcccccctattcgtcaatggagctggccatttatttccattaagacatatcaactgaaaacctagatggaattgtgtatgtgactaaactatgttgttatttgacattttattatattattatgtatgccttacttttcttcttaattatattattattattattatttcatatgtataatgaagaaataaaaacatcaaaatcaattgcatcactccaccaaaagatttacaaaaagagaagaaagtgtaaatttcattgtcgtgagttctcatttcatcaaaagtttcaaatgctatcaattctataatgcaaaagaatggccacttgaactgggcacaaagtatacataatatgtattatatactttgactgtgtcatatgttaaagaaaaaagctctgtaactgtaaccccagatttcaaaaaatgatcatatcatctcctcttctttaacactagccaatctagcattttcacgatctttccaaaaaaacttatacaaaggggtgtagaacaagcaacaaacaccaaatggaactgccatcattgagaggagtccctgagacagagctagagcctcccgtttagaccccaacaatggatccacccctttcgaatcatacccgaacattttctccgacagaattccaaccaagggagctgcgaaggaagagaccgagccctcgaaagctcgatcaaaggcatagatcatggtccggtgcttggctgggacaacctcagcaaacatgggaccatttgcagcagaaccattccaactaatggtcaatcccattaggaagagagtgatgcaaaaggtgtagtagctgctgagtgactgagggatcactttgagtaggaaccacgaaaaggggatgcccattatggcgctgaattgagcacacattatgcgccccgagcgggggtagacttgtgataatctgtctgctattattcctccaaggagagaccccatggcgcaaccaatagcaaataggctaagaagtgttgcagtactgttatgatcaaaacctgaaaaattcaaaaacagtcataacacaagtaaaaaagagtaattgtaattgaatcttaaaaagagttttctctaccaattagttcaaaccacatggtgaagaacaccatggcagtccatggtaacgagccaacaacaccctgcaacacgattatctgaaatgtctgtactttaacaacagctttcattgctgtccaggactcaacccaaactgatgtaacactagcattgcctttctctaccaactcaaccctgcaacaaacaaaaagaaagtaactcgaatcgcttaaaacataataagagagtctaaaaggagaaatctttgtaactagtttgacaatttacttctcagaggcaacaatagtactagtttttcttggatcaacaacaaacaagagcacaagaagtccaatcaaagaactcaaagttgccatcataatgaaagcgaagcgccatccaggcatgcccccatattgctgaccagccataatggtagccacaacaccacctccaatgccaccaaaagtaccaacaaggttaaccaatccaaaaccagttcctctaacaccatccttataactatcagctataaaagactgaagtgctggtatgacaatagccaaaccgaaaccattcactgctctccaaaaggcaacttgcataaaccgttggcttactcctaccgcggcggttgatatagcccaacagaaagttcccattgctagaatcacagggcggtcatagttaataactagaacaccagctagaggtgatgctattccttgaacaaagtttcttatgaaggtaagataacccaaatcagatggccctgcattgaaagcttcactcacttctttgtaaactgatgggagaagattttcatctgctctttccattatagcagccatgtttatgagaatgagagagagagagaccccataaattctccttgttctgagaagaaagaaatcaaattcaactactataagggaaaatatgaggctacacattatagcttaagaaaaactattatcacaattgagatttcttttgaacctttttgaaaattcttcctattttgaaatgtgggaaagctatctaataataaacttatttctcaaacaacaaaactcatgtgaatatattcagagactataaaaaagctatagtaagagattgcttaacagtttaaacggttgagtgaatctgtataatatatatttatagaaagaaattcaaagaatccattactatatcaaacagcacccaaagcattaaatttataaaccgaaagcaaaataagcaacatcagacaaacccattgactaattaatcaatatatacacataaatatgatggtaggactcacttcatggtttccaaagttatgggaagaaggtttttgaatcgaaaagcaggagcagagaatctggaagatcttttatggcccataaacgaaaaaacagaagatcccacaaacagtaacaatcctcaaaaagccgaaggcaaagaaaactggtttgcatctatggcggatctgagcttctcatttgccgtgtcaataaaaactctgactttccacggacccatcaggaatttcaccaaaagaaattaaatctgaaacattattaataaaaatttaatttttttatgtaatattttcgatgtattcaatcatattttatagtaacaaaaacaaaacatgaaatcataagaaagactcctttgtttgtgtctgaatctgtaataactatatattatccatataataaccgaagtagtacttataataacgagataattaatgtcactaattttttaactattcattattcattatttaatttattaatttgttttagggtcaaaaattagatgaatggttacctcattttttatttgtttatttattaataatggcattagtgtccaaaccttatttgttccatgaaattacaagtgatggcgggaaacgtggggataaacacttcaactaaaacattttttattttattttcaaaatatcttttttaaaaaaagaaatatatatatatatatactagcaaaaattacgtgcgagacacgtatact

SEQ ID NO: 299278 - DNA, 2590 bp, Cannabis indica
tgaaggcttcaggaaaattacactttcattcagagaaaaacctgagccttttctttctaaaaccctagccgccactttaaactctcttcttccctcttcaattttcgaaccacttagtgattagagtagtgcccacacacagcaagtgatacctcaatcatagaacggaaggagacatttaattccactgcacccaatataaggtttctaatactttatatgtgtttatttcgtaatcgttttagaagttcttatttagggtgttaatcaacatacttgtgagtagatctaagatcctggtaaaataatttccaacactgcattccaggtatgagggaacctcaatccatccatcctctaacatcaaatgtataattcttgactttagagttaaagtgttgggtgatctttccttggtacattttaagctaatcctgtgactattcccggagttgctcgattaggtcaaacgattccttcagtagggagcgcttctgggaagggtcataggtatctcgtcaacgagagggaatcatggcctctatttggattactgcgtcacacccataatccattgcatatggcatgtgtcgcgttaaagttctctctgtggtcttataggcccaaagaacttgcggaagaacttctggctaatgagccttgtatgcctggagtgatttcttcaacgttgttttcaaaattttgtttatggctatcacttgtcaatttttttgcaattgggctacagctaagatatttttcacgattccatgttgggcacagaagtcaatgaagtatttgctgtcaaaatattttttgttatcggagacaatgttgtatggaagttcgtaacgacacacgatgttcttaataacaaagtctagggccttttttgagatgatggtattcatcagctttgcctcaacccacatagtaaagtaatcaaccgcaactattgcatatttgattccgccttttcccatggaggggatcctactaaatcgacaccccaaactgaaaaaggccatgggctactcatgaatgtgatttcagttggcggtggacgtggaaccttagcatacctctcacattgttcacattttaagacatactctatgcaatccttattaattatgggccaaaagtacccttggggaaggaatttcattgataagttgggtccagatgtatgatcaccacagaagccagcatgaatctcattgattacgaccctgatttcagttccagcaatgcacctcaaatattccattgacagtccccagcagtaaagcttcccatccatgatcacataatggggagcctgatgctagacatttctggacggagctttatctatgagaagctctcccaaactcaaaaagttgtaaatgggttccatccaagaataagaatcgtcgacagttgcattcacccccagacctcaaagcttggcttttctaggtgacccatttgaactactccatgttgaatgatctcaggatcagttgtatgtttggtgagcatatctgcaaatgaattatcttgggatcagttgtaggtttcttccaactttgatgtatcattgatgcttaattcctctacctcctcctttctttctaaagttctttccatcccaaccctaggatctaactcgcctttaaaatcctccccaatggcctcaattttcatgtaagcctccatccgagagtaatggctgcctcttcccagaccatgaacacaccccgtgtcgagaaattgtaacaattccttgcacttttttgatcacctttaaacttgccaatacatccaagatagcaagggaacttcatgaatagatgcctgatagaagttattgccccacaatctactagggttggtcgacctagcattgcgttgtatgttgttaggcaatccaccaccacaaaagtagagttcttaaaagtacttgcattgttttctcctttcagggtgatcgacaactgtattttgcccataggcttaaggtgtctctgttgaaaccttgcaacttaattgggcaaggagtcaagtaatcttttatgagccctattgcctagaacgtgaatttgaaaaggatatttactgagcttccattgtcaactaggattttcaaaacttgtttatttgtgatctttgctttgattactaagggtttgttgtgggggaaacgcatatttctagcataatccttggtgaaggtgatgagcagattcatcatcatgggacgttgtgttggagactgaaccaacgcacacatttcagcttcttctacttctctaaagtatcacttttataagttttttgtgcttcctgtaagaggttttccacctgagattgtggccacatgtccattcattggaggcagagcgagtccaggaggatatggcattctaggtcccgcagcgagtaacactactccatcttgcgctggcaaagtagggagtgcaggcagttgtgatctaggagcttgagaaaaacctaccccttgtggggggattgatggcgtggatgttggatattatattaccaagatcttagatctactcacaagtatgttgtttaacacccaaaa

SEQ ID NO: 299279 - DNA, 7002 bp, Cannabis indica
aaataactaagctaacaggaacaaaaacaactcaatcttttcttagataaagaaaagaagattgacataaacatttaaagaaatgaaaagaacagcaggagcgccaaagactgaaattatgaacaacaacaacctatctcatcaaaatattctctcgaagtctatgacagggcatacaaaatccatagttatgactaatataaatagtgcttgatcaaatcaatgagttcccatcaaccataaaaaataatgaaaaaactgagaagtatttgttaagaacttctaatgatgaatacagaaaactaaagtcaaaccttaaagactggagcctccatgtcttcaatttttatgcattgggtgttctgatccttcataggaccaaaaagttgggccctgaatacaggtgatcgagctgctagtactaacttgtgagctgaaaatttttctccatctacatcgaaagtaacatcagttcccttcccactttccagtaattgcccaaaatgttgaccaatgttgggtggtggtactgctatggagtagatcttaggtccttccgtttgtgacttcacaacaccaacaatacagtttacagatagacaatcatctttaagatagtctgaagtctctaaggcagttcttttaaagaaacgcttataacccctgcagcatccaaaaaaacccatcaaaattgtattcccaattccactctttagccccatgattgggttttgagatgtgggttcttgcaagctcttaggctttaccaaaaaaaaaaatgaattctcaattcatcataacaataaaccaagtattggcaacactgaagagggaaaagctagaagccaaagggaatatagcaagtgcaatggggaatctagcaaactaatgtattaattagcgattaaatctagattagtttttagctttgctataacatttgtttcaacttcatgttctgacattgggatgacaacagcttataaattgctgatgacttgtactacgagatcagtttttgacgaatacgaagctgttttcttcagttttctaatcttctctctgttttgcttctttctctttacatcataaactagatgataatcaatattataaccaaacaagaaagaagaacactcagatcaaagtcagactaggaaatctatcattattttagaatcaagccagcaaagcgttgaagaaaaccaaaagttcgcaattaaaaccttaaaaaagaaaattttcaagcaattgcaaatttgcaattaaaaacacccagaaaagttatgctctcaccacatgctgccgcggtacttgagcgtataaggcccactctccaacatcctcccgaaatggctatgcaccttgtgtctatcctttccactctgatccataagtgtcaattcaaacaacgccctcacatcagttccttcgctagcgagcgcgataaacaacgacacatacgttgcattggcctcggcactttttccatcagggtaaaagtaaattgcccacgagtacccaccgacattaaaaagatcagaagcttccccatccaagacccttcgaaagagaatacccattgatcttgaaatggtgagtaccattcacggtctcggtgatggaagtcgaggtagtagtcgccggaggagaagccgcggcagatgaagaagacgacgatgagggcttaccggtttcacggagcaccttacccatgcccagtccgaggaaagaaaggaagaaaacaagaaagagacacacgtaaacaagacttcccaaaatagaaattgggatctagggtttacagaatacgaaatgtgaaattggggcttcgaatcaaaagaattaataaaattggaagcagaagaaaaatcgaattgtttaacaaggaagtgggattcgaagattcttttatcttaacgggaaaaagaggagttggtgagaaaatctagggttttgtttgggaaaggtgatgtgagttgtggaagatgaatatttgtaaacaaaatcccggtacagtgagaaaagagaattcgctgatgatgatgacttatatagagttttttttgataactacttatacgagttacgattttatttcaaaaaaaaaaaaaaaagagagaaagaaaaagagagagaaatgattatgtatttttttttttttaacatgtacgggggaccatcttgttcttgaatggttccttcaagaaatgatgagtgcacatatatatatatacatagtgaggataaatgctaaaagcaaatagtggtgtctagcaccctcttatatgtcaatatggatattgtttcaattaactatcgggtcctattatagagcattgctataaggcaccagtggtgcctagtactttctcgacatgtcacgttgcgattagttagcgatactctataaaaactattatattaaattatatgagacctgatacttaattgtaccaatagcgatattgacacataggagagtgctagacactactggtgcttttagcatttctctataatttaatataatagagtatcgctagccaatcgtaacgcgacatgtcgcaaaaatattaggtaccactaatacttaatagcaatgcaatgtcaatcccactcgccaacacatttaaaaatggtgtactcgctacactacaaagccacgtttcctatgactattttatatggacaaagtactaggttttttaccgtctaaatttttttaggctgttaatcttttttacaaaattattaatagcatgaaaaattacagttacaactgtattttttagttatgtaattgaaaaaaaataaaaatacatttgcagttgcagttgctactgtcaaatttcattttttaatttttaggcaatgttataatttttttctttaagaacacataagaaaaatttaagagtaaaggattaaatgttttttaaaaaataaaaaacaaactattattaaagacttaaagtactttctctaaaatatatagaaaactcttaaaagtttaatagctagtgtactataagtctataagtaaagtagaaatataattttgccaattgtgaactaatttttttatctttactgcaacttagtttcttaattttttatcttttatatataaatatatgtaatacatttttatatgagttgaacatcattcttaatataaattgtttgtataagaatttaataatttataataattttgtttaaataatattatctttaaaataaagaaatgcttggaacattaagataaagaaaaaaaaatagaaatgcaaaagaaacattagaattaagtaattattattaaatttaatattttttaatatattattattaaatttaatattttttaatatattattttaataaaatatatataaaagtatatagtaataacttaaaatagttaaaaaaaacttaaaactaataaaagttctcacggaccaaccactgtgacaagtgctattaaaacctgatgcattaggaaattaataaaatggtcgattgagttgggacagtttgaaattacctaccattctagggtcaccatcaagggtcaggctttagccgacttcttggtggaaggaataaacttaggagaagactaggaaatgatcacgatgtatggaaactattcgtggatggggcttcaaatgagaacggttcggggcaggggtaataatggtgtcgcttgaaaattttcaagtttcattatgcactaagattctaatttgatgtgtcaaaaatgagacagaatatgaaactttgttggcaggattacggatcgcagaaaccttaaaagccaagtcagtccaatgttttaatgattcatagttggtcgtaaatcaagtattgggtgaatactaggcaaaatgcacaaagatggccaaaagaagtttggaagaacttggaaaagtttgattactttaaaattgaacaagtttcaagagaacgaaactctaatgttgatgccttagcaaaattggcattacagtttgacttagacaatttaaatttggttccagtagaagtgttaagcgagccaagtatatgcaaaattgaaaagcaagatgtagaaataatagatgtgagtcccacgtggatgacccctattgtcaaatacttactgaatagatagcttatagtagacaaaactaaagcacacaaactcttatacacaatcccaagatacacactagttgatggtaaacattacagaaaaagatattctatacttttactgcgatttgtacctctctcagaagccaatgatactatcagagaaattcacgaggacttctgcaaagatcatgcaagatggcaaaatttgtccaaaaattgtttgaaccttatttttcacattctaatttttttaaaaatttataaataattctaaataacacaacttacctagtcatgaaaaacaattaaacttaaaaactcctttaaataatctttccaaataccattttaaaagaggtgtactagatatatttcgtaaatttctggttccaccatgtaagtgctcttccgattaatcaaatatatacaaacaatgcatatttaccaatcaaactcaagaagagttgtccttctctaaaaaataaaaaatcaagaaatgttcaaaaaaaaataaaaaataaataaataaagggggaaagtctagtatttttgtaaaaaaaattatatttaatgagaaaattgcattgtataattattttactttatttattttaatttttacctctattttgatattctttaatatatattattttataaatgatattcttattatagcttaatgtaaaatttaaatgaaaaataaaagtatattggataatccaactaaaaaaataagtatattttaataaaatataatacgaaaatatttttaattaatagataaaacaaaatatctatcaacttaaattaacctaatactagtttaacatagtagtaaacaccaatagtgtttttgatcatttctctctattcaattccaatgtatataagttatggatcatatcatatggtcttatagtcgtaatttgaccacaaaattcatctgacaatagtttgtacatgtcattggcaaatcaggacatttacaccacctttgaccctcaatgtccccttaaattgttttctatatacatttatgccaaggttcattttccaagtgaatttccacttttggggtccgatatatgatagccatagtcattggagaaaagggtatgttggttttttccatagcaataattttacaagtggttgaaatcttgaatggtgttaggagtgaggcattgagttatcaaaagaaaaacaagagccgtgaattaattttagacattgactgcataagagaatagtaaataagtttgactaattgagaagagaagactaccaaagtagtaggctgctctataaatttaatggtcacagaggcaactgttcaagacattaaaaatgtaacaataagtttgaatctttaatataagagaatcttcaaattgattggagtgataaaaaaagtagtgtattattatagtggggacttatacaatttctcaaataggacaatttttttttacctcttgtcaattttttcaagttagatgtatattttaatagtttttcttatttttaaaataatattatttttttgaaaataatatttagaggtaataatgtaaaatgatactatcaatattagaaccaaatgtttttctttttggacagattgtacttttttttgcttacattaacataatactttttttattaatttaaaatctgctctttataataattagtttctttcatcttcttttcttatattttttttatgctctcttttgaggcattcttcattaaaaaataataaattaatgaaatatttgtgcaataaaaatacttaatatttataatttatagtgatttagtattaggagtgcacatttatactcgaaacttgaaactcacccaaaatctacctgactcgaaacccagaaaacctcaagaaaaaaaatgggtttcaattttagtatattgagttcaggtgtagcctagttttgtactggggttgggtgtaacccgattctgtaccgggccgggttcaaatttaatattttttaaaaactcaaaacctgaaacccgattagcatttttattttttattttttatgtatatatattatataattatattatatatttcattttttattgtgaatttgtaattgtgtattaaattgttaatgtgttagcttatgaatatgtatatataataataatatgttgtataattgtattattttgtagttttttttttttgttaaaaaagtgatattaaaaaaaaagcctagcctaacccgaaatccaacccaacccacccaaactcgtcccaatcggacccaaaacctgaaacactcgatctccatatgggcgagtttggtcccaaaacaagatttcaaacccaaacctgagaaactcaaactcaaaaattcaaaactcattaaaatccacttgatgtgcacccttatttagtaccttattttttttttctttttcacgacgaacttacctaatattatgtatatttttgggtataagttactattcactctaataaagataatacatgttgttaggaatttatttatataaaagtcatatatatatatataaatgggtattaagttatcgtataaatgaattaaatttatgttgcttattttgtaataaaatttataacttaagaacattattgttatgattttaatatgtggataccacaagtataatttctaatttacttaggagctaaattagaaatagtcaataaatattcgtaactgtttagacaattattaatgtaataggtgatattccacaatttgcagtactttcatgtaacatcctaactagcataggcgtattacgtgatttttaaacatactgtgcagctcgttgctaatc

SEQ ID NO: 299280 - DNA, 2674 bp, Cannabis indica
atagtttaatagcttcaaggtccaaaattcgaactcatgtcctctccatttttcctatccctccctcaccactaagctaaccttagtgggttaagttgtagtgtatattgacaactatatatagtgattgtctaagtcagcaagttttattttttcctaaattataaaaataaaaaattatcattaaatagacacatgcagatcgatcgaatcgtatatatatattgatgtaataatatatttctcaatcacgtaacttctaaagttttatttttttttgaaagaaaacgtttataaatagaaattagacctcacggtcgttacacagaatattgttcgggatagacgattcactcaacctaccaaaccggtagttcgtgaacgcctatttggccacattatgagccataaagttacaacatctactaacaaaagaaaaattacaaccatcaaataaccgagagagtttaacacaaaaattagagtagttttcaatttcccaacgaacatctaacccgttaattgaattgatgaccactctagaatcactctctataataatatacttccagccttcctcttttgccacttccaaagccaagcaacaagtagccgcctcgccacaaagagcatcagagaagtgcaatctattagtctgaattctacccacccttcccagatggttccttgccacgacagctacacacatgctatccagaccaactttaacttcacaatttagcttaatccaaccaagagggggaggattccagacagccacatcagacggggaagaagctggtaaaagcgaaggtctgtaatctgcataagagttgaaaatatagtcaacacactgagacatattggacattcgtttattatgtaccttgtccagaatagcccaattgcaggaaagaaataagtgttccagtgtttcctcactgctcccacataaagggcatgatacatcctcaatgtgaaatcgcttggccagaatagcccgaactgggatagcctttgaaagaatgctccaccacatcattttgtggtgctctagaattttactattccacatcttgttccagagagccggagccacgtcaacatgcggcattctatcacacgcttggattaaataagcagatttacaagagaatcgaccattactctccttcgtccaaatctacctatccgctccctgagtcgttggtttacccccttttaggatagccaccaccgtctctttctcaaacaaaagatttaatttctgggtatcccaatccccatcatcagacatgaggtcagagactttactaaggtgcgccgggccatctcctctcgccttggggaaaagtccctaccgtgaggtatccaagggtcttcccaaattcttgtgttcttcccatcccaaataactttacaagcccctttatgcagatagccttggttttaaccacatttttccaaaactaagagtcagtgtctttatacctgcaagataagaaatctttccctctaagatacttagcttccaatatcttacagcagagggactgaccaccatttaatagattccacccccacttagtcagaaacactaggttcatttccttagttttctgaaatcccatccccccacgagatttgggaaggcacaatttgtcccaagccttaagatgcaagccatggttacctttctcgaaaccccaccagaattcacgaaccataccgtctattttgtgcatgagacgattcggtagttttgtggtttgcatggcataacacggcatggctagacccacagatttaataagagttgcctgaccagcttttgagagggatttagctttcgagccttgcagcttcgaagtcaggttatccaatataaaattataatctgcatccttttgtctggacctaaagaggggaaggcctaggtactttgtattagtaacaatgtcaccaatacccaggtttaatttaatgtcagtttggacctgatcaggcgtgtttttactaaagaagatagacgtttttaacatgttgacacgctgacctgaccacgaacagaattcttccagacaattccacactcccctggcttcttgcacattagccctaccaaccaaaataaggtcatccgcaaagaatatatgagagaggaccggacctttttggctcagcctgattcctttgataactcccttccccaatgcctcattcaacacacaggagagcaattcagccgcccaaatgaaaagataaggagagagtgggtcaccctggcgcaagccacacgagggcttaatcttcccaacttgacccccattaagacaaacattgagggtagtggtagtaatacattggtccacccagttgcagaaacgtgttgggatatcatagcactcaagcacatgtctaatgaactgccaactcagcatatcataagctttcatcaggtcaattttaatagcgaacaagccttctttgcccttcttgcggttaaaggtgtggatgatttcttgaacaataacattgttatcttggatgcttctgccaggcacaaacgccgcttgagttgggcagatcaatctaggaaggataggcttgattttattagctaggatttttgaaatgaccttacacgtaacatgttgtgaaaattatattgatt

SEQ ID NO: 299281 - DNA, 2306 bp, Cannabis indica
aactccacagttaagcatgcttaacctggagtaatttcaagatgggtgacctcctagaaagttttcctaagaagtgtgcgagtgaggacaaagcatgctggaaacacttgtatttgtttgtagggtcagtcgtcattctatgaagcagccaaaatgacatactcgtgtataagagtcatcattccatgagtgtaagggcccaatgaaagcttaaaacagggatgttacaaacagtatcaaagctttgacccagccagaagtgtggtcgacaaggacgttggacccccaaaagggagtgattgtgacagtcaaagccctgtgatctgaagggggaagactgggagctatgcaatctcacatcgcttggggaatgtcatgtgtgatgattctgagactatgtaggtatgggactagatagttgaagatgacttaaatagattgattggtactacttataacaacaaggtgtatcttttttttggtagtctatcacgaaataactccacagttaagtgtgcttaacctagagcaatttcaggtgacctcctaggaagtttaatttcccaagaagtgtgcgaggataaagcatgctgaaaacacgtgtattggccggtttatagggtcaatccgatgttgtttccggaatagtcttcggagcttcgatagccacaggatcggtggaagccattgatgacgttagtaagcagcaactgataccatgaagaaattgagaaagagaaacagaaaatttctgtaaaaacctaaaaatgatgatagtttaataaagcttaatcaccaatttatgaataactattatttatatagtcggtgttgcataggcaaaatgcagttgtataaaaaagagtattaactactcttataataaaaacaagaaactaaactaactatttaactgaatcagttagaggtaatctttacactattaattaccactatatattgctgatcattcattcattcaatcttttccagaatctgtaaattgtttgtgttggaccaccactactacgtactgtctttatatatatttaccagggtggtgtatataaatttactaattatatatgagatctagtactgacaaaacaaacctagctataaataagctagcttttttgaaaattcaaaacggaaccatatgattatgaaactacgtacgtacacaattaataatataaagacatacatatatgtagtacgtacatatagctactattctatacgtgttactacttccagttttcacatgtagactatagttcactaattaatttattaattctgtgtagcaggcttttataataatgaattaatacatataacactgtatatatatttctcttttaatatcaatcaatgattcactcttcatgatatttgaaacggccttttctttatctatatatctcattactgttgcaaaatacatggttacatgttctagctatgaattaagaagagtagtatatatatatatataccagttaattattaaaaacattaaataaaatattatcaacaaatgtcctgtcatattaatttgagagagtggtcattcctatatttaattggaagtgagaaactatatatatatatataatatatatatatttatatatatatgtttattagtcaatctcaagaaggagaccaacactgagtatgtacccatttttatcgcttatatataggatccagagtagaatggtacgtacattttgtattttttggaaagattaattaattgctacccacacacaaattaggaccactcaatggactagctatagagttactataaatatatataactttcttattactagattttattataagttcgattactacaatttgtaacaaatagttaattgtatttatcatacataattgttttcacgcatacaataactgcttaaatagtttaaaacagaagatacatataaaaataaataacacattaaattatatgcgtatcaacaatctgcaaagatttattaatctataagacttatttaaacgattacaaaaccattgtaatcttaaacttctaatttaaagttgtgaagcattaagatcttgaacacaatgcctacactttttctatcgaaaagtatctcacaaataaaatttctcctgcaacttgatgaccatgtccatgtaccactacaagaaatgtcacttttaccagtgtgctagaaaaagtaacttttaccagcgcatttcgcaaactgtgttggtaaagaggtcaaaattttactagcgtacatttacagtggctaaaa

SEQ ID NO: 299282 - DNA, 3432 bp, Cannabis indica
attatttatatatgtatgtatgtcatgtgtatatatggaatattttttttttcaaaaaaagaaaagaaattaagaaaagaaaagtctatagcagacaaaactgattagtatattatatttgtaaagaaaataaaatgtaagaatttcctattctaacttattatataaatgactattttttgaagtagctatcatgaaataaaagaaaaatctcttgaatcattttgagctatacaatatgaaacaagtcattgtacctactcaataatgcagccattgaataggtcaatttgcacaagtagccggctctaaaatcattttcaagctacatatatatacattatacacacaagtactatccatttgccaaattactaagggccttaaataaattatccaaagattataatactcttgttcaccggcctttaataaaatttcttctcctctatgatcaatctattttgttgataatataaaccaaaatcttccttttcacgttttgcttgcttgctctttagactttaggtctctcttctgttagagagtgaaaatcacatgaaataaaaagagctttattattataattattattaaagatcaataaacacacaccactactttcacaactaagtgtagcaaagatatcatgagtcacagaaaggtttattcacaaggaagcatacccttctcatgggaggacaagccaggtatctcaaaagtggctcatcaaaaccctcgagtacaagccctagacttaacatcttcaccatcaccatcaccatcaatctccaatactaacaatgatctggtaaagctaaagattcctctgcctccatgcccaacaccatctcagcctccaagcaggagtaactctgccaagggactaaagtggcaagaggatccatttcttttggcttacaaagagtgcaccaaacctcagaaaaagggtaataacaagaaagcctccaaagtaaggaaaactatgtttatgtatttttcttgcaagagttcttgtgatgttaggaatgaaaattttgtcaagcttcctactcttcctacacataagcttcaaaatgttgtgatggaaaattggtgaggtaaattatatattcattacctcgaaagaaaaaacagaacatatatagcagagttaattaccttattattaaaaaaattactttgtgatcagttgttgtgacaatttattactaccttgtatccgtgtttagtatcttcgtaaaaacaccactcattaacttaaatatatattattcttttgctactacgatctgtgtttgtttcataattatattttatgacagtattttccttttttccgtgtgtacttttatattatagaattacaatctcatcaacatttttttgagtactctaataaaaaagcaaaagcagtaaatagagtgacgaagagaaaactaaaactgaatataattcggttgccacacaatgagtacgtgcaagaattttatagagagttaatatttctaatttaagagtgtactatcaaatatcaaataattgtttaaaataaataaactcctgatcaagtattaatgaacaggaagaaaagtatcatagagcagattaattagcctcaactttgttgattttatttattttttttaattgtagttttttatatacaaaaatatcttctgttcctgtagaattgggcatgcagcccgagtaaggtgatatatcttaagtggttggaggcttacagctccccagcttttaatttgtaagcctccacttactcacatgtgtcacgtgattgtttaattttattggagtaaatttatagtacatcttatactttacatttttcattatttttggcatctaaaaaagttgtttagtttaatttgtttttcattataatgtatgttatagttaaggattattgtattttttttaaaaaaaataagaataattatgcgtaaactatgattcaacataatgttttaaaagttacaagtattcatcaatagctacaaacatatacgattatctaaagaaaaaaaatactaagtacttggacactctaaaaaaagggtgtagtatattcatatatattaattaagaaattaatacgaaagggcccactcgaccaccccaaagaaaataaaaaattacaaactttatgagtatttatacaatttttgaaaaaatatgattttttatgaaaaaataaataaaaataaaaaatatgacaaaaacaagtaagataaggtaattagttaccttatactgtgttaccgtataaaacatgtttttgaacaaaattcttgcaaatttgtacattttaaaacaataaaaaagaaaatgacaaaatagaaatttgtattagagttgttagtattgtccatagggttagttaaagttagttacaagtatgttaggaatgattgttattctttcggctgtattcttaactgtttacaccaagagtagcctgatgatgtggacatcaatgtttgacacgtagcaagaaaaatgacatctcggagtagagtagtcccaagtcatagcaggtcgatctgggaggagtccctagccctatgcccaggttgacttctagaacttcggaatggaagttcggacttcaataacttgaatccaacttactatctttcagtattctgtaccatgaagacatggagcaacctaatacaagccccaagagctgaaattacatgagccttcaacctaaagccaacttgggcacctagggtttcactcggggcgcaagttgacattcccaactagggtttttggcttataggaccatcttagtacaaaagggtcaaaacttacattgagacatcaactagacataccactgacatatctgagacattaaaataagaatcgaatcaagttcatttttgagcacctagggccccgggaccctgagcacccagcgcctaggttggaaatttgtcaatcttggcaccttccaagtatcaaatcggagatctgacttttttatcttcttcgtcttcatcaaaaatatatagagaaataggtcctttcagagaagaaacaacatttcttaggtgctaaaagcatggcctagtgctcaggttgacacctggggctagccctgaacccaggttgacattttatcaacctaggcaattttttatggtgttttccgagatttttttagatcatcttctccattttcaaaaaatattagatttaactatttctagggactaaacagaatttccaaagggattcaacacccccttaaacttgatttgtgactccaataatacttcgtagtttgatgaatgtttctctcttgagttgcttcgtaaaaatgtctgctgcttgatcttgagatttgacacattccacttttacttcttttcttccaatgcattctcttatgtaatgata

SEQ ID NO: 299283 - DNA, 1818 bp, Cannabis indica
aaattaatgtgtagcccaacaagtcatttttttatgaccaaagaagaaggtggaattattgtggataccattaaataatggaaaaaaagtaatatttaacaatctatatattatctctatatttttatgaaacaagtctaaaaaagaaataagttacaagcaaccttaaaatgaatacactccattaataggtggaaatcattattaaacatatatgagaaatgattaagttaggtgtagatatcaaaaacatccaagtagatatattaaaatattcaaatatatatatttatagataacaatgtacgtgagagagtatacaaagatgtgggaagaaaaaacagaggataatataaacaaatagaagtgacccctcttagaatgatggatataggactcaaaacttggtataataagttattgctctttttctttctctcagctgtggagctttattcattttccacctaaattcgagagaaatacatgggtactttaaagtcttaaataatataagaattttttacagttaaattctcttaattattattttacttgtgcttaattctttacggtaaaatttttcaaattactgaactggtatagtaaatttaaagtaccatctacttttcacagttaactgctaatataaatagtttatgtgtacacttttgtattatattggtacaccaagtattattatttaaaaattataaaatttataatattttttatttttttaatattttatattttattttctataattttatttaattcaaaataaattttgaaaataatttttaaataataatattaggtgtcccaatataaatgtatgtgtacaaaagtgtatacataagcagttcatatatagtgatacttaatcggatgacactttaaatttgttattaattagtagtttagagaatgacaaaatttaaacttagaggatataaatacaattaaaacaacagtaaaaataatttaattaccaaaaactcataatatataaggtgatttgattactatatattattagtataattaattaaaatatcacattaattacataaataatatataaataattactaacagattatattcaccaattaattaatatggttactatggtattaggcacctgaaagctgcctaataagaatgctgaaacatgaataatagtttgtatggtggactgtctctatttttctgcaatctgcacatgaccactagacccctctaacatgcccacatatttattatattttcttaacattttcttattcacctgtcttataggcacagctcttgtgacccaaaaaaaaaacacccttaattaggcagtgtgtatatttgacttgtaagacagaaatttataataagctcccaatttataataataattaatgactaagtacttggatatatatattgaaagtttttgaatatttttatttttatgatatattgaaaccgtttgtattgtatgtataactttagtagtaatatgtcaattaataatgaccaatcctaatatcatgtatatatatagatcccaacttgataacactgataaatttgaaagaaaaaaagggggtcaaatttcgtatgtgtacatacaaagaggtaaaacccgttacttgagaattgagatatatgaaagccccaactattatttaagccatatatataggtagttggcagggccggcactaggcataggcgggctaggcccgtgcctagggcccacacttttcgggagcctaaaataaaaaaataaaaaaaattattaagcttttatttaagtaaatt

SEQ ID NO: 299284 - DNA, 1049 bp, Cannabis indica
ctttcttctctaaatcacttttattttcaccatagaaatctagatgttagagaatttattttgagtggaattactactttaaataatgatgattttactttgttactatgtactttgtgtgctatttgggaaaatagaaataaaagcttttcaggagggttcatatgactgctgaggatttagtgaattggaccagcaattatttaatggattacaggaactcccagtccaagagaattgactatacaccaagttgacactcacacaatctagcagaacacaaccaggatgatgtaggatcttaccagttatacattgatacaactattaatgcagggaatggtaagatcgggcttggagcggtaatcaaggactggaatggtaatgtaatagctggtctttcagcgcctatagcaacttaggccacttcttctacgacagaggctttggctctaaggttggctctaacctggtgcggcaatataagaataccccttgctaacattctcactgattccaagcagctggtaagcaaagtgaagagcacaaagaaagacctctcagctcttgcagacattgttgaagacattaaaagctccttgtcttctttccctaatgtttctttaaattatttgccaagatcttgtaatatgcatgcccatcatatggcaaagaaagctttagggctagatagggaattagtctagaaagattcttctccaaatttgaacactgtaactgcttgagcttattgttgtatcttttgggttactctcgtcaaaaaaacaaaaataaaaacaaaatttatcttacacatttgaatatgtaattaactgataattaagttattgtttaatgaatttattgtaaatttgtaactagctgtaaatgagtatgtgatttcgcaacctttcaaaatcttgttacatttcaaaattcatcaatttcactgatttctatattttcttttggcaatgatttcttttttaaatgacataatcttaagatcatttagtagagctgctactatattactttttttttttttt

SEQ ID NO: 299285 - DNA, 2787 bp, Cannabis indica
ttaagtaattttcttctaaatttagaaaaaaaaaaaactgaaaaaataaaatattaatttttttatgtggcaaaaagataatatgaataataatagtgtaaaagggtcatttctttataagttttgaaatgtggatatttacctacatagtattatgatttgaggtcatttggtataatttttctaaaatcttttgctaatttttgtgattaaatgtcaacttttagttaaatttaaaattataagatagtatttaatgaagccaattttatctaaaaatatatacaaattttaattaattttgttatagtaaaaaaaattattgtaactaaaaaggcactcacacgtcacaataaattgtaatctttatgttattgatatttttatgacatcctattcatttgttaaactataattttgtaaaacctattaaaaaaaataaatcaaaaaattctaatatatgcaagataactaaatagattcaacatatacaaaatgaaggatcgatattatgcgcctccaactattgatgcatataacttcctctaacatgtagatcttaaaatctgcaaaataagagagaaaagaattagcggggtagatcttttaagctctcactagctctctttgatggtgattgatagaataaatatgattagaggagtttgggaccaatatctaatatttatattggcattaaagtctctgccacatataattgtaagaatattttgacaattaaattaaaaaataaattgtattattaatatcatgatgaccattaatcagtaatgttttttttaccaaaaatataatattaattttgatatactaaatcaattaattacaattaattgattatatatcatgtgaataaaatattcaaatcactaaatactattgggtatatataaaatatattaatgtcaatcaagacaaaatttgttagacacttattgacgcaatttttcgtcaaccagaagatcgtaacaaaaagcagattggactgagaccatggttattagaaataaactgtaaaaaaatgacgtaacgacttctggtatttcactccatatatcacaattataatggagctatgtctacttattattttagtaatcagaactcaaacacactatagtcttgttctcaagaatgtgcttgagtgaattacaatacacaagatctacaataaaatctctataagtgcttctatttgactggttttagaagacaatgtcaacgaattcatgttcttttatggtgagattagactgaatgatatgagaaaaatgtttagtgtttttggaaaaattgttctaagtgaaaagaaccaatagatagagattcgaaaagttgtaaatgaggtaatgaaacagagatcaaaaacaagtcaaagaggttctattcagttgagggtccctttccctaggtccaacatgatgcttatacaggcctagagtttgcaacccattcccccacaattcaaagaaatgttaaaaatatctcacactttcacatttaataataaagaaaaaaatattcaaatctaatatcttgcatattttcaatgatatttatgctttgaaactcttctagaagcttttccttcgagagtcaaattgaggaagtgttaaagtggcttctacgttaaagaatggcatgatgggtgagtagtaacaccaaaggaaggtcaataatcatgtagggcaatgcttggatgagtattttccctaaaaaggtgtcaatacctgtgtaacaagcttcatgaggctcctctttggtaatactcaccatatgtgagtattgaccatgggattggtcaatactcatgtagctattgcagggggtgagcactgacactatttcatggtcagtactcacattgcttctcctcttggggattttgttgtctttgaaaattgtttgagaattggtagatatgttttagggttttgagcttggaaaccctaaggaatcatttgcccaaacgtttacatgagtactaaccatggaggaatggttagtacttgtgtaccacacaagtacttcttttagtggctcctatcattttttgagtgatcactgatgttgtagagaactatttctccaccattctcttgggatctttacctttggtgtgcactgaccattctccggtgtcagtattcgtgtgtttgggtgagtactacaacaatggtgtggtcagcactcatataacactctgtatggctatttcttgtaaaacttcaactttatgttcaagtcttagtgctcttgtacccaaataagttaagaacttgttagatttcttctcgaattagggttttggaaagaaaaatttatctcaaatttaatgagaatgccaaccctttatgccctaaataaaactgtttctatgtaatttcatttattatctaaataaagaaaacgaaaaataacttatgattacttaatatttaaattttattaaatttagatcatagagttattcacatttatagtgatgtcatcacagtagaatatatttgtgattatatgattcaaagtgttagtcccttggtttatgactgcatcaaatttacactaacgtaaaaatcagtgatgtggtctatttattgtaaggcaatgtgttatgtattttgtaacaccctaactagtctaggcatgttacgtgatttttaaacgtactgtgcagctcgttgctaatcaacgaggtttatggaaattgtgattaattaaaattttgctttttaattaaaacttatataatacatacaaaatatt

SEQ ID NO: 299286 - DNA, 2397 bp, Cannabis indica
tttttttagggtcttttgggtgtgattttttcattgtttagtgtcactacttcacccgccaaaatagggtttagtgtcttagtggacctcaaagggtttatcaaatcaagtttatttaaggttcttattgttataataaaaaatgattttgataaaattaaagaaaaaaaaagttatgggaagatgtgtggggcagtgccacgtgggacatagggccccacaaatgcccctttgaccaggtttgacttccttggccccactctttatgttcgagttccaatgagacacgagaggtggaattaggtggaagaataatggtgaattgaaacattggagatgtggggcccacaatctacaccttccattgctcgtatgacacgtgtcaagggtcccacaacttaaacttgtgaattttattttgaaagaaaaaattgagggtaaagattagcttgtgagttcataaataaaaagaaaaattgtgtttgatgatatcattttttatattttggaggaccacttttagatatcacaaacaaacccaacaaatttttgttaagttttggtagtaaggtgatataattggattggaagatttgttgtctttgttgtttttgtgatttgtttatgaatatttcaaagtttacctaagaaatggtgtgaaatttgattatatacaatgaaaacatgactaatttactttgttttgagttgaaactatgttgatagcttactccttattgtgtgaaattttgttagcaatattagtgaaactttaaacttatttcagataaaaaataaaactcataatatttacaaaaaccacatgaataatgttgtattaattttcattatcatatttcaaataaggttaattatttatcacaatcataatagaaacacaaaaattacatttctttttaaacaaataaaaattacactttctttttgaattcattagtcaactgaaccaagaattattacaacgaaatacagatgcctagcagcagaggaaagactcacattccatctagagaaactttaacgtctaaagctatcttaactaaacaatgagcgagaaggttcacatctctacgctcaaaacaaaactttacacaaccaaacttacaacacaaaaaaggaaattttagacaataaattatccatgtcattcaccctccagtcttgttaataattaagttaatagcattggaacaatcagaagccatcaacacatggtcattctagcgacactagcaagcttcggaccactctgaataacattaagctttacagtcaaaggactaaaaggcttcgagaaaaactcagaagatgcagcaagaacctggtcactgatgttacgaacaactgctcctgcattgcagctcctcaaagtttcactagctccatcatatggacattaaccttctaaacattctctagaggtggattctacttgtgtttagaactcaacttctcctctaggtgctttgatatttggaagtctcttaaaagggaagcaccccattccacaatggctctaggatccaaatagcagtcgtcataggtccaggaattcctttctttccagattttctaataaaggatagagaaaaagaaaaagtcttcagtgaaaagagtattcaaacaaacctccaagaattcacatagatttcttgttgttattccttttatgctcctccacaaattacttttctttcgaactgcaacaacctatggacacctctaaatggcatggataataccctctttaaagtttccatcacatctagaacacttcaggctattggtgactttcctacaaaacaaaatattgttaatgagaagccacgagtggctcgctttccataaaaagtatttaatcttttatagtaacttctagatacaattccaaaaggattctactctcttcacattagaggcttcaatgcgaaagactgagttagctatagttttatacccactcttcccactatactgttcatttgttgtataatgtcagaatatctcatcttttacctccttatcgttagtaggcactacatgaatcaaattcacaaaaaatttgctctaataaactcctcattccactcacactcccacttttttttagatcaatcacataaagatcaccggggatagatatattgtcaagaattctaaagctaatgggtcttggtaatcacgtatctgttgggttttgtgccctaaataaaactcatttcaatataattagatttactaagtagtaaagatcaaaaattgcattttatgttgtatggttcacatgatttgttttatgattatgattaatgtataaattatattaagtccagatcacatatataaatatatatatatttgtttatgattatagtg

SEQ ID NO: 299287 - DNA, 2252 bp, Cannabis indica
catgttattatttatattttaggatcttattttgttaataacccatattataatttgattcaactttatgaggatatttattataagttctaaactggataagggtgagaggatatttattcaaatatggatataggtgtaacctgccatacccatcatattaccatattaacacaatttggaaaataataataattataatatttattaatataatttggataataaaaattattttgtatttattatattattctaatttatcaaaaaaaaatttgacaattaaaaataatttttctttttgtaaatgaataattattaaatacccaacattaaataatttgacttttttctatttaatttatatcttgcattgaagcatattttttttaataattttttacacaaaatttacaaaacaaataactaaacgtatcatttaaataataattagagagtaaatatgatagaaaaaaatctatcaaatcaaatttttttatccacattaaatgtatatacaagtaatctatgaggtgtcatgtaataggaatacttcaggaaaaataggaagtaaacttgtgaaataatatatgattaattatgattaattttctcaaaaaaaaataataattatgattaattttctcaaaatgtatatacaagtaacaataatttaataaaaatatttatgtaaaatatattaataatcaaataagtttgatgtaatgaaaacaacccttatcaagttttagaggttttaatttttattttttattttaattttgtgggttgaatggaatacctagtccaatacaactttgatgtaatgaaaacaatttttattttattttatttttttgaaagcaatttttatcttatttttggtaagaaatgtaaaccgatcgtacttgtagtacaatagtacaaaattagtatgaaaaggaaaaataattctttagaattttctactcaaaattattattattatactaatttatcactacatatttaacttaaaggaaataaaatagtttgttgttactcaaaggaatatacttttaaatttagtcgcatagtgtaagataccaagcatattctaatcaaatttaaagaaaaaaagcagattctcatacataataaaatggaatattggcaacaaaattatctgaaatatacaagtttacaagttctcacacttaattctataaattgatttttttttttagacaaaaccctctaaacacacattttattttggtatctactcttccgtacccgaaatattagtgtcatggtagacgtgtcacagtgtatcctgatgtacatgtgataaatttttaatagtttgcacataatattaattatttaaatattataaaaaatatttaaaattttaaaaaataaaataaattacaaattttccttttttttattttcttcttcttctttctctctaaaaccatgtttctttctcctcctcctcctccttcttccaaaggacccctcccactctcacaacgctccctaaaaccttaatttaattttctaaaagtataaatccaaaacaagaatccctcccactctcatgattctccctctcgttttcttgattagtcccctcgtcccggagccaacatcgtccaacaagctaagccctagaatctctctccctctccttcactcacgattccctttctctcactcacagattctcaaatctcgagaaccctagatctcgagaacctcaatcgacagagaactctcacagaccccctcgtcctcgatctcactcaaacctactcacactctcactttctttcacactctctttatcttctattgttttttttctattttttaaatatggatcattattttttttagattggtagttgtgatagtggtgatagttgttgtggtggtgataatggtggtgcggtggtgataatagtggtgtgagtggtggttcgatggtgacgattgtgttggaatgtagatagtggtgtcatagtgtttttgctaagaagaagaagagtgagaagaaagaaaaataataaaagaatggaaaaagaaaaaaaaaataattgtttagttatttttaatttttttatatgatttttaaataattttaataatatttttgtaacgtccctgcttcaagtctctattgggcccttacacccacggaataatgactcttatacacgagtacgtcactttggctgtttcatggactgatgactgaccctaca

SEQ ID NO: 299288 - DNA, 3818 bp, Cannabis indica
tttccagccttgttgtttgttcttgcattcccagtcgagtactcgctattctaggttgaatactcgcaattgtcatttccctaaaaattctcttttatatcaattaaatagtattttttggtgttgcgaaattcactcgacaacaatgaatttgagaaggaaagaatggtcttattgtggatggcagaaggctttttggaagataaccaattagaaaagagattagaagaagttggtgaagtatattttgacaatctagtttcaaggtcattattccaaagatcaagtagagatgactccaaatttatcatgcatgatttggtgcatgacttagctatgtttgtctcaggagaattctgtatggcagtagaggacaataatagctcagagcttctctcgaataagattcgccatttatcacacacaacatcatctgttactaactgtgactcagttaggaacggtctatcaagagcactgaatttgcgtacatgggcagaactaagtacaataacatcacacaatgagatcactatagaattttttctagcaacaaaattcttaagagtactatctctgcttagtttttctatgccagccatgttgcctgattcaattagtaaacttaaacatttaaggtatctagacttatctcaaaatttgataatagagttaccttcatctatctgcatgctatataatttgcagacactgctactgtcatgttgcataagccttagaagattgccaaaggacttgggaagactaataaacttgcgtcatctcgacactattggctcgccactagaagaaatgcctccacatatgggtaatttgaagaagttgcaagtattacatgaatttgttttgggtaaaggacatgacaatgcttcaaccattagagagctgggagagcttcaccagttaagtggagaactttatattttgggtttgcaaaatgtagctaatgtaaatgatgctcttgaagctaatctgaggtataaggagaaacttactggcctaactttgtattggctgggtgagaccatggacacaagaagagaaagagaggtacttgaagcactgcaacctcacacaaacttgaagaaactcataatttattcgtatgccggttttagtttccctaattggattggagattcatcattttcaaatgtagtgtcaattcatctgagtcataataaatattgttggtccttgccatcactggggcagttaccttcacttcaaaagcttgagatccaaagctatcatggggtggagacaataggcgctgagttttattatggaaataacccgtccaataatttcagtccctagtaactttgatttttaatgacatattagcttggaaggagtggtctactgttggaggtgatgacagagatggtggggtacttagacttttcccttctctgaaaacgcttagcttaaatggttgcccaaacttgagtgggagcttacctgatctttacacattagaaagcctccatatttcaggtatatatggcagttattttccagaaccacgctcctactcaagtctcaacaagttgttgtgcaagaaactagaattcccagggagccattgttatgtttctgtgacagagttaagaattcaatactgtgactcggttaaatcattccctttagactacttcccaagtctgaagaagctgatctttttcgattgttcaagcttggaatcggttaccttttcagaagaaaatggcatttcagaccttcgttcgctcattgttttggaactttacaattgtagaaatgtcatggcattgcctcaacacatgcaaaagcttcttccatctcttactacattaaaaatctaccattgtcaagatataaagttatttcctcaagaaggattgccatctaatctaaaagagcttcatctctgcaattgcagccaactggtggcacaacacaaacattggggtctgcaaggactaagctctctcaacaaactaagcattggtaaaaataatgatgatgatgaagaattactcgaatcatttctggaggggttgcttcccatctctttaactgaattgtcattgagttatattccaaacttacgaaaacttaacgacaatgcctttcaacacgttgcatctcttcataagttgtcactgcaagttgcaagaatctgcaagttctgtcagagcaagtgttcatgggtacttctctacgctctttgttcatcagtggatgtcctattcttgaaaataggtaccaaccaaggagaggggaagattggcataagatttctcacattcctcacatatccattggtcactggtcaaggtcagtaataaatgaattctacttaatttgacacatttttcatgtaaagaacagtctctttttctagtataaattttgtgtttatgttaattttagaaaactaaactagctttcatattctaatacatattacaggatcgaagaataagatatatgaggagtactcaaggatggaatagagaccatcccatttgaatccatgcaaaacaaagtttgtccaatgtatttatgtggtgatgcagagctggttacaagagttgaatgcagtaataatagcttgcttattaataattttttggaaatataatgaacttttttactattgaatagccttagagaagatacagaagttaaaaaatttgtctctaatttctgccaatggacattggacactgtttcctgatactacttaccgagtgtcttgttcaatatagataccaagtcagcatacacaccagttacttcctaccaccatttttggtagtgaaaatctgtactttaattttcttattaagtaataagtaatattgcacccctttctacattaaactctttccttaaaatgctaagtttcagtaattctatttcaagagggagctacaggtcaagctctaatggtgggactcatacttggatagcagttgggcaaatgagaatatgagatggggcaacctgtcagaactttctattttgcaataagttaaatactgagaatatttatatatatgttttgtaaatatttgttgcaaggatagaggttcactgctaacaatacatagtaatgtttccatattactattgttagggactgctcttgttcttccatcaagagaagaataacataaaaactttatctttgtgatatctaatgtgtcaaataattaataacagagacatcttactcttatcaacagccaatcccagagttctctgtttatcaattacttgaaccaaatgaaaaccgaagtttccagcaaagatactagtgaaataactgaaaaatagcttagatatgaggcagatgatagaattgaaaataataactacattaattacatcatgtagttaacatttaacaatgcaataaacattgaaaaataatggaatatctctctattgttgatccaggggaaaaattgaagaaaaaaaaatggtatagtaactaattattgtctaaggcctccccttctagtcatactaaaatgaggcccataattctcagaaagctaaaaccaattacttatgtttggaactgtacacaaaatttgtgcaactcagttcactgcctgatataaaggctctgttatcgttatgtacatattagtttggtatacacttggtttcttccaatatcaaggtagattaatctttattgtaagaaaatataagggtaaatttagaccccgtgttttgcaaaagttaccaattaaactctctgttttgttaaatggcaaaatgaactctgtattttctaa

SEQ ID NO: 299289 - DNA, 3827 bp, Cannabis indica
atattttaatagttgccgaaaatctcggtcaacacatacctattaaagctgatcacaaatagccaaatcaatctcctttttgaactaattcattaaatttcatttgaggcagatggtagagttggagaagaagataatgcaatttgcaaaggacttgggttcagaggatatgcggatgcccatggaaagacagtaacagttagacaggatcaagcgtatataacaatcattgtccaatggtgagaaggctaattctattatattttatagagtattctattacagattccttttttactttacttaggttctttgaagaaatttgatttactgaattgggtttgtgatacaggatcaaatgtgatcttggaaattataagattgtcttttcaccatttattgccgatcggctttcattactaaagttttgtatttgttttattaagatttaggttctcacatatgtgtaaatgcatacatgcatatataaatatgcataaatatatatgattcactttgttattttttgttctatatatgttacatctgcttcagcttgttagttgttgtttttttttcttttctaagtaaaggttttacagataacattattgtcggaagaagctatatccacaactttcttatgcattcctagtgattcaagttcatatttcctatctgcatgtatattgagatgtcttctttggattaacactatacaacatttattgttgaggcctctagaatcgaagaattaatgtatttcaacaactttgtagttggcattatatttaaataatttataaaaatttatttatgttaccttgtttagtttcaatggtcatttcaccatcctagttttatgcgagttaaaatgaaagttttatgaacttttgatgttatcctagttcgttgttattcagattttttattagactattgcttgtcttgttgtttgtttatctttaaaagtttctctttttggtcctggcaggaacatgtttgtcaccatacttcgtcttacttggaacaaacatcacacatgtttttgtaatatgtgattttgctctgttagtgtgatgtgctcaaggatggctttttatgtgttcaaagattaatgaattagaattggaatttgatgcggtcaaagatggctttttaatttatttttttttgtactttaagcaaccattacagtatctcaagtgtgatttctctgataagcccatcccatgccttatattcttcatgccaaagcagtgaaggatggtacagttaggagtttgaatacagcaaattacctcctgagcttgtatgttaaatctcagaactttgagaatgcacacaggttgtttgatgaaatacctgacaaggatatccactcatggactattcttatttcgggtttagctcgaattggttcttctagtacagtctctaaactttttaggaaaatgcagactgagggtgttcctccaaaccaattcacattatctagtgtgttaaagttgtgttctagtaaaagtgaacctcagatagccaagggaattcatggatggatagtaagaaatgggattgatttggatgttgcactggaaaattctattcttgatgtatatgtaaaatgtggcgcttttcaatatgcagaaagattatttgaaaggagaaaagagagggacacaattgcttggaatataatgataggcgggcatatgcgtattggagatgtggagaagtctcttgatttattttataggtttcctttcaaagatgttgctagttggaatactattatagatgggttaatgcgcaaagggtatgaaggtactgccttagaactgctctatgagatggcaaacaagggacctacattcaatgaaatcacattctcaacagctttggttttggcttcaaagttatcactcttggaacttgggagacaaattcataaccttgtcattacagtgggcatccacaacaagggctttattaagacttcacttatagatttctattgcagatgtggcaaaatggagaaggcattgatgatcttcagaaagatacatccgcttcattcgaactctctaaatcccatcattactggcgatgagtcaatgacagaagttgtagcatggagcacattgatttccgggtttgttcataataacgagtatgaaaatgctttacaaacttttgtttctatggttggtgatgatattggcgtagacaaatttacggtcacaacgattgcctctgtctgtgctaatgttgggagtttaacactcggtcaacatatccatgcatacattcacaaaattgggcaccaactagattttcacttaggttcctcactagttgatctgtattccaaatgtggaagcttagaggatgccagagtgatttttgaacaaacctctagtcccaatgttgtgttgtggacatcaatggtttctgcctgtgcattacatgggcaaggacatgaggcaattcgggtttttgaactcatgattgaacagggaatcaaaccaaatgaaatttcttttactgtggttttaactgcttgtagccattctgggcttcttgaagaaggctgcaattattttcgcttgatgaaagaagtgtatcgcatcaagcctagaattgaacacttcacttgtatggttgatctttatggtcgggctggacgcttggatgaggctaagaaatttattcatagaaatcatgtttctaatcagagtttagttttgaagtcatttctatcttcttgcagacttcacaaaaatatagacatgggaaactgggtttctgaaaagcttctccacctcaaatcattggatgctggttcccatgtcctgttttcaaatatgtgtgctgccaatcaaagatgggaagaagcagctaaagtgaggagcttgatgagacatagagggatcaataaactccctggtcaatcttggatccaactgaagaacaaagtccacgcttttgttatgggagataggtcacatccatgtgaagctgagatatactcgtacttaaatgcgctgattggaagattgaaggagataggttactcatctgcattggatcaggtaatgcaggatgtagaagaagagcagggtgaacagttccttggttatcatagtgaaaagctggctattgcttatggaatcatcagcatgccatctggaactccaatccgaatcatgaaaaatcttagagtttgtactgactgtcatacctttatcaagtgtacttctcagcttttaaacagggagatcatagttagagatattcgtcgattccatcactttaagaatggttcctgctcttgtggagattactggtgaagctttaacattacagaatatgtttaaacatttttggtgtatgtaaatctgattattgcttaatgcttatggtcatcgagtttttcatccttttggagacaagttacactactaagtgccattttgtttagttacttagcaatcactcttgtatttcactacttcaatacaacaaatattgtatatacttgcttacatgcaaatatttcagatgcaagaacatatctagaactgctttttcatgaattagacaaaagagtactgaaaaggttatgagagttttttttttttttttttgaataatatgagaacaatttttgaatgtcttgttcatgtgacttgaattgagaggtttatttatttcttgccatggcaggttcagttaactgttcaagtatctattctatataaagtgtgcctatataacagaattcttgatttatgagaaatttatgggtgactttttatttatattaa

SEQ ID NO: 299290 - DNA, 2736 bp, Cannabis indica
attgcctaaagggcacacattaaaattagattcagatagagagtgctgcatttttagaggacaatgttaatagtattagagaaattgatagaggaaagtagtattacaaaacttagtgctatccccctattgtatatatagctacaaataattagtttaaatcaatacaataaaatcaaacccatgattattaagcattaatgacccatttactccaaaatccttcccaaaaaagaaaaaacaaactttctaaaacaattaatatttcctttcctaaaatattaacaaattcctttcttgtactaattcctaattaagcaatattattatacatatggattatattcaacctatattgaattgaaaaattacttaaaaactaaattcggtattaagacaaattgttccttatttattatatagagaaacaattgtaactttaaaaaatcaaccatatcctttttattaccataaaaacctttaggataatactttcctattcaaattagataacaaacattgcataataatttgactttccaaaataaatgattcagtaatcttcttcagaccattagtattccaccaccttttattacaagatcctcgtgatttcaattcttcaatttactaaaataattataataatatagtctaaatacttaattcccactttccttctatgctaaatattcttaaaaaataaaccaatacatagctaatagacattatcgtttaaattaccgtctttgaccttatttcagtttaacatattcttaaaaaaaataccataaccaaataatgcttatattccgactaatagaatttgtacaagcataacttataattttaaaatattattgtaccaaagtttgtttatacctccagtacttgaaagtgtgacaatttaaacaaaaactaccctaaataaataggggcccaaccctataataggtgctaaagccttttaaggcgccaaagccataaaaatggcgcaaatagaacaaaatcaatataaacaaaactatagcaactctacattataacccattatattggcttacccaaaacaaatatataacaaacaacaagatgagaacaactcaccacctttctagtattcaaccctataccacataagccgagactcctgggctcaaaactaatgtaacaatttacttaaaaaaattcatcacactatacataacttttaagcagaagtttcaataacaggggcctaactcaaaaagaaagagtataaattcaaaataaaatattaatgaataccaaataaaatctttaatgattcaaacaaagtgaaccggtagtatctataatcaacacaccatacatatatacaatctatgaacacaaacaataagatccataaagttatcaaagtttaaagttttggattcagaaacatttctaaaaaatcctatctcatatgaatatctaactaaaagaagatttaattcaaaaaacaaaactcaccacataatcgggttttctgtaaaaacgaaaggatctgacatatcattcttttttacccaaactggattaccaccaccttcttcattctccagaactagaattcttggtcctcttattatgaaacagcttcaaaatcacaatgcataattaaccatacaaacaaagaaataaggaaaagatatcaataaatgacaaggaacaaaatcaaattaaaataaaccgaacactatatcaaaatttaaaaacaacgcaaatgcaaattgggagacatccacagccgatgttttgccagcgataaagattacgataccggcgcttcttacggcaagcaaccgccatcctggatctggtattctccctcctggaactggtcttccccatcatggatctggtcttctccgtgctggatctggtcttcttcttcctggatctgctctttttgaaactaaacaactgaaggagcttcacaaaagttgagaagggaagaagttctggaaatcgcatcagtggagggatgaagcccggagattaatgttaacgcgactgggacgattgaatctgggcttcttgctgggacaaggacggttgaaactcacaactcgggttgatcgacggtggttaagaatatagagccaccaagatctacgggatttgaggcttggaatcttctccgccgcgagtgaagtagatctgcatccttgctgttagtaacagtcagtcacagtggagccgtcgatgttgggtcttctagggtgagtggagccgtcaacgtcgtcaggtcttcgccgagagtgacccaatatatacatactttattgtatagatattattatttaaaattactgatatttatatttaattatactaatatcaatatatatgtatgacactaaaaatgatactaaattacagctttttagcatttttctatgataatacataccgtacacggcctaattgccacctttttagacaatcaagcctcattttaaataccatttatttcagccgatatataattaatagttaggatacttttaagacaaataataatgtatatacaaatatggttattttaagcccaaaagataggtaccactacttactactagtaatagccattagccaataccattataaaagaaagggatattggcggctaaaccacccgaactttacggtttgtaacacttaaccacaaaaaccgaatttttggcggctaaactacctaaactcccattc

SEQ ID NO: 299291 - DNA, 2265 bp, Cannabis indica
tgatacggtgaaaacgtctttggccaatccctaaataataaccaagtgagttccagcaaaaataaataaataaataatcaccaagtgattttctttttcattttaatttctaaaaattaaattgtatattttgacagctgtaattttatacgtttacatataattttccaagaatacttttttttttttgaatgtagtgtttaaatagttttcgtaactttttcactaatttggattcccaattaagctatatattttgagtctaaatatgtatatttagctcggaataaatgtatacaccactttcttattaattaatacaagtcattgataaagtaaaattaatgataagtgaatactaccaaagcaaaaagggaaaaatgcaacttttttttaaaagcagtatgagtttaactttcgagacacccttcgttttctctagcgagcatgctttcaactcacatttatttctcttcctctccaaacggtggtgatcatcattatgattttctacaactttttttatcttcttagacatcttttctacccttcacaatgtcgtggtaacgccacattttttgacgattgacactcaactgcctccacccaagataatgaggtcagctcaatctcgagcacaagaaatcttagagcaagcgcggattgatattaatgaatatttctcaagtttgatttgtttttagagtaaatctaatcattactttcctccgtatttaatttcgagcgtcctttcacattttaatttagggtttagctttaattgttgtgtgtaccaacctagattgtggatagatttggataatctctcgcctgaaccggccatttatgactattatccctaccgtctatggtactcgagtatacctaggatggatagtactctttgtatcccttcgattgccattttgcttgtgtctggctatttaagtcctaagtactaggattttttctttaccttatttgctcacaaacaactaccttgcctctagctcttattttgccagaaatggaagacttagtccgttctttttttggagctttgcatctcactgacacagaaaatattgtgcactcactcattgatcatgttgatactcatgaaggtcttccaccagctccacctctcttccatcttatggcaactttttacaccaccaaaagtttcaaccataattctctgaagaatttcttggagaagtattggaaaggaagattccttgtcagtgttaaaggaaggtcccctaactccaatttgtacctggttgctttccactgtgaaggtgacaggcgaagggccatcattaatcaaccttggatcttcaataaaagtcttgtccttcccgaaattcctgaccctatctctgccctcgtcccggaatcaatccataagatccccttctgggtccaaatccacaacatacctttctcacgttgatccatttccttaaccaaacttgttggccaaattgttgggatccttctagaaatccaccaagcctcccttctcgaaacttgaagctcttacttaagagtttgtattatgtttgacgtcaccaagccctcccaagaagtgtcttaatcctctctctgagaatggcatctcctacctggcttgaactggagtatgaatgcctccctaatcattgttacttctacggtcgcttgggccatacttataatggttgcactaattatatgcgggcttccgatgagtccctcactctccaccgatcccatatgaaaatgttttgtgtggtattgctcgacccaaccatggctcctttggaatcttacctactatagtcaattgcatttttctaacactttaacccccaatctaactcatgaaacttccaaactagaaccttgtgaaccttataagcacctccacctttggggaccaataaaccaataagacttctctttccaactccacgaggaagatcactttggcactgctgacctctatatttccacccaaacctcccaaataataatgctgacatatataccacccccactgttaccattcccccacatacccagcaacaccacactggcccaagcccttcttttactgccttgaagaatgttgcttctgagggatccatatcatgctctgtatcccccagacaaaactccaccccaattcaagaagttctacttccccgattgctagcccaatgaataccccgtgttgacttccaatcccaaccccgccacatgttggaaatttattttacc

SEQ ID NO: 299292 - DNA, 3219 bp, Cannabis indica
tgcacagataagtaaggtcaaaatctacacagataaaagcatgagaaaaagaccaaaggaaaagtatttacttaggtggtctccttcaatattcggcccatgagcagctccacggacatgtcctctcctccggccagctaatcgtttacttcgagaagcacccagtcttggtagagctagagcatctctttacccttcttagtctcaaagttcagtacggcatgagtggctgaaggtttgagcagtgcggggccatctgtatttcccccttggcgcctttggacgaaacatccattgcttgggacttcgagttcttcttggccggtggatttacatctagcactgtctcctcgggaatctcagttggaagtatagccgaactcttctcaacagtaagtttaggagttttggtgctcagaactatgtacttgggcagagcatcgtccaccttagactgttttgctgaagacttttggccataagcatcacctgacctcttctttagcgcgcacagcatcctctaagacatactgcacataaataaaacaaataggtttgaacaagtatgatctaaataaatgcaaataactttaaaaacaaggtaaagtaccctacatgtgggcaggagcaccctcctgaacaagcacagaaggagcatcatcatctgaataatcctcttcttcctgctcgaccacaatggcttttccctttccagccaccggggggaaagattgagcaaccttctttggaccatctctgatcttaatggaccgctcaataggtacttggccacttggaggagccttcctcttcttcttgcttggagcctcctatttgggcacagcttccccgactgcctcctcggtctttggtacaaagtcagctggatagagtttatgcctaacaaaattggcgtcaatggccaggagagaaatatttcgatcatttgaggggaattggataatttccttggccctcttcctaagttcctgtgtgaacggaggtcggtagtaggacagaatatgttggaaactagtataattggtgtccttcccttgacaaaatagtagtcctccacgaagccacatatttttgtcacctcggtattcgtggtactctttagccatgactccttgatttgagagaagtaaaaaaaccccgaccgactttgcttggggctcaacttcaggtcgaatagccagttattatcgtggggggatggctcaccccatccttcagaggtatatagcacaaatagaaaacatagataattgaggcccttgggagttaattgggtcggatcgatgttataatagttggccatcttcttgaagtacgggagcaaaggcaacattgcaccctatttggtgtttgctcccaaccaagcacaataaccctctccagggtcagtagccggttgaccagaggagggaaggaagcatttgacattccccaagagaccatcctcgaaaagattagctaatcttttcatggttaggacagatggcggagaaatccatcgagctccccttggacctcggtgtactcctcctcgatgtagctcggcaagcttctaggatatcacttgtcttcaaaataggttctcctttttcattgtaaccaccaaaaggcagcacccgagctaccccctcatcttcatcgccttcagcctagggaggagttgcaggaaagacctcaccttggtcctccacttcctggacttcaacgtctccagtagtttcctcctcctcgatagtaggataggcctgttccaccctggccagagtagctagacgggcgatatgagggttggtagatgaaggtttcctgaaagtctgcttggttcatgccgtcattttacatttggacggagctttatcaaaattgtgccttgcaatgattacagcaaatttggcaataggttttccctctgcagttgggattgggcagccctggggcaaggtgtcaaccacactcgaatggaccctatatgtccagctggcaggaagataacgtctccaacctttcttaagttcccatatgaaatggttgtatcgttcaccacgaatatggtcgggatagaaatagtgttgcacctcaggctccagggaaggtgtgtgcaactactaacttcacaatcttcaactctagaatttgaaagatcgtcactagacaaggatgggctagcacggagatgggggtgatcttcgtataagatttgaagcaagtcctagtcaatatgatgcttgcctccccgaaaatcaccagtgttcatctacaaaaggtgggagacaagagagtaagagttggtcggagtaacgaataaaaaatagattgtatatgtggactaggcttgattgagaatactataaaattatatctctcaaattatcacttttctatctatagtctatgatcactcaaactgtatgcacactatatacagttgtatataggcgtgtagactagaggaagaagagatgaggaatttgaattcctctatagtcaagtgaaagttgtatctcaagtattgagatgaagaaatatgtgaaaaacagagagctataagggtctatctatagtaatgtcttagggttaggattaaaattaaatggacttaaaaagataaaataaatggccttatttctcaaacccttgggcaaaccctatgtaaagcccattgggttttataaatgccatattagttctaggcgttattctttatcaaaataccactttttattcttaacatttaaatgaaaattttgtgtatttaataattataaataaaattatcatttaacataattattaactagactctctcaagtctcttaattaataattaaatcttacttttcttttttcttcttaaaacgcatttgcctagtaaaattcataaataagacttagtcttatttagaatcttaattgattaattaaaaccaatttattgagtcttcaaggtagtaagatctcaggtagtgtggggatcatgggcctacataatcagactcccaataagtagttctagaacttactaaataattctcttagcttattaattcttcataactccactataaattcagaattgcactcctgattacatagaacactctattctctaagaatagatacgctattagttatccattgtttcaatctaaataatcaatgattctctatagatgatctacattgaatagggactaaatt

SEQ ID NO: 299293 - DNA, 3076 bp, Cannabis indica
gccttaaatttatttctcaaaagaattcttccccatcccaactgttctatttgtggcaacaatgctgagtttgttacccatgcccttatcggttgtcccaaagcaaagaccatttggaaatcttcaagattcaaacagttttacttagtttatcatcaaaatgatataaaggaattttttattcaggaactgcataacattcctaaacaggactttccagttttcattgcttttgtctggcatatttggaatactcgaaactcaattttattcaataaatctggtattcctaacaatgtggaagagtttgttattacttatctacaggaatatattgctgctcagtgtaactaccagggagatcagttggcttctgaggctgtccccatttctcgtacggctcagcaacagcaccctcctctcctgcaacctgatactctttctcttcttgttgatgcagcccttgaccaaaatcatggcttaacaggaaccggtttaatcttcaaacttagttttcagactgtattagcttctcactgccgtcattttcctggtgttgtttctcccatttttgttgaaggccaggcgcttctggagagtctaaggtggtgtttggattctcaattgtctcctaaggttgtcttttcagattgtttgaatttggtttccaaagtgaatagtgcttggcaagacaattctgctctttctggacatgtctctcgaattcgattgctcttctccaacttcccttatgcttctttgcaatatctccctcgacagtttaatatggaagcccatggtcttgcaaaagaagccctcaggcagagagaagttagctagagggggttgttttgatctctcttttttgctgcttgtgattttagttcttcttcttcagcagcttctcttgttcaaaaaaaaaatagtattctcactagaccaatgagtacgatatcgatataaaaagattttcggttttaatttcttattatctttaaattaaagtttacaccttgggaaaaataataaacttctaaacatagggaaatcataaaaaaaacaaagtaaaataatttactggatatggtaaaactatcaaagtcacaaagagaaatatatttcatttataacttcaaaattatatatgctctctatctcaatctcttcactcaaattccaatataccatttgcttctttctcactctcacaccacacaacaaactcgtactcacttctcttttcatacttactctttttctccacacacactctctcaaatataaaacacatatttatagtctcaaaactttgtcaccaatactccttgtctataaatcttttgtgattgtagaaacttaacacttgcatggcaaagaaacaagagataatgtagaaacatacttaaagaagagtttgtgaagcaaagcttaatcttctattagatattaacctttaatttatagattagttgttatacacaattacaaaatcaagaattagatttatagcgcaacaataattgtaactaattaactaactaatctttaacattaattaggtaactaaataattagttagttaacattctcctttaaataaaaagagattgaagccgttttcagtttagatttgagatatataaatctgtatatagatagaattttggtgactatttgatctatgaaagggacataatgcacagacaactctttggccataatgaaaaagtgtaaatcaatttatatgtgtttggattaagcatgaaacacaaagttagtagcaagggaagatgcactttaattatccacctaacggataggaggttgttgaagagtgaactgaagcttagagagaataaacacctgccattttaattctgcaataacattggccaaggccctgaatttactttcattgcttgatcttgtaaccacctgttattttcttagcagattacaaaattagattacctctaagatacacaacatagccaccaaatcttctatcatctatacaagatgcccaatcaacatctcaatagcactacaaagagattgatgttgttggtgtaagtggagaccatctgaaatagtccctttgagatctctcattaatcttttacaagcctctcctagtgagtagtagtagaagcatgaataaactagctaagtttattcaaaatgaaggtcaaaataggcatggtgagggtgagatattacaaggcccccaaaatgcttttgtaaagtattttgtcttcaaatggttctccttaatttaaagacaatttagtagatgagctagttggatttagaggcttttgtgtgaagtttaacaagaacatctgtgatatattttgtttggtagagatacattttagtagcttctttagaaatctccaccctaagaaagtaagggacggaacctaagtcctttaaagaaaatgagatgttcaagtctgatataagttgatggattagatcagagttaggacttataacaaggatatcattaacatactcttgagcttttatgcctgaaataaaactcaaattcaacgtaatcttatttgctatcaataaaagatggcatatcatttttgcactattgtcgattactttgcttacatgtttatttcatgattaattgtttaatatataaattcttctaaattctaaatatatagttatttacaattataatattgtcacggcagtaaaaagtaattgtgatcattatatgcttcaaactattttaagtctcaagatttattagtgcattggatttacactaacgtgataatcaacaaagtggtttacttacacttagacactttccctactttgataactttggtgttgaagccctggatgtagtttcttaaactttcttctctttcttgcatcacattggtgatactaaggcataatgttatcatgcagtctgatgttgtttaaggaattcaactgaaaagttgcatccaagatgtgattgttggaatttattttaccaggatcttagatctactcacaagtatgttgtttaacatcctaaatatgaactttctaaaacgataaa

SEQ ID NO: 299294 - DNA, 1646 bp, Cannabis indica
tgcatttatagaaaaaaaaaaaaaaagcaaaggtgggttgtgttcaaacttttcctccacacaagaaaaagccaaggttgaagctttttcaagaccatgacactagaaaaatcattgccacaaaagaaaaatcacacacaaaaaaccactctccccaaatcaagaccacattagattagattagattctcatgattttggacactttcacacaaaaccacaaaaatatatatacacattatgatttcctttctataattattaaaggaaaatgtttggtgaaagagggaaacaaaagtagagatgaagaaaaatacacacaaattatctatagtatcggtatggggtgctcttgctcgtgccctagaaccggccttaggctaacgcggactaggcctagataaaaaaaacttcttttaataaatattaatttttaaaaataccacctatattctatacataataagcgcccaggaaaacttatttttcttgaaacccactacaacttattagggccgtctgtgcccgaagcaacatatggctcgatattaaattgcacccgacccaactagttatcatcacgagttaataactgtagagaagattttcctccaatttggtagggaaaaaatatttggtagaccctattttttgaagtgttcccacttacattgtttcacttccttatcaaataactctccctcctctcctctctccacacctaataatatatagcctaagccccacaaattcactataaatatatttatatatataagttcttattgtacaaactccaagaagggagtccttgagtgatgaggcattaataagtcaaggatgacaacatcatcctttgacgatttaattaagaggggtgagtaagagaattgttaaaaggtattactggtgcctagcacccttctcggtgtcatatcgttattggtgtaattaaatattgtgtctcttatcagaatattgtgtctcatatgctcaaacaaatactaagcaacaaaagaaagaaattaaattgattcaaaacttcccttccctatcagttattgtcaaaggttgtaataaaagtaagtaatagagaggggtctctctctctaattaatttcttacttttgtgtcatcattcatcattattattattattaaccaaagcttgttcagaacagagcgttacaaataataataacagttttctcatttataataatatcagaataggttatatcagctagggaagtaagtagggctacatgtaacacagcaacaaacttcattactatacatttagccccatttttaaagggtacattttcaggaagactgtgatgtgaaaagggccaaaaagttcttctaaataggcctaaccaaggctaagctatggttggtactaactatatacacataatccaattattcaatgtactatactatactattgggagataaatagtacagacctcaatgtagacctcaatgttaataaaaattttgtccaattctgtcaatacagactctgttagtgttttaagtagagtactataacacaaactacgactcttcaatactatagattagcctcgtttaaagggtacatttaaactcttatgatgagagagagagagtcaaatgatg

SEQ ID NO: 299295 - DNA, 7928 bp, Cannabis indica
actattcaactaattatttttttctcaaagaaatgagataaatttttttcatagtgtataatttgtggattatcataaacactatttatatgtaacattattattagtgatgatcaactattttttgaaaaaaaaaatcttaccaagatatacatcgatattaatatctttataaatttgatgagtaaaaatttatatattaagttaatttaattttgtttcattacataatctaataatcatcctaacatatatagataaaatacatgaatattatgtgtgaacaggtacaattgttaaaaatatgagtttaaaaatttgtgttgtcattatattatattattaattttatacaatgatttaccctacgaaaatttaaaactattgtaaaaaccgcgcgaagcgcggattagttccctagttagaaataattgaaaaagttaagatttatcatattaattaggggaatcatttcatatgctatttttaatttttatagtttgtgttgctctgatggttgctatatggaatgctatgtggatttgattgcgatttaagttatttcattagttgctatgtagatttctgtaaaaatacaaaaatactggtttgaaatataaaaattaaaaaacctctattaattattaagcgaaaaaaattaaaaaacccctattaattcttatataggaggtatactttgttaatatgagatttttttttttgaagaaaagtgtacttataatagattggtaaaattagacctcatgatcactacaaaataagtttataggaatggttgatagtagaataaaaccaaatctctaatgagtaaaagtctaatttatcgggctacaaagttacaagatctactaatatttgtgaaattacaaagttattaacgagggaaaaaagttattattctttaataaaagttgtataattttttagtatgtcaaattaagtcaacttatcttcaaaactgaccaatcaaacggtagcattcacccatttttgttcccccttgggtgatactagtagtaaatgattacacaccttaagattcctcgaacagaaaaacacaccgtctttcttaatacccaaaatacccttataaccttccccaaattccatgcgcaaaaataaaaaacaaatataacaaaatatcaaataataattaccaacttgtttttctttttccttctcctcctcacagcgaccaagcggcatcagttagatgaagatgactgcgattttcatagaatctctaatcactaggagagagtgccagctttgatttagggtttctgaatttgctcctgaagcacactagcaataactagtcgctttcggatttttgagtcgggagttttcaacgatttgattgattccgtttctagggtttggtactttggtcactcaatcagggtttttcatttttttttgtctgtgcatatattggaattgattggtttagggttttcagtttgggaggagcggagaaagcttgggggtggtacgggtgatgtgagaggaagctggtttgggtcggtttctagggttttaatggggagtaccggtgaggctgaccggaaacggcgccacgttaaccccatatcccctacggctgctagtgccaagaagcaacacttcttgcccatttccgaggacaaaaaggtgaggtttttgcactcgtaggatgtaggttctccattattttattctgtaatgaacgattgagtatttctgagtttacggtatgttttgctatttggcatattggagtccgtacatgttaaatgtcgtatagcgattttttttctttgtaaaaaacccttcctaaagggttttgattacagttctcaattctttttcgttttctcttttgattttacatctgcgttttggttgaaaatattaatagctttggtcaattgcgttgatattgagataggtgctcttacttttggttttcatcttgtacataatggaattagtatctcatttttctcgttcgaattactagccttcagatcctaggagtaggttttgtagtctctattaaacaagaacacgtattcggagaactacgttgtctcattttgcacgcccctgccagtgatttcgttagtaacacttaatcaagaggtaattaggccataattttctcatacgttttaagctaggagaaaacatcgtagtagctttggtcaattgccgaaaatattattctacatttttttcttgaacttagatccctgccaaaccctacaagacctggaaactatagcattattctgtatttgaccacttgtacttttttaattgttgtatttgtaagttgtaacttctctttcttctgttatagcttgatattgccgttcttcagtatcaaaatcaaaagttaatacagaagttagaggcacagaagattgaatatttgtctcttgagaataagttctcccaactcgaggagaaacaccagccatatgattcagcattacacgtggtcaataggtcttgggaagaggtaagactcttgtttgttgctatcttcctgccgtccatttctcttgtgtaacttcatgtttttttcctctttcctatgtatacagtatcgtgtaatgcttgatggggtgtttattctatgtttttacaatagcttgctcgtgacttggaatcatgttcgattcatacaagagaaacaagctgcaagcaagatgttggttgcatgtccattgttgagggtgaggacatgtttaaaagttcatctaatttgggtagtgggggtttgttgaatgatttaagtttagttatcaccatataatgtcataatataaagtgttaaatttttctacaatagaaagtaatgttttttgttcaaatggtagggacagatgtgtgagtaaaataatgattgcatcagttggtattgtttctcagtctcctttaaatgtattcttgaccaggacctcttctgttttgtcagcttaccatgttatttgttttatttgtttttttttctttttctttttctctaagataattattggtttttctgctgtcaatcattggatctattttattaacataaggatacttctacatctattgtcattcaagtcgtagtaatttagtatattctagtgacaagtttaattacttcacacatatgagggctctatggccatgtttgcaaactcaaagagacatcatgaaaatagtgtttgaagtgttaagtttatactgtattgcagatgaatctgaatctactttccatgaggcttttcttagtcgtcttacggaaactggtgcaacagaaagttcgtcattatgtgaccttcctaaacaggcggaaggtgatcatcagagagcctttgaacagactaagaacatcttatgtaatctagttgctgctgttgacaatatgtggtatctaaaagatggaatacatgcttttgtcttgaaaaaactttcagaaaatggtaagagatgcgtgggttacttttatacgatacttcgagcactggtctttagagttatctcagttttggtggatcttgctctattttctaggatcttgcaggcaaaagacaccaagtgaattagatagagaagtcaaggacttgaggttggcatttactgaactgtttgtgaagcataaatcactttcatcaaaactgcagagtcatcgagatattgatgcaaagaataaagctgagcttagaattttaagaggtaattcccctctttcttatttggataaaccatgaaaactgatatactgtacatattccataaatataaattaacaaggattttcccccctaataaattggtgtttagtattttttggtaccaatcttgtcagtaaaatgaaaattaaaaaaaaaaattggggcagcacccactcacattggttgctcaatcggcaagaagcaatttggttttgtgacttggtctaaaaatgaagtgccagattagtatatattatgtttttctttttaatgttgcatccttcatgtagtcttaatacattataacttttgtatgatcaaaatttatagtagtttagagaatcttgtggtcacttgataagttgatgtaactgaagtttgaaacaaaaggtaatgttaattgaacattgttgcattttaaatttcttcataaatggatacaatggaataagttgaagggatggttttattttgccgaaatatggagaatttttgtttggccgtttatggttttcattgccttggaggaaacttaatgccaagtgctgttctcgtattggttttatgaaggggagttgcaaatcagagttgctgaactagaagagagtaattgcaaactagcaattctcaaagctcggagagatgctgcaaaaggggcaggctttcctgtcttaaatttagggagcaagcatgttagtagtgacaaagtcagggataaagtaaaagatatacaagatatggagattgctcttaaagaattaatggtaggatatttacctttctttcaatcactcatcttaataaactaatcttatctagatggtaatccatgctaactgatttgagctttgcaggatcaagcttcttgtcggcttgaagaaataaaaggtcttcatgaagagagaatacttatattgcagcagttatataatttgcaggtcactttaatgtataactagtcttttgtgtatatactgtttttttactttaaaatagcatttttgctaatactaactcttcttgcaaatggacagagcaaattgaagaatgtagcatgtatttcctcttcccaagcctatctcttagtgagagatcaaattaaaaaatcaaaatctgaagttatacaatatcaggcttcgtatgagaaacttcaggttgtaactggtcggtagtttatttatgcctgtatctaccgttctttgataagatgtcattgtgatgctaacaataatgttgtcattggagattgtaggctgagaaggataatcttgtcttaaaagaaagagaactcagtgttaaaagtgatgtcattgatgtcctcgaagatctgccgcaattgagaattcaaaaatttctgatcttaggatagaaatacagaagcagaacgatgagagaaagataattgaaacaaaggtggaagatgcttcaagagaacctggttagacaaaacctgaagcttttgcttattgtgagctcatggctctctttaatcttctgatggaataattattatggtttcaggaagaaaagagataattgcagaatttaaagccttggtgtcttcatttcctatggaaatggaaaacatgcaaggccaactgcgtaaacataaagagactgcttcagatgtccattctttgagggctgatgttcaatctctttctagcattcttgacaggaaggtgagcatgtttttcatgtggtgaaattattggatgttattattgggcttgtgctgactttggtgcatcaggtgaaagagtgtgaaactctatttgctcgatccacaggtcaggctgctgagatacagaaattgcaaactgtggtacgttttatgctttcggaattgtatcttagatgttaattaggtggagactagccatttctattaatctttggttaattgtataacatgtcatgtcacattaaattgtccttctaagttctaattatttacagcagaataacagcttctatgtttttatatttattgattctttttcagttggacaagaaaactgctaattccattttgttctttaaactttacaaggattttataaagttaacttcgattgattgatcattagtggaaatctggagatacatttgtttttgccttcttgcttattattgttattatttttgtttcacttataggttcatgacttgaaagagagcacctatgagttaaagctgtttctggaaatgtttagacgtgaatcctctgattcgaggtgagaatgtttttacattatttgctttgcttcattacataatgtttattagtaaactatgctatatgagactagcttttttggttatgtttgattgcacaccatttatgttctgtgtcatgtctctgcagggacattcttggagctagggatttggaatacaaggcgtgggcttgtgttcaaagcttaaagtcttctctagacgagcacaagttggaattacgagttaaaactgcaaatgaagctgaggccatatctcagcaaaatttagctgctgcggaagctgagattgcagatatgagacagaagttggaagcttccaaaaggtttctttctttttttcctcttcaggcaagagagggagaatgcaatttcaatatgaaattttgacctgttattttatttcatcctgtttgaaggatattagtccctaatatatgtcgtcattgtggatactgttctgtatctagcatgagactagtcatacatgatgtaaagtactgagagaaaaaacagtgtaaaaccagaaaataggcagaaaatagaccttaatgttatggtttaaatagtacaagatttatataccaaataatatctaattaactctaatatgtacacctaggattaagatgaaatacaactatattaaatattagtatcatgtgggtgtgctttggttttgacaattcaactgcttttatggttttcatgatcttatgtttatgacaggactttctttagtagagcttcatagtttgttttattgctatgtcaggaatatgttggaactcgctaatgtattgaaatccaaaaatgaagagaatgaggcttacttgtctgaaattgaggtttgtgtcatgttggtttctgtggattgggatctcacccttgtacagtgatgaagttgttccaacattggagttttttcttttgttcagactattggacaagcatatgatgatatgcagactcaaaaccaacatctattacagcaaatcactgaaagagatgattataacataaaggttaatgccttttctatcaactgttttaattaatgttgaattgtcaatgctgtctttttatttttcctctttttgttttttgttttttagtggtatttgttattgacttagataattcaataaacctttgctatttgtagtgatttttagttggacaagaacaaatacacaatctcctatatttttcttccttaaactgtatttctttttataattactttggtgaactttttactttcattatatagtatgaaccaggctggcatacctctgttctcgttctcattaatataattgaagctcggttcaaaggattctctgttatttttctttccttttttttagtattttgatgcatctgtttgggttatgatatgtatcacatgctacatttcttattgttttctggcacaagtaatgacatttcactttgtatgctggttttgtgtaaaactactaaacctgtttttgtttttcactcgatgcaagtgtacatttgaggagggagattgttattttgtaaactactgtttatttaatagatgtttccccccctccatttcagcttgttttggagggtctgagggcaagccaactgcaggatgagttattgatggaaaaaagaacattggagagggagattcaacaagctaattcatctttaaatttttatgacatgaaagctgcaagagttgaagatcaggtatctctcatcttcaaattaagtcttaaacatttacataatttggtagagtagaaaaagtgaggaaagaagaatttggagagaaagtggagagaataagaacagtgttggtgacaagaaaaatgggtggaaagagaaaaattggaagaggaaaaaaaaaggtgggtacccaccaataatcgttctctcctaaaagttggagagaaaaagtgaagagaaatgtgtatat

SEQ ID NO: 299296 - DNA, 1887 bp, Cannabis indica
ttcattcaattaaagaatgtatggtacaatgatattgaacatcgaaatatattgggaatgccacataaaaaaatggattcatgggaccaacaaaagaaccgttacacaaaaaagtttccaagaggcacgaactattatcataaacgacaaaagagcgaattgaacaggcgacgaacaagacaaaaaagaaaaaacagggttctaacagcgtaataaagagcacgtggaacttgacacaagtacaaaaaaccaaaattctcatatcaacttatcttttataaatgaagagtgaatccccctcaaatattgtattaacagaaagtcgttagtcattctttggctggtagccatttatgaatcttcaaaagtttcctagatacttctcagcgaatgctttcattcacaataaatatgattcttggaagaaaataatgtctacatattaagactaaactagatgctaagaaactcattttgtagcacctacttagtccatttccactattttcattatgatcaatcacatttaacgaatctcgatctcattttttgctaaggagaagttgaaagcatctaaataatactcaaagggttgaactttgatattgtcttaacatttgtgcataaattaaacttgaattgtgtgcatacaatatgctaggagaatgcatctgaagtaaaacaaagttaaaactaaagccactatgatcaacttcaatcaaaataccagaacacaattctcttgtggcaaaacaagacatcatcttactatttggaatttcccaaacacattttattttaatcttcttcctccacttatgaatgattttactttcaatcctttaatgagtgaaaccagcatgaatacctactcacccaagctctcaagaacttctaacagagtataattgtaaaagtttacatgattgaaataaatgattatacaatacaaggagaatcatccccacaatcacacacaatcaacaatgcccagtataagaactatcacattaaaccaattaaagtccctaaatatcaaaaccaacatgtaaaatggtttccagatctcaaattttcttatcacattttcccagcagccaaacagcaagtaaaaacaaaaaaacaaaaaagcattcatgacaccagagcagctgtaaagttgacaagacagaaaaacgaaacacaaacaaacttcatagatacagaatcataagaaagaggttacctggcagaggttgtaggtgaagctgtcgtaattgtcaatcacaattatgggactgttgattttcttgtccgaaaccgtggacctgatgttcgattccacgacagccattggagctttcggtgcaaacccatttcctaatttcaccccaaaacgaagttctgcacagaaaaatcaaatcttttcgcatcaaaatgccaactcaattaaagaacaataaaagttgaaagacataccagaggagggtgttggaaggaaagctggagtagggctttgaagggttttgaaagagaatgaagttttgggttgttgaagtgagaggtgagaaggaacaatggcagccatggattcagaaagagagaaaaatgcaaagaagaaagatggtgaagaagaagaaggaggaggcgttattagtccgtacagacagagaagagaatgaaatatagagaaagaaacttccttacttggcaggcagtgatagctgacgtggcagtcaagtgccattggactattttggtgctagactttgtattattattattattattattattattattattattattattattattattatgaaatttgaaaaactatactttaaaaccttaatattttattcttaaactaatacatttcaaactaaaaatatatgacatttt

SEQ ID NO: 299297 - DNA, 4931 bp, Cannabis indica
ccatttctttccatctcttaatagactgtgggaaagagtgagagagagagaaagagagatttgataaagtaggtattttcttcccctccctcgaaagacaggtgagagaggaaaaggggagagggagaaagaagaaagaagagagaataaaaaagaaactagaatggataaagtaagagatagattccccagaaccaaactataaccttctatgttttgttttgtttattatgttttattatcttacaagatatcatatccgcattgttttgtaattctgaattttatttacattagaattttttttttcttataatatacatctaattgtttttttgggtcatataactaatgtttatatatattgctacacacacatatatatatatatttgtgacaacccacagtatgcaattagtcagctgaataagcttgaagatagcatttggcaaaggtggacaacgaaaaagcccaatgagaagcctttaagtacgtatctcggtttttgttttctttcactgcctacctaacatctttttcagttacttttttcttttaattcaattaacttcgttgtgatgaagaccagtttcattaatttgagaatgcatacacctttccttttttttttatatagaaatattaattacctccatgaatttgagaatacatagccttccaaattatatgcaaagagcaattacttaaatcataatacttgtaagcatacaaaagtattcaataattacatgaatatatacaataactttatagtaatttaatcatagtaaatgaaagattagttatgtattataaaatcttcatatatgatgatatatatttaatatatgaagtaaatcaacaatttttaatataaaaaagctaaagttactagtgagatggaaaagagaaatgtttccatctttctgcagaaatatttatcacatctctgttgaccgctgtgttattgacattgataatttttgtgtgagtaactttccaaagagaatggggacttattctgcactaaacttcatctttggggttaaagatatagttctaaatgtattgtggcatgtattggaagtcttataattatggtcttttctttaaattcttgtcttttttctatcacggtgttcctccgtcacaagtaagacttcctaataaatttggaagatcagtctaagatagttcaaatgtctctttttcaatttattttgggtaaaatgtaagaaatttccaactgcacataaatgaaatttcacaaatatcaatattttcattgcctaatacatcaaagaaatttggacagacatagttttttaactcaaaaaataaataaattaatatttgtagcaccattttttttcttagatgcattgctggtttgtaggccaatattattgatttttttttcatccttgggtctatgacagattatattgttattttgactgttattcttccatgggagatgtttagctgttaatctttataatgctttcattactatacattgaatgactgatcaattctttaatgcttagtacactgtcctttttcttggttatagagaaatccttggatgagagatctaaaagtttcgtgcaaaaggatacatttgatggaagtagaaaagacattaatgctgctattgaccgcatttgcgagttcaccggtaacaatttgtgcaattgtagcgtctactttgagagaagaaaagtttcagttgttgatttgctaccatctgcatgtttcaggaactaaaattgtcttctgggatttaagggaaccgctcatcaacaatttgtataaaccaaattgttctcaatctcggtttgacgcagttattgaaccacttgatatagtcagtttttcttttccttgacctataagctaaacataaattatgttgtggtgttgttaaaactgctgaaatggatgcatagtactttatggttatatcaccccgtcactattgagtgtggtgtggctgctactgctatatctttgacttctcttagacatgggcaagtaaagtggcacaagtaccgtggctgattttgttcaatgcacgtaacggtagcacatttcatattcatctcatcttgggatatgcttcagctttcaattagattaaaaagtttcacaatgtatatagaaaggtcacttcgctgtgtaatttgttttcacaatgtgattcaacaacatggccatatagtataaattttgctagtcattactcatctgctactgaaaaaatattcgaaatagtgtgggataaatcataggcatggaaaaaaggacaacctgtatattctatttcaaccttaattagtgaagttgtgtgtccttgtgcatgtgttatgtttacatttcaagatgacaagattattgattgtatggagattaaagattacttattactataaagtcttcagctgcaaaaattattgttgtgcaggaacttagtcaactatgtaacgtcattgtagagccacttagggaccatatagtgacgagccttcttcaagcgactctggtatgtgccttagcttcctatttcgaatctaacgacatatatgtgtcttaaatttatataaaatgtatttttccaggatggtttactccgcgttctattagatggtggaccgtcacgagttttttcaacaagtgatgcaaaactaatagaagaagatttagagatcttaaaggtatttgcagcaatctttgaaaactaaaagaagtgcacttttgaaagcaaatgtagattgcttaattctatatataaactataaacatttcttgggcttgcttggttgtaggagttctttatttctggaggagatggacttccccgaggagttgttgaaaatcaggtggctcgtgctcgaaatgttgtcaagttgctcggctttgaggttagcatctcttttaagtcgattatcttcatattgattaaattagattagaagatgtagagatttaaacaaaggagaggagtttaagttggttttgaacatgcagactagggaactgattgaggatttaagatcttctggaggcctggaaacgcagggtagccgaagcaaattgggagccgataccaagactctattgcgaattttatgccacaggtctgattctgaggcttctcagttcctcaagaagcagtataagatacccaagtctacagtttagcttccctccctactttttaatataaaaatggcactgttattttttgtacatctcccaaagaaaatgccgttatgatttttgtccatttatgttcttttattggttgtattgtttaaccaatagatggattcaaattaaccattctgattaatgttaatagttttgagttttgttgggcgcagttggccattaatatgtacttatttgattaatttaatttgaagtattggagttgtttaagtttgtgcaacaataacaaattgtattgcccaggctatgtgaaaatatatttgtgcgtacatgtttctaggtacatagaaagagtttgtataacttaaaattaaaaataataccattattcaattgtgggatatttttaattaaaactaaatttatctgttagttaataaaggaaaaactactatcaaactagcgctggcaaaattttgagtttagggatattgatacatatgtactattttggtcatagtacattttattaagtgctgatttcaaattttactttcactccaacatgtacaattaaaatctaattcaattcaattgtgttaatattaattttttgttttgacaaaaattgtgttgatattaaattaagtagtagttcactaaaatggataatcatctaaatattagaataaaatagtaattcccttttaaatttaaactccaataacatattttttttagtgtaatgtagtgcaaagcaactatttatatttatacaatgtaggtaatttgaaaaacacccataatgtctagccaagtgtcaagaccaagctgatgtgcaaagtgcagtgcctctcatttaatattgtttgaatagttctcatcatggccaatttacataccatgaggtctcttggaggtgtaggccatgttccatagaagctaaatactgcaaaccaaggaaaatgtccatgaataagcggagacacatgtcttaaaatggatgaatgaagaggatagaaagagagttggctctctctctctctctcaaatgtcttaaaattcaattattgatattatgttgtcattagtataatttaacgtaacatctcaaatattttaatttaataattattataaaaaatattaactaattatagtttgctaatgttatgtttggtaggaagaaaaatagaaatgagaaatgaaaaagaaaatgaagaattgaataaaggatgaggagtgttgaagatggatggctaccaaacataaccatggagagaagagaaagaaaaggtgttaaatttctcaatgccaaacatagtgttactttggtatgaagaaattaggagaagggctttgttaggctatttttagcctatattctggatctattttatgcgcgtttttcgctgtggggatagaattacgcttgttttctatattttcaggttctttggaataatagaggtctcgggatgaaaaagtccaataaaagacgagctgggccaagaaaagtactttctgaggaaaaatgcatatctggccgcggctagacacagattggctgcggctagattgtgaagcaggagtgggattttcgaggctatagtcgccgcggcgaggggtagtgccgccgcggccatttaagagatacagagggatgcttattttgcgattattttgccgcggcgagaggaagcatggccgcggcgagatcccgtacggctcaggggcattttcgtccatcgaaccct

SEQ ID NO: 299298 - DNA, 615 bp, Cannabis indica
ataaattaataaaataatttttaaaaaatattgcgatatttatagaaggtgttgagccatgaatgatgtccaatgacaaatactctttcttaattgacatttttgtaattatttattgactttaggtgctgctttcgtagttgtagttgtagtttatagacctagctaggtagggatagagaagaaaggttaggttggttttagggttaggttttaatattttttgctcatccttttttcctttttataatatatataaatattacttggtcatctagacacaacacaagctagaaataaatagtttttcttcactaaaatatatacaacaataatcctcattattatatatattcacacatatatataaatatttatgaaattttttacaatgcaactctaaaagcattattaattcatttatatctcttttgacatttaaaatcaatgttataattatttaagacattctttgaaaattttgaaaaatttaatatgtctaaaataggatttatacagtttatttcacacacataaaataaaagagtactctcaagtgcaagaaactatttgaatcctattttcaacgtgttaaatttttctgaatctctcaaa

SEQ ID NO: 299299 - DNA, 3415 bp, Cannabis indica
atttcgacatatataaaaacacatatggcttggcttctatcttaaaaaagaagaccaaatataagaaatcccctagtataaaaaccaattccatagaaaagtaatgttttaagataaaaaattgaaaataaaataaaaatgtgagacaaaaagccaacatttaacattacatactgtgtcctcttcaaacaaaaaagcacaaacaatttaaaaagttataataataataaaaggtctttcccctaaaatgccaaaggatacaaccaaatatcccctgtaacaaaacttaaaaaacaacagactagaaaataagcaaaatagataaggcaatggagaaaagcataaaaaatgtcgattcctgataacttctttcccttctcctcatctttcctcctcaaacctaagctgtatgttctcaacaagcacaagttgtagtagaaacttacagcttgtcttcgaactcggaaagtggggtcatttgctccttcaaaccctttctcttcctgatatcagcaacaagtacggaagcttgagttccggcctccaatggatcagaagacatcatgtcccaatggtcgaacacacattgtgggaaagcctgtcctgaggtagcagctctcaatgtagctgagaaaccgaaagactcaatgactggaaggtatgccttgatgttgtaaagtggggtaccctgcctctgcatctcctcgaagacgtgtccacgcttctggttaagaacactgtagataccaccgagagcaccctctggagcttggatctcgaccaagtacactggctcaagaagtctaggcttggcagtgatttgggaagcatagataaccctcctggcagttgggatgacctgtccaccacctctgtgaatagcatcagcgtgaagaacaacatcacatacctcaaagcaaatacctctcatgttttcctcggccaaagcaccttccttagatgcccattggaaaccagcaacaacggaatccttaatttcattaaggtactgaactcccttacacatatcaacaaccatgttaggaccagtggtctcaggaccgaaacaccagattttcttggcaagatccttgtcccaaccaaactcctcagcaagaatcttggatcggatcttaggatcatctcttgggccaatacgtccatcatcaatagcctcagcaagtccttcctccaatggtcttgcttccatgtaaagacggttgtgcttgtttggagacttgctcatcacggtacggactgacttctcaaggacagtttcacggaaagacacaactggatcagatttgatgatttcagctccacccatgaagtcatcttgcaaatccttcaaacagatctcaagatgaagttcaccagcaccagcaataatgtgctcaccagattcctcgatggtacacacaaccataggatcagacttggccagacgtttgagtccttcaacaagcttgggaagatcagatgcaaccttgcactggactgcaacacgaacaacaggtgacacagagaacttcatagcacggattgggtgtgcatctacttccttctcattggtcaaagtagcattcttggtaataaattgatcaagaccgaccatggcaactgtgttaccacagggaacatcctcaacggtttcctgcctctttcccatccagataacagttctctgaacactcttgacatacagatctttcttctcaccgggaacaaagttggggcccataatcctgaccttcataccagtagacaccttaccagcgaaaacacgaccgaaagcaaagaatctacccttgtcagaagcgggaatcatcttagatacataaagcataagaggaccattaggatcacagttcctaatagcagttgcatactgatcgtcaaggggaccctcgtacaagttctcaacacggtacttctgagctgttgcaggagatggcaagtgaaagatcatcatttccaatagagcactacttgcaggtagccatgtctgcatgacacgcttcatcaatgccttgcccataagctccttctcatcattcttcatggtgacattaagcttcttcaacataggccacagcttatccttctggtcattcatacaagtggcaatgatttgcctgattggctcgtaacaaaactgaacgaaaccacgcttgcaggtaggagagccagtgttcttgctggtccatttcttggtggcagggtcaaaaaagttctcaccccagagcctttccatcatcttagactcatcaactccaaacttggaagcatacatgttagcaaagttggttagagtgaaagcccaaccgtgcaaaccagcagagaaggcaactgttcctttctcgggatagacctgaacgtcaccgagaagaggatcttcataagttgccataatgacattagcattttcaataaccctctggaaagtttggtaagcttcctcaccatccacctgaagctcaaggaaacacctgtccatcttgttcactgtcaaaacaggcctaatcctttcaccaagggcctgcctgagcacagtttcagtttgaacacaaacaccctcaatacaatcaaccacaacaagagcaccatcagtaattcgaagagcagcagtgacctcagaggaaaagtcaacgtgcccaggtgaatcaatgagattgataagatactcattcccttttctctctcctttgtagcagctcaatgattcatcagacatttggtagtagagagagataccagtggacttgatagtaataccacgctcggcctcatcagcacgggtatcagtcatacggacatcaccagcaacttcttgtgcgataataccggcagcagccaccaaagagtcggtaagggtagattttcctgaaataaaaaaaaatacaaacaatacaatatcaataaatcagataaaaataacaccaacagaccaaataagtaactcatcaaagcttcagaagattattccagtaaataaaaaacagacattatatgtatgcttcataaactcgtacaaggtacaataaaccaaatactataagacataccgtgatcgacatgagcaataacggacatgttacggatgttttctttaagatccatgatcctacgcaactcttctgctgtaaacttcacctgcaaataccaaaattattgtctgttaatattcaaatcacaagagccaaagcaccatttaaaaccacttaagcttttgcacagggcacttaccattttgactagttttcagttacccagatacaaatatacctgtcaaataaaagcaatggatattagatcaataaaaatgattaacaaacagaaatacaattatcatgaacattatttagtgaacaacctaaacattctcacataacaaaaacagcaaaaaaaaaaacca

SEQ ID NO: 299300 - DNA, 5847 bp, Cannabis indica
gggggaaagagtggaaatagtgaagtgaactatggttaattaattgaccggggtcattggttacttaataggcgctacctcacatcaatgaatcttcaccatccatattttgtccatgtggatttgattgtttctatgtttgttttaaattaaataaattattacatgttacaataattagtgcatatatatcactaaacatgtaaatgaacattttcaactcaataacggaccaataccacataatatacaaatatgtacacatgtgtaggtttttgaacccccaatcttggtaaaaaatgccaagagctccaagagttataggtaattttattgtttgttcttgaattaccatatttatataaaaaaaaattacattatttaggagcctttaaaaaaccaatctagggtttcatctccatggttagggcaatgcctctatctcttcacgtgatggtgctctagttgcgagactttgcaagatgcgggttcaagggaagtacggcaattgttgagcggagttatttatttatttttgttcttagcaatcgcggaaaactttgattcgtgcttcaccgacttagatggattgagctcaatactttttttcgttggagtgtgcttagttgttgtaaagatttgtgcttgttttctttttacgctagcagtgaatagttaattttcgcttagctgtgtatttacttaatatatggcatgtggtctattgtcttttagttcagtcattatacttgtattttagttcgctttgtttgaataatggtgtttattattcttgttttatcaaaattttgttttaaccaagttaacagtatctcgtaagatattatattatttttgaatttttttaaattatgactactttttgttttaaatttttagatttgaagtttatttttgtcaacattattggaagattgtaaaactagtggaaccttggagaagttgcatgtgtcatgtagtaaggctaaccaatttaaattcaatctacttcaaaagaaaaagcttttgccatattcaaacattattttataatattctttaaaatgaaattaataataaaatttcctcagcaatgtatccatccacattatataaattgacttaattatcctgttaaaggcaaggcaccactgttgttcccacaagtatattttcttgtgaagttgatgtcttaagctattttaagaaaagcaattagaaaataatatgtaaatatatatgagtattgatcttataattatcaatttttttttattataatatgaagataaaattattgaatcaaatctcacattccaaatgtgagcaatattatgtattgaaacaaagccaaaagacatgtaataattattattactagaagtagaatttaatttacattaagcataattaggtgtatatgattgacaacacaacacatgtttgaaattatgatagaaaaagaagtgaatcactgaattgtaggactgaatgttatgacgtggatgtgatgacgtggcatgggaaagtaccaatacctatacctataccaataccatactgcaaagacattgcctctgctctcatcactttttttattttcattttttaaataataaaataaaattggatgtggggtgccccacagtaagaacgccttgagctccactccactgaatttgaatgcttcacctaacaaagttactcttttctttagaattagatatttgccaaatatattggtttagttatcatcctattccacacaaaacaaaacaaaattcaattattattattattattacttaatcggaatctaatcattcattcatgcattctaatcaccccctctcctctttcctcctcaatatataaattcaattaatattaaaagcatatgattctcttcttcataaatcaaggaacccttattattattctaattctaaacataccactactactctactaactttcctcacacctgcaacacgtgtcaacaccccattgcctcatccaatccaactctctcttctcttccttacacacaaacaaaatgcaacaaattcattccaattcacttttactatacaattctaaacaaaaacatacgtagagtttagtttagtttagtacaatattagttcatgcattattagcataagacaagtatagattgcttgaatgtgatctgtacatacaataaaagcaatcaatcagttatgtttcaacaaatcaccattcattatatatttctttcttctctctttccttcctatgcttcttcttcttcacttaagcactgaatcccttctgcagagaactccaatgggttgaaggcatgtttacgcaagcttctgcagaagcctcggccatcttcttctcgttcactccagcattacacatgtttgcaaaggacctcatgtgtttcatgccgtattgggacagagatccacagtgtgtctcaaatgtcctcacctgcattgcacataacaaggtcagactagtataacatcggttatgaagagtgaatgaatataatgatattggttggaagtagtaccagtgtcttgagacatttccaatcatcaacaagtggaagtccagaagagcgaacggcgttgagaacctctggaccattcttaattccaaacaagagctttccaacaagtttcacactctcatctaaatgcattctgtgtgacattgcttcaagaaactccttctgggctttgattttccttggtgagccttcaggagcctttcgaaactgcaaaaggtagaacaacaagaagaaaccgagtcaaaggggaaagagaatatagcataagcagacacaaaatgtgtagacaaggagtttaggatgtaaccttatcccagaaatggacgagatcagcatcacgctggttaacggcttttgtaggtggcctcaaagagttctcgtccacaaaagtaaaattgtcatttgcaggatttgtaccaatatagttgaagagactgttttcgctaagcccaacatccccatattgcatcacatgagacccataagcagaattatcactggatgtcctcttcttaacctgaaaatagtaatgccaaccaaacacaattacttcatttttgcatcatgaatgatactgaaaatactacattttagcatatagatatcaaaagcaatactacatttattcggatagcaagcttaggaaggagttctcaccaattcatattgctgatgcaaagtttctgtccgcatattgtgtacatcactgtccataatatcaagattgttaatacagcttttgaaaaatggcatcttccacttctggtattaccaaatctatctaccaatatgataacaatccaatgaaaaaacaaaataacaaatgcaaatgcttaaaatacctgtcttccatccaagcaacactgtacaaatcgcccaaacaggtttcgtattctggtgggggactgggatcctctccagggcagtaagtaccccaactgctttcatctgcattcgaagcagtggttgcatagatattcaaaccctcagggagaagaccttcgaagatacttccagattcacaagcttcaaggtaaaacacctgcaaattttaaattagtcccaacccagctaccatagaatcaaaaagcatcagagcatgcatcaaataagaattagtaacttaccaagcttttgtaggtccctaaagcatgcttcttttttaaaacttcattcagttcatcagcataaaggtaaggaacggtaggcattcctattaaagagaatataaacaaataagataagagaatttttttcatgatgcagtaaagctgattgtactaaatcaagaataaatatccacattcatacttcaaacttccaaggatactagatacagtttaacaaggttgaactcgacagcaactcgatctttcaaatatcatgctaattaacaaatttcaggaaggatgaagaacaaaagagacaaacaatatcatcacttagatctacaaccaactatgtaaatcatgtggaaacaggatctaacaaaaagaagttgaattcatagaatagagaactactaaccaagaacaccaggaccaccatgatcagagtagtagacaaagatatgatcattgggaccactatctacaaccttcccactaccccctttaatggcagttttatttccgagaatggcagcgaaaaagttcccaacagtgacatcttcaccagtataatcctgtcaacacaaaatcagccatgtcaaggatacagcacaatacaatacaacaaaacaaaccgtttatttttaaaaggaaggcagaaaaactacctttggaacacctttatagacatcacccccatgtgggtggttaataatgactccaggccttgggttctcttcattggaagctatatcatcatacataaacacaacaatgttctcatcctttaaaccacctttcttcaagagttggtaagcatgacatatgtcagcctgaaaccaaaaacccacatcacaaaatttatgcttttattaatttaagaattcaattatgaacaaattttatgggatgatgacacaatatttaaagacaacataactaacacagtgaaaccaaaaccataaatttttcacaacaatcaattcaagcttagtttaaaagcaaaatcaagctctagaatgtttaaataaacaaaccaaaaagcctagaaaaacacataaacagatttaataattcttattttattttttctaaagctaataagagaaagacccaatcatgaggtaggaagagtaaaaggtgaaacttttaagacctgatgcctgtaattccaatacccatctgaaccagcaatcagaacagcccatctggtcccgacggaatcagcatcgtcggcagcagaattagcaggtcggaaaaatctggaagcttgagagggcaatcggagaacatctccgactagttcccggctaccggaggcgattacagatagagcaagaagagataggaggagggtgacggtgacggtgacggtgacggtgacggtgccggtggccatggcgtttcccggcgaagagagatattttgattgatcagataaagttttgggtttggagtttggagtttggaatttgatcaaaataaataaagggacgtaagtgggccccacccatcgttgattggtgttttttgcgaatgaatcacagccatccacgtcatcatgaccatgattgatttgaatcccccgaagcttcccattccttatttattttcatgattaatattttgttattttttatcgttccactcccaattttatttgattgggtgattctacaatatactctcttaaaaggaacttgtttcggcatccagttatttaagataacttacaaaattttgaaaaattcagaataatttacaatatagaaaacaatgttcaaaccgtctattttacacgcgtataaaataaaatagtcacgcgtgcaacacactgtttgaacgtatttttcgacgttaaacttttccaaattttttaaaatttttcatgatgtcttaaataactataacgtacgtgaccatgagaaaaaaatttgactaaaaaattatttcggtgctaaaatagataacggtgcatcaatgcattgtagaattttcctattttatttatctatttaataaagaaaatgctaaagtactctaatacactggagtgtaatattattattagggatattggcggctaaaccacttgaactttacggtttgtaacacttaaccacaaaaactgaatttttggcggctaaactacctaaaccctggttccgttttgct

SEQ ID NO: 299301 - DNA, 4869 bp, Cannabis indica
aactttttttttttttttttttttttttttttttgaaagaacctcaggttcattgattaaaaccagaaaagcttgggattcacagggggtaatccctccccttcaacaacctgccaaacactattatcacgacgagtggacttagccaaaaagtcaacaaacccaacaatgtctcttttaacaaaaacaatggcaacaagaaaaggagaaaagtaaattcaaaataacaaaataacagtaaaagtggcagccgagatccacttcggagatctcctcgctcgcaaagcatcaaccaagactttggagtcggagactatagacagatcgtccaactggttttggagagcccaatggagtccctggataaccgcaagcatttttgcttccaacgccgagttgcaagagccagaagaaacataggcccaccactcggaagaacatctagacagcgacaccatagcacaaccataactcccctcaaggaaggaaccatccaccagaagacaatgtttggtggataatcgagggagttgcaacgaattgaaattcagaggggccggttgaaccacatgatcaacatcaggatccaaactctaaaaatactcctaccaacctcctgtcgaaccgcatctacactctcgctgagatcccgtggagtgaaaaatatggttcctatgcttccaaatgctttcaatgatcacacccgcatatacaagcatccccgcatatacaagcatccagttctcaaagtgcgatccagagtagaacatagattgcttaagagagtgttgatacaatccccaggaattgtgccaattctaaccggtagagggccagaaaaccaaatcgcagaagcaaaagagcattgagcaaacaaatgtataggagtttctggggccgagagacacacaagacatagattacgagaactgaatttatcacctgtaggaatgatttttaaacaagaacgccaaatcatcatactcactcttgggtgaattttcgaatcccaaatccatttccagataggcttgcactccccaaatctagccttttgatcagcccaataagctcctttgacactatatataccagaggtagaatctttccaaatcagcatgccagcctcatcactcttgacaatttgaatcccagcaattcggtcacccaaatcaacaccaaaaagaaaacgcagatagccaatattcctacacctgcttctgcgatacatcaagttagcaacacatctaagactaggtgccttggatctgatactttccattaaatcccgaaattgctcataacccagccatggtatccaaggttgccaccaaatatcaatatcctcccccgaagtgataactgtacaagccccttcagcaatagttttcctggcatttaaaatacctctccaaacaaagctgtcactgtttttctcactgacactccaaaaaagtctccctaggaaagtatcttcctttgaaaatgtagcaccacggtttatccattttactcgccagttgccaagcgagtttggtgagaagagcatggttgatatcctcaaaccgacggaaacccaaaccacctctctgttttggttggcataaagaactccaagaagtggctgcccaatatttcttgcactcgggggaaccattccactagaatcttttaacaatggcatcaaactctctacaagaagatgtagggacttgaaaggttgacatagtatacgaagataaagcaagagctaccgagttcacataaaccgccctccccatcttggaaagagttttatgtctccaaccctccaatttgtcatgtagctttgtcctgagaaagttgaaatcctttcgcttacttcggctgaacaggaaagggttacccaagtgtttctcgtcatcacggatggccccaatgttcagacttttctcaatggaatctctcaacgaacgagagcaattactagaaaaaaggactcccgacttttgtttactgcatttttgaccggaccaatctttgaacttcttgatgcaactattaagcacttccacttcattgagattagctctagagaaaatgatggtatcatccacaaacattaaatgagatatctctagaacatttctagcaacccgaacaccatggaaaagacccttctcttgttcaaaagataaaagctgtgagaaaatttcattgcacaaaaggaagaggtatggagataggggatctccttggcggatacctcttccaggctggaatttcttgagaggccgtccgttaagaagaatggagtaggacacagtggagacacaactcataatgattttgacaaagtgagaattgaaaccaaacctcatcagcacctctttgagaaaactccattcgagacggtcatgcgctttgttcatgtccatctttaaagcctttaaccctccttttcctttttcttcttgatcacattcacaatctcttgagtgaggatggaggattccgctatccaccttcccgggaggaaggctgattgaaaatgagcaataatacgctgaagaacattcctcatcctttgggcaatgattctggctattactttataagtgaaattgcataaagcaataggccggaatcgatcaacagtgtcaggattgatgcccttagggataagacagatatgagtatggttaagacccgattccaacaccccggtgataaaaaattgttgaatgcaatggaccacatcctctcccacaagactccagtaccttctaaagaaacaacccaaaaaggccatccggtctcggggcttttaaaggatgcatttggaaaacagtatcttttatttcttccatctcatgtattgtcgtaagtttcaagttctcatcatgggtaatggaatcaggaatcaaagaatctaaaccctcaaaggacgaagagcccttggaggcgaaaagatctttgaaatagtcattaaggataacaccgatatctttctcatttgaaacgactctgccactaggatctttaaagttctagatatgattcctcttcctccgaaccacagtagaggcatggaaaaacgaagaattcctatcacccttagccaaccaaatttcccgggaccgttgtttccacatagattccttgcgcttccacaattctcccaggctatttaaaaccgtggcctcagccaataaatctacctcatgagcttctttggattgaagagtttggagctccagttcaagatccttgatatgcatatcgcaatctccataaacatgcttgctctaccatctaagagcacattgagttctattgatcttcttcccaagactgcacacttcttcactggaaatatcccgagtccaggcttctttaataacatcccaactagacggttcattgaaccaagcttcaaaaaatctgaaaggccgaaaagttttgaactgtttacagattttcctttttcagaatatttttaaattaatggttaattgttttttttttttttgtaaattaaactcttattcacaacgatcagactttaatacatcaatgagaaaaaaaaaatcttcaatccaagccaattcaccatccacccttagtgcatgcatagctaattcatgagcagctttatatcgaacatgaattagggatgtatcaagaaaactggaaagcaaactagcaatatcatctaataaggaacttagttcattacaaaaggaaaaacgcttcgggaaagccgaagccaaggctaagcaatctaactccaccacatgaagaggaagaccaagagtgagagaccaatccaatgcaactattaatgctaaagaaaagtttcctacaacaacaaccaacaagcagaggataagttcaaaacacatgcaactaaaaatgtattatttagtatataatcttaggttgtatttttatatgaaaataattaaatagtctattaggtatatatattaatgaaataattttaaaaaataaaatttcaattatattaacttatagttagctcggtagttttattaattaaggaacatgcatttctcaatttattaataatcaatttcgtgaaagaaattttgaaatactaaggtgaaatttattttactggtaatagtaatagtaattctcacaacccgagtcctaagctgtgatagatatgtaatattcataacttgagtggtcaaatgtcacactttaatttattcttgtaggaagataacgcttataaatgatctataatttttatatcacaaaatatttatttaaaaataatagattaactccaatatcgataagaaaatattagtaacaaaattaggaccactcattaatatataagaacaataatatctccacaattatgtagtcattgaatagatagtttaataaatcaacaaaataccaaaataatatctagcattcatcattcctcatttctaactagtacatagataatttaactcatctagaccatccatttcagcctaaatataaaattagtttcattagaagtttaataagtagaataagactaaactaattaataacgactttcttcgtcaacggtaccaacatcatccactaacatcaaaatgagttcttagaatgggaaaaatagggagtgagcttataaagcccagtaggaaaacaactaatatcaaaggacccttaatttaataaaaatttctccatggttagcttttaaaataaaatatctcatcaccattataaaaatatataaacaaagtagagagacacaaataatcataaaataaagtatcaaatgcatatcacaccgcccactagatccctagctctcaataccaatcatagaaaatgacatccaaaactggg

SEQ ID NO: 299302 - DNA, 2782 bp, Cannabis indica
ctctctctctctcactcactcactcgagtgcccaaagcattgacactaagtttgtctccttatctcacttgttcgagatctgccttacattgttctcactattgtaacattcagagagagccatactagaaattacaaggtaaaagtttataatctatgtggtattatctcttgaatcaatacaacaaaaaggagagtaagtcattacccactaatcaagggggtcgaacctctataaatcgatgtgttattttctttactttattatttacacgtggtgatttcgatcataaataagtgttgtcagttgaccaaatctaaggtcaacaaaagtatatgagaatgtcaagatatgatttctagtccttattaaaagtaaataaggttacaatgaaatagagttttacttagggtataaattctcaacaattacccacactgccaagattaactccacccatgattaataaaaagttttatagatcgttgaagtctccttcagacccgacattacctccatgctattcatgttggttgagaagaatattcaaatctcccataagagcccaatgatcctcgatagtagcctcatagatcctccaaaaagacccttcactcactcctaataggaggggcacaaacataaaaactagtccatttatcacatctcataatattgaagaatttggccacaatcattgactgttgcactcgaataatttcaatattaaccatggccttccaaagagacataaacctctcgctgcacccacagagtccacaacaacaacaatgaaaaaaaaatcctaatcttctccaaattccccctatcttagaaattgtaactttgattttcataagaaataaaaacatcaagtttttccctccccaccaaaccccgaagggcattaactgctcaagcttgccccaatccttaacagttccaatacaaagccttcatgatgatttggggggcatgagaaggcccgcctcactaaccatatgaaaatcatcatttttaataactgaatcatgagtagttctgcctcttccaatgatggcatcaaacaaaagagacatagaacccaaaatttctaatagatattcactagttgggtagcctaaatctaatttggcctgggcattttcaaagatctccactattttctcgaacgaaccatcatccttatctaaattgatcaatcttttgggtttatcctaattttccctcaactgtctttgaaggcaaatcttttagaattgcagttcctcagtcatcactccttggtgcacacagatagtaaccccacttttcgagggcagaagtcattctttcacttcttattcgcctctctcgaccgaatcaccactgtttcttctagagaaataaccaccatcttcctcagagcctgggaccagattaagattatccccttgaaaaacactacaaacgtttcaacaactggtcttctctttctttgaacttgagccccttctggattgttcaatccaccaaatatgggttttttcgggattcttcttggacccgtaaatctagttaagctaattcttttcattttatatcaaagttttacattgtacaatccatcaacttctttattcatttccttatattctatcttttaatatattttattcattttaaatatattaaattaatataaacacatgtacttgcatataaaaaataatttataacttaaaaacccaataaaataagtttagagcaatgaatagtgcatttccaacactattcattgctctaaaattttatataaaatagagcatctattgtacgccatatttttgataaatttgtatcttctcttatctattttagagaaaggccaagtttagagcatctatttagagtgctcctattattacattagttagtgtcttcacctttctcttatcctttctttttttttctttttttttatataaaaaaaattactcaaatttgaatattgttacttatcatatccttatataattacataatctcatcatattctctaattggagataagtcattttagtgttattactgtaattaaatagaggtttgtagtcacttgtcttattatgtaattaagtttacaaacaatttataatacaaattactaatttctcttttcaaaatatgttagattttagactctagtttatttatttttttcttaaataacattattgtacctaaatttaaaaattcaaaaaaattcaacaaaaaagactctgaccaagtgacaaaagacaaaactaaggcaaagctcaaacacaacgatacatgataccttgttcgggtgccacgtggcatgttaacatgaagtacacaaatagagtacaagaaacccttgttcatggaaacctagggtttcacttcccaacacctcgaacagagtcaagtcaattccctcatttgagccaacatttgggaaattaaccctaacatcatgaaattaaggccacgaacagagtaacaagcattaccttgttcgtgtgacttggttcaaagtaccaaggaagaattcaaataaggtaacaagaattattttcatcttactagaggagttgtttgtagctagttggaagaggcatagttgatgaaagagagaagcatcagtccttccctggcttctctttccatgaaaaatcagtatttttgttgaagaaaacttattgacattataaaagttattgggtgattctccaatgcacccccttaaaagggatgtactgatacacccttgacttg

SEQ ID NO: 299303 - DNA, 2228 bp, Cannabis indica
aaataataattaattttacatagaaatgacatatatataatccaatcaagccagcatgtatgtgatcttcaacctccaacaatggaggaccctagattgtctggttttgtttggatacacatcaaaataatatatggtataattgggcttctattttatttgcagatattataaactcaattaatattggatttctcttaattaattattattaatataatataaaagaatgtcactcatgagttgtttggcaaaacaaatatgagtgagactcgctcagtcaactccctcttctatattaattcccaccattaatatctaattatgtccataattattgcttttataatcatatacatatttatataaatttattataataataactctcttaaaattatactccaatgtagtaagattagttttattaagcgatcagttaataaagtagcatatgagttagctcgtacttcttgttttttgtctggttgtaatgttgctaacattgagaggtttttagtgagattttaggcttatggttgtgagtgagtgtttctatacatattcttcttctacctttttatgtatatagtgtaattgttgtaacatttatttaatctttttgctgctcattgtattatagcatctccaatgagagatgtaaaagctgagctatattttgtactaaaagtaattttgtgatatttttacatcaacttttattattgtactccaatacataattgtaaatcttgatgtaaaattttaatatgttatttaatgcttacttgatgatttattaataaatataaaataatttaatacaaggttaaatgtaaaaatataataataaaataataataataatgcaagtcggagtatgttagctaaaatttaataataaaatattaaaaatgacataataataaatataaaagcataacatttattgtaatgcaaattttgcatcatgctatattgtgatgcaaaatttggatattacgtttaatttaaatgtgagagatttttacattataatttaacacattattggagtagacttttaataaagtgagctatattttgtatttgcattacttatttgcatctctagtagattaggcttttatattacaatattattgtaatatattaattcttttctatttttattgtaataaaatttctaatactcatttttgtccttaattaatattctctatatttatttgctcttgatcaatttttttcaagccacacttaattacatgtagtaatccaactaacaactacatatttatttaaaagtcaaagttaaaattcaaacattttgacattttaaagactatttgatgacaaaatcaaaattattaattagatttgaaaaaaggcatactaatatatgattaattgtttgatgaattcatgttgttgagtgtattaataaccttgtaacttctaaggtcgtgggtataagtataaccatgtatatacacatgatatgattaaatgttataatgatttaattaattagttttggaatgttagaaggtcaacttatttaataattattcaattgattaatctcttatgatcttgtcatgttattgcaaaataatgttttttaatttgtatattgttcttctagaaaaaataaatagagtataggtgtgtatatatcatgtatagttgacttttataagttaaaatcattaggtttagaattatattttaaaataaaatagataataatatcaaagaatttccaatatatactaaaattttatgtttttttttgttttgttttttaatgaaaaaaatgaataattcatttaaaggcaattcgcctatatcagagtcaagaaccatacatcaaggaaaatctaatcactaaaccattatactttcaaaataaattaaatagcaaatttagcaagctcaccggttatgatagtggctctattaaaatgctccaatcctatgattcttaatttagtgttagagccatatcttttgggcgtatgctaatcctatctgattcacaactatacagataatgaccatgtccattctgatacggtttaagattagtgagcaaaaaattattggtagagtcgtattgagctatatataagaacttgagctacttcactcatcactaattagttttgagatgaaatcccataattctcaacaagtcaaaatgatcgtgtaccaccgcctctaat

SEQ ID NO: 299304 - DNA, 3030 bp, Cannabis indica
ttattgggctttttttaagttgctgaatgaaaatgagctaaaaaaaaccctaaaatctggtttttcatttgaattgtgcgcctcactgtttttacagcctcacatggctgaggcgtatgcctctctcctccatgctgaagttttttcacctcaaagtgaggggcacaataaaaaacgtaattttaaacattgataagaaaaagagctcatggcaattgcctatgcagtagccaagtggcatccttatttgttgggttgcaagttcatagtgcgctaggaccatcaaagtgtcaagtttttgttgggacaacaagtcgttaattcaggatattagagtttctaaactaaccagacactctcaatgaagtggttgatgctttgtcccaagaaatctcccctcattaacctgattttgtaggactttcattgttcacatatggggggccatgccagtgagcttaaaaacttacgaaaaggtgcaatcttatgttttgggaaggaatgaaggttgatctgcaacactgtcttactcattgcacgttgtgtcaacaaattaagtctctaatgactaccctagctggtctcttacacccaatcccgctgccagctaagttttgggcgaaatcattatggactttttcaagggtcttcccaaatcaggaggttgggacacttactagtagcgttgaccgtttaaccaagtatgaccattttaattaagcttttacttccctttacagctacaacagtggctgagcattacatgaccgatgttgtctgcgtacaaaattttcctcaacaacttttggaaacatttgttcaaactccaagggaccactctcaaacggatggacaaatcgagataatagatgcttaaagacttaacttcggtgcttcacatatgagaattccaagaagcgatctaagtggttggcgtgggcagaattcttgtacaatacttcttatcgttcttccctgaaaagtactccattcaaggctctctatggttgcgacacaccaccccttctaccttgcaaaagagggacaacaatcgtctctgcggtggactcgttgctggaatctcaagatgcaatacgtgatgaaatccatccacatgcacttgttacaagcccaaacacagatgcaaaagtatgtcaatgccaggtgtcacgggctgcctatttggacactcccaaataggtgggacgtgcggcacttgctgacacaccgagctagctagttagcctaaatgcgcctgcaggcaaacaagttcaaaggttaggcacgatacatgtctcgcacatgttgagtgcaaacaagaagcatgagcaagcaaacacaaagcgtcctcaaggaccaatctcacacaacccacaagcaaacatatagacaaatggcatgcaatggcccaacaaaggcaacaaataggcatcacgaagaccatatagaagcatacagaagaagtatggataaacatcattttattaatatataacctttgatagggcaagggagtacacagctgggcccctatcatgctggtaacaaggtgcttcataagtcacctggtcaccccgagcttattggggttttaagggatttccaggaacatagatgattttagctctccatacatatgtgggtggaaatacaaagaaagaaagttaaacaacaaaaggttcccaacccccatgaggtgcttggtgcaagacttgactaatgatcaagcaccaaggcatgctcatgttacaaaataccccaatgaggtgcttggtgcaagacttgactaatgatcaagcaccaaggcatgctcatgttacaaaatggccctattgtgggtgtgccatggggcagcacgccacattctcccccacttaattgttcggcgtcctcgacgaacctgctgcatgatcttcaatcttctgtataaactgctgcaagtcctccgccttttcccagctgatctcgtcatcagcaaggcccttccatttgaccaggtactcttttctcttctttttcttcacacgaacagttctttcggcaaggatttcttctggttctctgctgctgcgtcgttgaatgctgatgtcgtccctggtagactggttgcgcgctggatcttctggatcttcatgatacggcttgaggttgctgacgtgcaggaccgggtgtatcttcatccatgaaggtagttcgactttgtaggatgctaggccaattttggagatgactggaacagggccctcgtatttgcgtacgagtctgatgtccttgtcccctcggaatctcaattgttctggccgcagtttgatcaacactaagtcacctgccttgaactccagcggtcggcatttctgatctgcccacttcttcattcttcgtgaagctttctctaggtatgcttgggcaatctttatgttcttccattttttcgtaaaattgaaggctcgcggattccgttcgcggtatttatccactgtgtggggtaacagtggttgctgtccattcacaacttcaaaatggctcttgtttgattaagaactcttctgagagttgaaacaaaattgagttacgtctagtagttgcggccaattcttctggttggcattgacaaagtgtcgctaatactcctccaacatcccattgaatctttctgtctgccaatctgtctatggatggtagcttgaggagatgtttatctgtgacccaagaagcttaaataattcggacaagaaagtccctgtgaatcttcgatctcggtcacttactatattttggggtactccctagtactttactatatgcttgaagaaaagttgagctgtctcttgcatacttagaaaatctgtccacgattaccaagatcgcattcaagtctccagtcttcggcaaacttgaaatgaaatcaagcgagacactctcccatggtctgcttgggactgacaatggttctaacaatcctggcatcttgtgtctctctactttgtcctgttggcagacgagacaagtccttgtgtagtccaccacatc

SEQ ID NO: 299305 - DNA, 3137 bp, Cannabis indica
gtgtgggccctaggcacgggcctcgcccgcctatgcctagggtcggccctgggtgacaagtattactgttagttgtaatcgttcaaggtctcactgcctttacataattaatgaattgactcctcaatttctttcttatgcagagttgagattactttcgaatcttggtatcagagccaagcttgctcatgcatcaatatcgactaggaccagtcatagtcaacaacactacaagtctatggataagtatagacggaccaccaatctcctacaaatgttggagatcaaggtctacaaaagagtcaaaccagctccctaccaatatttcaacacgaatctagtggttttacaagtttcccatttggtaacaccatcttgcaaccttttactataaaagtggatagaaacgactatgtattgtggaagacaatggtccccactactatcagaggccatatattggagggtttcatcaatggatttaaactagcacctacacacactacaaaaaactgctatttttagtgacaactttttagtcacaacataattttttttatgattaaatatgatttttagtcacaacaaaatattatttgtgactaaaacatagtatttagttacaagttgtcactatttagacttgttgtgactaaaaatacatttagtcacaacaaattgtaatttttgtaactaatatctctaaccacggaccttttagtcacaacataagaataataatttataattagtcacaattttatcacttttagtcacaagttttgttgtgactaaaagtaagattttttgtagtgacatttcatcccaacaggagttgtaacaggtgatggctaacctagcttcgaagattgtgtgaatcttgactatgaccaatgaattacgtgtgatcaattactcacgggatgggttacacttcagctagatccttgtggatagctctaaaaaacttgtatggagctcattctagagctaagatggatgatttgagaactcttctacaaaccactcacaagggttcagtctgaaaccttagaaaaaaaacttgggcaaatcaattggctcttgcaagggatccataccctgagtctcatcttgtgtataatgtccttagtggattagatgttgagtactttactattattgctcttatagaagctacaaaaatcttcattcttgttatttggtaagaacttcaagagactcttttgagttttgatagcaaataattggaaaggctcatgggcctaggcaatggaacaagactaccaatccttctagttcaacactaccagatgctcatcttgctaaaaagtaaaatcaatctaacagtaataataattgtcatggaagaggatactcctgtaattcaggttatgaaggtagatgcttcacaaagagaaggtagcaatggaagaggaggaaaaggtagaggtggtggtggtaggaactcaaaacccactttttaggtctgtgggagatatggacactaaataacttactattacaataggtatgatgaaagctatggggatcacacccaacactggatctagtttaggctaagagaagaaagatcctaccacattcataactacaccaaaaatagtgaggttggtatgcagagactggagccagcaattatattaccactgatgctaagaatctaaatcacaagtcaacttatggaggtaaggaaaaacatactgttggaaatagaactggcaatctctattccaacaatggacatactattattcttaaagacatgttacatgtaccacatatcacagaaaagaattaattagtgtgtcaaagttaacttgtgataacaagatttttgttgaattttactccgacttgtgttttatgaaggatctagaaacaaaagaggtagttctgtaggggaagcttaaaaatgacttgtatcaacttcaaagtccaaacaccaatcacagtacttatcgaagtgctttcaatgtgtctgcaataaaatctcattctatttttgagtctattattcaatttctagtcttgtttctttgttagatgagtcaaatgtctctaattctagtctttccctcaaagattttcggcattggagatttttccacccatcttttgaagttttaacttaagtgttaacattacacatgtaaaaatttccatgaatgaaaaacaacaatttttgaagcatgtcaatatgggaaatctcattctttgcctttcaagttatctaacagtagagcaaaggcacctttggaactaattcatactaacatctggattccaatgcatgtgattgttgggatatatgttactaggatgtagatttactaacaagtatattggattatattctataatctaccaccctaatcatgaattcctaaaacaatgaaaataaacacatataaagtttagtaaaccttacattggtggcagcagaatgtaatcactccttctgttcagatctctaacccttattcctttttgtcccagaataataacaagatctgaacctggatctccttcatgtattggattctttaaaaaatgttccacattatgattgaatacttaacttgatatgagtgggcatgtactcttcactatgggttcaaaaattgatgaagaagaagagaagaaattttaaaatagttattgaagcaggctctctttttgctatcagacagaaaagtctgatgtaggttatcttaggttatgagaacgagagccatcttattccttttataggatatattctagggtttaaaaattaaattatatggaataaaaaagattaaataatagcaaaataatcattaagtggccggccatagtaagtggaccccactagttacaatttttctattttattcaacaatttatcctttctttcactaatgtcatatttttcaattatactcccgtcaaaattatttatttaataattataattaattatcaaataaaattaccatttaacttaattattaattagaccttacaaagtctcttaattaacaaataaactctaaaatctcttttcttcataattaagtcattccttagtgaaaatttataaaaaaaatatagtctaaatttagaattataat

SEQ ID NO: 299306 - DNA, 2866 bp, Cannabis indica
acaaaacaaaacaagaaacgccttcccttaaacctctaagattatcataccgcaaaagctatgagtttaatatcgatattcgattcatataggaacacaatgctcaacataaactacacctatctcatagacagagaaaaagagaataaacaagctggtaaacgagttgttcggaatatcctatcacagaggcaagtgaaggtcatagaagcaatggtaataactatttcaagtggatctaaatctagtcatcaatgtcaaatagatgaactaagaatgagaacaaactagtaactagatgagcaaccaataacatcaccaaagcaaatatatgttgctatgatttgatcatcgaacgtgaaaattcgagcttttgcagtcccaccttgtccataaattccaaacaaattgcacgcttccagcagacaacattgactggcctgatgcaggaggacaacaacaatcaaaacagcaagcagactttcttttatctgaaatccttctgaagtggtaggaagaaaagaaaacaagaaagaaataactcaagcactgatgaaccaaagcaaatttcgcctacattgcaacccaactaacactaacacaaattcttgtattaaggaaaactaagacacttatcctcctttagctaacaattcaaaacatgaaaacaccaggagaaacaagaaaaggctaaaactcagcttatactaacatggaaactatataaccaaagttttgagtttgtgagcgacataaatccaatgatttttttagcagcataattgtccaatagttgtaaaactgtaatttcccttcaatttcgtaagtacagaattcgtttagaatttattaaaagatgatttgaaagtaactgatactatatattttcctccacagccaatgatctaggatttcgactatatatgtatcctatgacaataacagtcttttgtagtattgaaattgaagtaaaattacaattttacaattattggatacatatgccgctcaaaaaaatcataagtttatgctgattacaatatcaaagttttgagtactaatcccactgtttacctttaggaaaataaatttacaccattagccacatcacagcactttacatagagtcatgatttcatcatactcaagttgatgtaaatttgattctttttaagatacactcatttttctccattaatttaaccaacatgctcattaaaatagttcagcagagttcaaaaccaacctattaagagctcacatactttacaaaaatccaaacttgcatgaaataagcaaatgggacatttacaaaacaagaaaagaaatgacctgtaagaaatatccaagactagacctctgaaacaagctagttcatccctctgaaactcaagatcaccatcatactcctcctcaccaccaccataaccacgatcaacaacaacttcatcatcaccaacattcaactgggcttcgctactactgaaacttgtggggttatttaagaaagaagaagaagaagaagagtaaattcgagtagtggaacctgaaagcttgagcttccgcttttggggttggattgatctaaccttaaagtgaaatgggtcattgggttctaacccaaatgagactcctccatcaccgccattgaagagcagcttaacgcgtccttgggcagtgaattgtgccattaaagttacaaagtttgaagctttatctgagtctctgagatgggtttgtgtaaaaattgttgcttgatttttctattctttgattgatcaaaattttaagtttgaaaaaatataataatggttatgagcacggaacaaaccgttaccacatattcctttttcacactaccaataatatctttcataattttaggttcatttaccaaaatgaccttcacacaatagtttcatatttaaacatgtgtttttagctttaacataaaaatttattagaattctcaaatttaccacatgtttcttgaaaggaagtaattcattaagaatgctataaattagccaagatcaaacaatcaaccgagttaggactatccgaccatcacacacatgttattagatgaaaagatagtcaaattagtgagtgagtgtgatatactatattgatctccctaggactaaagatgaaatgaacatgagcaaagtcattacattacaaatcaacaaaatgtcagatagcacaataccaacaacatatgcatcaacagttttacacatttaaatggcctaaggttggggttcggagtcccaaggcctagcttgtgcctaggcctctagggtcggagtctagagtcgaggtcagggctagggccgagaggtccgggatcggagccgagtttgggtcaaagtttgggtccaggtccagagttggggttgagattcgaagctggggtcttaggtcgggtcagggtcgtggtctaagttttggggtttagggtccaaggttagggaccatggtctagggtcaagggtctagtgctagggtcaggggccgagacgaggtctggatttgggccaggggccgagtccgaatccaaggttcgaggacctagtttggatctgatatacaaggcagggttcagagtccaagatcgggggcgtgtttattgtaaagataatataattttatacgacctattaataaaagtcaatactaaacatagtattgtattaaataataaaatttttgccgactaaactctctcaactatcgtttcacttgtacttaaccttctaaacttaaattttggaagtaaaacattccaaactactcaactttgagcagatttaacatgtaatctggttaattggcaccatggactacttatgtgtacactctt

SEQ ID NO: 299307 - DNA, 3428 bp, Cannabis indica
aaaaaataattaataaataaaataggtccccatcggggcagggagtgccatccccgtccatgtcccgtttaatattcggggataaaaaatgatctctgtccctgtcccattcctatttagatggggaatctttgccccattaggggcgggtccttgcaaggccattactatagaaaaatgtgcatccctaactatttttttttaccgtacaactacaactattttttccacaacattgtgccaaactagcccttagtatatttatataataaaagtattgtttcttctcaataggctatatttaacttgctaccaaccgtgaaatatttcttttaaaaagactaactaatctaatgatgtaaattcggggtttcctttcctataaagaaataactgttgacaggaaaacgtttcattcacggtctaacaaatttgttaaaaatcaatacattatacatggtttcgttcaataatatttaagtttgacttggtgatgcatatatttatatgtaaaattctaacaagggaagatacataaaatcaattagggaaacatcatagaaatttcatccatgaatggtcgttagaggaaaaacaaatgatgcaaatttgtactttaaaaataaataaataaaatggtatgaggatgagcaagagcatgtcatgttgaatgtgtgtgtgtctatatgcatattataatttagaaattcaagtggtcaagacaatttatgtgtatcattaaattacactgtgaaagtgcatgaaatatctaacaaccatctatctaaaagaaccatatatattgtgaacacaagaaagcaagtagtaacaaagaagataaagtggatagattaagattgcataataatcataaattaatatagaaaaaattgcaacattatgaagattcacacgcgtgtgacatgcacacatttaagatatcatgtcattaaagaattattctattattattttttcaattccaactaataataataataataaattattgtgtatgagcagtagagaaaaggtaataatatataaaagaaagataagggcccaggtggtatcccagtgggattacaagaagacacgaaatgtggtgagaagccaatgagggagtcacgggggttgaagacaaggagaccaagtaggtccaatgcggtcccctacccaatcatcatttgtggggtccatagcctccgtgttccacgtattgtcccaaactaaattaaacaaagctgattcagaatgatgatgatgatgatctctaatgataatgatcatgatcatgatgatgatcaaagtggtgtggtgatagggtcccactctcccactcctacccttttgttcacttcccacgctgtttgccaaaaatatgtataaatctctcctcatcaccgctttgcctttggaaattaagttgcctcgggccttgtgcgtattgtgttatggcttggctcgaccacctcacctgactccatcgatggcggcctcctcacgccatcactagtttggatcatgcatgatacgcccaatgcctcccccaaacaaccacaccctaccattatatattaattgtaatacaataatactgtataaattcacaaatgacgaatgagaggtagataccactaagttcacatacgtatatttacaaatttatatatatttgggctaggtaggtaggtaggtaggttgtaattaagctttcacccatggtacacaaaagcaaaaggcgcccactattaggccgaagaaccggtggttgtagcatttaatatttctgattgtcaataatatgcatgaattagtgtcccaccgcgcggagttctttttgttaatttttccttttaccgaatatttgtatatatctatcatagaaggattatttgtcttaaaatacatatacataggtaatttgcagtcgaattctctactgctattaaaagaaaattagaaaattaactgtacacaaattaaaaattaaaacatatataggtgtggcgtaaattacccatataaatagcttaattatttatttgatggtgtatgaaattaattgaaagaaattcaaaaaatttagagcaacttaaatcaactacactaaaaaaatactatttcaacattaattttttattttaatttcaaccaaaacactaaaaattatattaaatttattattacattatttgattaatagattatattattatataattatttattttttaaaaaaggattatttaattattaaaaaaaaaataccttagtttgcctgctattgttaatatgggacactgtaaacttccatgaaaatataaatacttttacaatttagttagagacttttggtaaaaaaattatatcatattaatttaagttattaattagtgaaataactacatttttttttattattgtagtgataaatatatttttaaattatagaagctaaattccaattgtaggacactccacacacgcaccccaataaacaattagaagcctgaactgaagtggtgttaaacaactatagtttgatgtagtacaaaacaatgtattttctcaaatttagtctaatataggaagtcgtacgtacgtggatacgtactatacatttattgtcgacaaccgtactgatgatagacaagtataatagcaaataggtgttcaaatatgaagatgatggttacagcacggacgtacgtatgaacgacgcatctcgcccccgtgcatcacataaaagtgtatttaaatataaatctatcttctttcaaataaaattaaataaatatatcttgtattcatattcatttcatatgtatgtttttgttaccaaagtatattaatttcatatgtataataacatcggactcgtttggtatgccgtatgtattgtattatattgtgttaaattatgttgtattgtattgtatcgtattagtatttcatatgtattataataatattctacgttaatttacatattcttgtttgatttatatttagttatttgtatatataatatatgtttaatttttatttcatggattttttataagttatggccttacggggtagtccattatctcaccacataataattttcgcaaaattcgtttacgttgaattaattaaaggaaaatttgaatatctatgcattaattaagggataatatgaaaattgaaaatatgtaacaattttatttaaaatccaatactatccccctcataacttaaccccatctctctcttccccatctctctcttcgtctatctctttctctctcaaccaactgaaccacatctcaccgccgtccaaaaccacaacccctaatccccctcaccgccgcccaaagcgccgacccctcaccatctctctctctcttccccatctctctcttcgtcatctctctctctct

SEQ ID NO: 299308 - DNA, 3505 bp, Cannabis indica
ctttcatttcaacttcttcaattctttcttctcttcctgtttctctcattctctctccctcttgtaaaagactacctaaacttaccaccgcgctccgcttaccaccgtgcacctctcattctattactccctatttgagcaattcctaaactaatgtatataatttgtttttaacagatcgacacatttgtgtttatattttgttgaatttttgcccaaagattagattttgatttttttgcattttctatgtttttttttttctagtagtctagtcttttgcgataatttatgagatttagtgatatatatacaatgatagactatatctgaagttaggaattaattttagcgatgttttgagatgtttgactaaaataataaatgtttacgaatttagcaatgtttagtgatgattttgcaatgtatttgtgttatgagactaaaaatgaaacatgttgctaaacatcactaaatcacactcaggttttcacgatattatgtgatgtgctttgcattgtctagtttcgtattggaaataaattacaaaagcatcgctaaacttcatttctagcctcaaatttggtctatttacaaattcatcgctaattaaatattgtaaattatcacaaaagttggaaaaaaatgtagaagatgtaaaaaattctaaaatcaaatttttgggcaaaaaaacaacaaaacactagcacaaatgtgtagatctgttaaaaataaactatatacttatagtttgggaatcgcccaaacaaagagcaaaagaatgagaggtgagtggtggtggtgagtttaggtggtcttatatgggagagggggcagagagaatgagaggaagatgagagagaatgaaggaaattaaaataaggagtatttttttgatttaggtagaataataacatatttgaattatgtgtttaatggatcgattaatttggatccatgctttataattaagcatggtaacccaaacttttctaataatatgtgtgttccatccatgttaataaaaaaaaaatatgtgtgtttcatcaattgaaatattatattttttttttctaaaaaaaaaaagtgagagcaattataaaaggagtgtcacgtacaatattataaataattctaacactattttttatatgtcgagatacattatagttatattaggtcttcacttatttttagcaaatttaaaataatttataatattaaaaacaaaatttaaaataatcaattgcatatatataaaaatatatgtgtaattaaatgtttgaactcttttttttttagaataaattattctaaatttttgtaaaataaataaattctccactgtaactacattctacacaaaagaaaattagagatataatattttttttaagtgttgaaaatagaaattgtaatgcccacgtttcagctgtgtagtcccatactaatatatacaggtacgtgattttggctgctacctagaatgacgactagccctgcaaactaacacgagtctttccaacatgttttgtccttgctcgcacatttcctagaaaaatttctcaagaggtcacccatctgaagattgctccaggtcaacatgcttaattttgaaagttcttaattgacgggctactgaaaaaagatgcatcttgttgatataggtagtatccatcaattcatctaagctcttttaaacagtgtagtcccatacctgtacaatcttaaaatcatcatacttgaccttcttaaggcgatatacgattgtacaacttacccagtcttttcccttacagataacgagatttctaactgtcacaattaccctcttatggggttcaacgttctcctcgaccacacttctagttgggtcaaactctaatactatttgtaatgtccccacttcatttgtgtagttccatacctacatagtatacacgggtacgtcactttggctgctttgtggaatgattgaccctacaaactaacatgagtctttccagcatgctttttcctcacttacacatttcttgagaaaatttctcatgaggtcacccatactaagattgttctaggtcaaacacgtttatctttagatttctcaagtgatgggctaccgaaaagaagatacatcttgttaatataggtaatacccatcaatttatttaagctctgttcaattgtgtagtccaatataaactaattcttaatatcatcacacttaacctttgtcaggagacgtggaattgcataacttatctcatctttcttcttacggataataggatttctaaccgtcatagaattaccacttgttataggaaaaaaatggtactgctatagtataatttttccaaaaagcttttaagtttgcataaatataatagaaatatagatatattttaaattgttttaaaatcacatttcttttaataacaagatgcttttattaaataaagatattattcaataccagagctcacatctcagagagaggagtagtctccacactaataaatcttgaatgaaaataagatgctctcgctatatagctagaaatatttttttgcatatcgtttagcaagacaaataaatgcatcagttagacaagccaaaagtacaatcatcaacaattaagccaaaataaaagacgatactcaaatgtcatacccacatttgttttactttgtaaaattgctatttttgttctatacttaaaaataccaaaacatattgaaaagggaaatttaaatttttatgcttacattaccttaaaaaaatttccctaaatttatacttaccaatatttctaatatatgacaactttattgttttctccaaaataccctcccccaattacatcaactcctttcttcccatcatcttcccctaaacgtacaacggaccaatcaggcccaaggcatcggacccatcgagcccaaggcatcggacccaccgagcccaagcaccctaaaattggaccctatatcgggccatcgggcccatcgggtagtcatcttcaacctccaaccaagctcccattgggtagtcatcttcaacctccagccaagcccccatcggacccgaccatcggacgggcatcgggccagatctaaaaaatcccattttcgaccgatctcttcctaatcttcctaaatctaaccctaactaacagatttcacacaaaattgcaacatattattctatttcattaatttaagcacaaaaaattaaaggaaaaaattgaaaaaaaaaattatcttagacattttgggttttgggcggtcaacgtgggtgatgtgggttgaggggggcggtcggccgtgggtcacgtaggccggtcggctgcgtgggtggtctgtcatgggtggtctgccgtgggtggtctgcgtgtgtgggtgcggcgaggagaggcgacaccgagcgagagagaaagagagaaagagaggcaaaagagagagggcagatttcaaatgggaggggggggaggggggggggtaat

SEQ ID NO: 299309 - DNA, 2105 bp, Cannabis indica
aaatattaacggagagaatacaaaaggtatatggatgttggtctacaaaaatgtgataaaaaccagaaatatttcaaaggatcaactagaaaactcaacaaaatccttaaatataagaagaacaatatagttatattcctttgaagtaaaagccccaaaagaacctgtaaattggttaaataacatcttgagctagttatctagaagcattttaatagagataattatttccttactttcaaaatttcaaaactcattacaagagaaagaatataaaatggcattcttgcatacttttgacccacagtgtcatctttctcggacatagttctaatttagaatggagaaagttgtgtaaaatcataatgagagagaaggccatacccaaaattccactcagcacaaacataaggacctatccgaaggtgaagatagagtccactggatcccactagctttacaaacttaacaagatcatacctcccatcaaaattgtactaaaaaggaagttcagaagaaaagttaatactctagcccaaacaaattagtcatattcaagacaataataaggctctatctacgatatcacctctcctttgacaggctcatgcccattccaaaatacataagtctggatcacatctgcaccaccttccttgctcttttcaatcaaatcgggccacatctgatgtcaaggggcatgaacagaacatgtttcagaaaatagcagcataaaccatctttagaatgaactatacatccatattatataaataatatattcttaagcattcaatttttgtgatgaacaaaaaaaaattgttataagaaaaacaatgcacataaagatcaactgaatgaagaacatgaaggaaatcatccaagtcaaaattgcctaaaatagcaccaactgcaccaaaatttcacaaaataagaagaccgactagtataaagaaaagaaaaatggactgccattacttgggcttggagcaaggatcaaactcctgttcattttcagcaacaatttaatcagaataagtgtaaactatatagaaaattcatgtcataccacagattcctgtttaagactcaacaatattcttcagcaacgattgaaacagatagcatagtggtggtggaagctattcgaagctcatttcagatgtgttctgcatttgagtttttgattgatgattgtaaaaacttgttgggtttattacataatgtttcgttacattttgttatgtttgttaagtgttctgcaaatcgagctgagcatttcattgtcacaaaattctcgattgatagcaactctgttccttctaaattattgtttattcttttgagcgattgctccatttaatgaatatgaatttgttcaaaaataaataatcaagtttgagcgttacttaggactataatgcttctcatccacctaaatatcaaagaacatcacaaattaaccaaaacaaactctatccttacacaaaatccaagtctcctaacttcacaaattaaataataattcactcaaatcatcaaaatttcagccaaaattttctcagcaaccaaacacacacaaaaacagtataataagcaattaagcacctcgggagtggctcgagggtagtgaataccggctgagatgagcatgcgacgttttccgtctacgatcatagcccgatgatcgtagctgacgttgaatggcttaaagtactcggcggcgagtgcgagcagagacaagtgaatgctgagacataaaatcagccatgggagagtcatcgaagctcttcgccctaccatcttcgctctctctctctactgatcttagagagagagagttatgagtgttgttattgttaagagtggtttctacgcgccaacggagtaagcaatggaaaattacgatagagatgttgcagttatccggttgttgcctacgtgtcattcggttcgggtcgggtcgggtccaatttgtaaattgggggcaaattgataataattatatatatatatatatgggtgactattcaatggttacatttttattgtaaccatatagttacatttttctttaacctgtaatagcagcttaccaataggta

SEQ ID NO: 299310 - DNA, 3267 bp, Cannabis indica
ctatcaaaattactgagttcaaccgcattttcaaatttgccctaaatttcccaaaatttactttaattatttcatatcatcgtaattggaatcaaatggtgtttcctttaaacaaaaggattgtaattaagagattattcttataatcttggatgggtcgaacttaaaaaaaataaactcttatgctataaattagcataagtgaaattgtgttttgaatttatttttatattctaaatgtgaaatttttgcttaacactgcccataaatacgtccatttcacacgatcaaaagctttacttatgtccaacttgattgcggaataactttttgctcctcttgttttgtgttggatgtggtgaataagttcaaaagcaactaaaatgttatcgtgataagtctattggagaggaaggtactttgtgtttcggaaattaccaaaggcatagcttccttaaatctcatcaccagcatctttgaattgagtttatatatgacattgcacagactgattggtcgaaaatcacccatacttttaggagacttaatcttcgggattagagtgattattgatgtattgatcaactccatactgtgaccttcattcagcactcttaaaaccaccttgttgactattggacccacaatatgccaataattttgatagaacgtagccgacataccatcactccctaggtttttatctggactcatagatttcaaggcatcaagtacatccaattcaataaagagaagaagaagtgactcatttaatttagcagtaatcattgttggaattgttgcagtgatgaattctaaagcttcattgtccataggagaagctgtgaataaatcagcaaaatactttgaaataatggcagtcatactagctgttgatgtcatcaccataccattgctatccttgagaaacttgatcttgttgttggctttccttgaggatgcatgagcgtgaaaaaacttagtattttggtcaccactttgcagctaatctactcgagatattttttgtcaatacatttcttcttaagccaaaagatcatccaatattttctatgggtttttcaagtccaccatgatagcaccagatctgtcttgttcattgttaagtgcagaaacatgtttttgagcctatgtaattttttccttgaagttaccaaacttagttatgccactgctgcaatgacttggagcattccttcagattatctaaaaaacaatctatatcaatccatgcatgtgaagatttccaattttgttggataatagatgcttcttcctcctgttgcagccagaccttttcaaatctaaatctggttttccttttctgttgctattttgtgcatttggagagaaaacatctacatcaattgctctatggtcagaactataataatctagatggtgagtaatgataggattaaaagttaaagcccataaatcattaacaaaataccattctagtctttctttgattgtaaccattgagtgtcgatttttaatccaagtgaaaggatccccctcgaaagattgctcctgaagattgtaagttgcaagtgttgttctaaagattttcatctgactttcatttctcaaatctcctcccaacttgttttgattggataaaatttaatcaaagtcaccaataaccagccaaggagtaatgggtgccacatctttaagtctttgcaaaagtgtctatgtttgcactctttgttgagtattcggagctccatagaattcagtaaaatgccatcttggctcattagcaaaagtaatgtagcagtgtaaaatacttatattataatttaaaagtgttacatctacatcatctttccataataatatcaaaccatcacctaaacctattctaaggacttcaagtccattattgaaatgtaaaacatgacaaaaacgagaaataacattaagacctaacttagtttccattaagaaaagtatattcggggattgctctttgacaagaaatttcaaatgacgaaatgcatttggatttcccagtccacgcacattctagctaataaatttaatggctgatggcgtggctgaaaactagcatgcgctgtattgtcaaaatcactagtagaattcataggtgctgcaaaaacatactggttttgctcatcaactactatcaaagtagaagtgagcaaaggccaagcattccctttgccaaatctgttctatacatgtcatatccagatgtagggagggctgacccttttatagttggtctatattctagatccagttcctctccattgtcaagtttttctaagaaaaccacacagttattataagaatggccgagtttaccacattccatacaatattctggcagcctctcatatcgaaattcaacccaaatcttatcccttgcttttggaatgtgatcatacgtccccttagtaatggctttgtaacatcgagtttgactcagatgtgcaagaaaggaccccatccttcatataaagagtcttgaaagacttctataaattcaccaattatattaccaagtgcctcagccaaaaggggttgttttactcatgaatggcaaacggtatacttgaacccagaaaggcgaaaatttaagatttgaataagtgacattctaacaagcatttggtgtgtaaagcacaatatgatgattttcatcagttactaagagtatttccaatgatagcattctttaagagtgtcaaaaatttccacatcatttatttattttatgtctcttgcacattatttttggtacttttgttttaaaatgatccaaaaataagtatctctaaaaattattaaaataatattatataattatgtaatttatattaaataaattaatttttttactttatgataatataagaataaaaaaataagaaagagaatatgtaaataatgctatggtatgatattcttttgtgtttttttttgttctaacaataagcatcaatttaaaaaaatattaaaaatatatccatatcatcaaatatctttcgtagcatattcattagagatgctttaatgaacaactctttaaaggctcgttctagtatttggtcgtattgtattgtattatattgaattgaattatatattatatttttatataatattaagttaaattttaatttatactaaatattatatatttaggtattcataaaaattaataccacatatagttttatataaaatattatataaaaatacaattcaatataa

SEQ ID NO: 299311 - DNA, 4058 bp, Cannabis indica
aagtgtaaaaataaaaaatgtcctattttatttataaaactatatattaaatatattattattattattattattattttgagataaaataacattgtattgataacaaaagttaaaatagaatagacataattagaggaggtacttcctcccgccatgaacaattagaatccaccgaaagagcaaatttggctaacaggtgagccgcattattagcagatctataaatatgatagatttgagttccatggaaattagatactaaaagtgaaatgttgtttaacaaataatgaaaatctgaaacatgtctttgagaagcttgcaatccgttaaccactaacagagagtcagtctctatatagtgaactggtaattgaagttctttgagccattgcgagctataaaccgaagtcattgcttccataacttctggtcgaaaatatccttgaaaatgcatagccattacaactattatatctcccttactattacgaaagattgcaccgaagccaggcttgttattcattaactactgcattagtgtttaacttcagccgactagagggaggattcagccactgaggatcctgctacagaagtcttgaagctgaaccatgagaaggagttgcagaatctggctttgcccgagcagcatgatattcttcaaggtaatcaactgcaaagaaaagaagaatttcaggcggctttggctttgaaccatgtctttctttatttctctcattccaaatgctccaaataattgtagcaaattgctagctgctttgaagaccaaatcgaggatacatgtaacattagttccattaatgacatattgttaaacatgtactcttggatagaaaaggaagagagctgccagactttctgaggtctttttacagtgaaacaaagcatgagtaatggattcattgttgcaatgacataaagagcaagtagcaaaattactaatatgtccagtatggaggataccagcaatagggagacaatcatgtatagctcgccaaagaaaaattattatttttgaaggtaaggacaaagactagaattttttccaccattgaaaagacttgtttgaactagcagtacgctgctgctcttcaagaagggtagctaaagcatatactgatttgactgagtacattccaatagcttcatgatgccatataagttggtcttgtttgttacaaagtgttaaaggtatactctgaatcttgtaaacatcagaatctaaaaacaattgttttagtagagagtgattccattgtctagtttcagtaatcaaagtagataccttcatagttttgtctgtattcttaaagatcaaaggctgaaatgaggtaataccaagcagccatggatctgaagcacaaaggatatgagatccatcaccaactttccaacgcaaacctttgcaaagtaattcttttccccaaataatacttctccaagttagtgaggggtaagatcctaaatcagcatccaagaaagagttatacttgaaatatcgggctttgagtattctgtgtaaaagtgatgtagggttggaaaaaattaactacgcttgtttgactaataaggcttagttaaaatgaacaaaacttttaaaacccatgcctccttcaactttcgagtggcaaagaacattacaagttttctaattaatccctgaggatgaggaattggatccccaccaaaatttattcatcatgatcttaatttggtgaattagagacttggaaagacgaaagcagctcattgcatatgttggtatagattgggctacaactttaagtagaaattttttaccaccaattggaaataattgttcccgccttgctgaaagtagattccataacttctctttaatttccccaaataggattttttttgtctctcccagagtaggatggaagccccagataatgttcatgacaaggcttaattggcatctgtaatgtttgttggatgttgagttgtattgccgaaagtgtgtttggagaaaaagataaaactgatttatcttaatttaatttttgacccgaagcacgacaatagtaatctagagaacgtttgatatcatcaatggatcttttattggcatgactaaggacaaggctgtcgtctgcaaagaataggtgcgacactgaaggagcacctcgagctactctcagaccttggagattaccacggttttcctcatattgaaaaagccttgaaagcccctcagcacaaatgataaaaagataaggcgaaagtggatcaccttgttgacgaataccacgactaggaattacatgaccttgaattgagccatttatcaaaaaggaaaaggaaatgatgtttagacattgttgtataagctctactatagaaggggcaaatcctaaggcaatcatcatgctacgaagaaaatgccactccactctgtcaaaggctttactcatgtcaagattcatggctgcataaccttcttttcctctttataaatgttttagtgagtgtaataactcaaatacaactaacacattatcagtaatgagccgagattgtaagaaggcactttgacattcagatataaccattgagagaaagggctttgagtgaaacacaatggactttgaaactaatttatagagcacattgaaaaggcagattggatgcaattgagacatattccttggctttttaactttaggaatcaatgtaatcaaagtcttgttaaagaagatggatcaaccccattattaaggatattgagaacagttttggtgaccaagtctcccacaatgtgccaatagttagtgtagaacataactgacattccatcaagatcaggactattgtcttcactcatagaattaagggcagtgtagacatcttcagtagtgtatggttgagttagaatctggttcatatcagctgtgattttacatggaacagaagagataacatgatggagagcctctgaatctatgccatcagtagcataaatattgttgaaatattcttcaattgttctactaataccctctagagaggaatgttcattgccttgatcatcaatcagagatttgatagtattgtaggagtgcctactgtttgctttttgatggaagaattttgtatttgagtcaccagactttaaccaagaaacttgagaacattgtttccaacattcttcttcctgtgcaagtagttcatccaaaataggttcactcgattttagcatatcaaaatgtgcagggctggtgtcttttgaattgttgagagtagccactttgtcttgagtaatctttattatttttaggaaggtcactgaattttgcacgatgccaaaaggacagttgtgatgaaattgcaataatgttttgcacgagttgggcagcagaattcgagtctgaagcagatcagtttttagcaatgatctgagcaagcatcctcttgtaaccatattttttcaaatctaaatcgagatttagatttctaaatagtagaatgttgtagtggagcaattctagcttttaatgctcgatggttcgattgaaaaaaattcaaattagtcaacatgggagcagtaaagtcagtaaaccaataggaattgacaaagccataatccaacctctctttcatattaatgccattaacattattgttatgcgaagcaaagctttctccctcaaagttgagttcttgaagatcacaataatcgatcacatttctaaaagcatcaatttgtatttcatttttcagagggccaccaagcttatcagagtgtgaaatgatctcgttaatgtaacaccctaactagtttaggcatgttagcgtaaattttaacgtactgtgcagctcgttgataatcaacaagaatatcgaaaagtgtgattaattaaaattttacttatttaattaaaaacataaagtatcatacttataaaattctcggatcccgtttacaaaaatatttacaaaagtttaattgtacatatacaaaagtctgtcgcctagcgactatacaacaaaatccctaatgtcccaaagat

SEQ ID NO: 299312 - DNA, 4847 bp, Cannabis indica
ttagcgatgtatttgtaataatataacaaatttgaggttagggatgaagtttagcgatgtttagcgatgatttacgatatttagcaatgatattagcgatgtgtttcgcaatgtgtttcgtgatgttgtgaatttgagacatttaacatgttttatgatttcgcgatgtttcgcgacatttagcgttgtttcgcgacatttagcgatatttcacgatattgtacaaaaaacaaaaaaaaaaatagcagaaaacaagcgagttgaaaactcatagattttggagctttgggttttacgatttctctttgtaatttcacgatatccttcttgattttgtcctacgtttcatcttcgatgtggatttcgccggaggtggtgcggtggccgtgagtttggtttgggtttggttcggtatggttttgtggtcgtagttattggttgggtttggtgagggttagagagagagggagagagggccaagagaaagaggaaaggtatgaagagggtattttgagatttaattaattttagagtattaaatttctatgcattttaatgtggcattctaaaaaatacaattttttacgtataaattgtcaaatttcccaattataatcaggggataccaaaaaaataaaacgtgaatttatcattagttcctagttaaagatacgctaagaaaagtatttttgctactgtttttatgtttttatagagagagaaacgaaaaaaggaagaagaagaagaagacattcattctaacataaaggttaagctcgaaagattcattcaagcattagcatatagtgcgaaagaaaatggaaataaaatatacaatctgtccatggaaattgattgattaaaaaacatgtttaaacaccatacataggttaagcaaaaaaagaaagaaaaaaaaaagctttgaccagaaacatgacccctgctcatgctcatccaaaaacaacaagcctggttgatacaagaatgaaagaaagctctatccaactctatatgaaaaatggagggatgagaagcccccatcaactctatccaacttccaaaagtaaaatatgttgaatgaataatcagtgcagtaaaaagaacaatgtctgaaatggggtttagaaaaggatgactccttaagctggcaaactgagaattgagtatgtacgatcaagagagaaccactccatacaccacagtatatggacaatcacctctgaatggttcataaatcaaaactaaatacctaaatgaaaagacaacatcccttctaaattgcaactcctacaatccaaaattagtccataaacccttttttttcaaaaaaataaaaagtaaattagtccataaacccttttagaaaagctgaagcagaaatcctaccttctattaaaattgatttcacaaattcacaacttaatgattgttgtttcctccgctgcgtcttcggcgcctccttgaaaccagtatccttgctctctggaaaccacgtccagaagcagccccataactggagaatgcagaacgaggccccccaaagttgtcttcaccaatagaggcaaactccctgtggaatctaccacgtgagaaattaccaccattcagccctaaattgaatgaacctaaattaaaatcctccaagtaatcatccagttcagaatcataatcactgtaaaagttagtctggtttggctcaagaacataatcaccaagcaccactgcccctggtgttgatgatataattgtgctgatgacatcactccgctctctttcacattcaagcctcttccatttctcttcaaggataggatccactgctcgaggtcttgccagaggatgcttcgccttaacatgctttctgagctctttataacttccaacaaatgggcacttgtcctgcatgcagcttctcttcttggcatttagatacttccttgctggttccacaactgtccaacctttcacctggcctcgacaaagtgggcataaaagctctggtgcttctacattttcattgggctgtcttgcatctgaactcgaacctatattaccgaccgactcacccgtctgttctgaaagttgagtagtagaggcggctacctttgtgtaggctttcttgtattgttcaagacagttggaaaagcgattactagtggcacacatgtacggacgacagcccttgttatatgatgaacaaagaagaagtacagcattgtgaggaaactccatacatactgaacacgatgcatcaagccactctttcttccctgacacttcatggcatttcttctttagcttgcaagctgtccaagtatcagatggcaataaatgtcgactagccctggaacattttgattcagacttacgtcgtaacttgttagctttggccatctacaatataagagaaaaagaatgatcaaagaaaaaacccagactgaattctcttgttaatgatagtcaattatatggtaagatattgatcatgtaaacacaatgaatgcaacaactattgctataaaactttatttaatttttctatgcttgtcctcaaaaaactatgagagcctatcatttgatttacgatcaagaattacaatttgctagttgcttataatcaacacagctagatttctcaagcctaaaattcactactttctctcattcaataaaaaaaatgattccttttcttcttctttgcaatatttcttcttccttcattttattctttttctctttaccatttctcctaacaaacatctcccctccctctccctcttcctctccttttctctctcgttttccttcatcattttcatcaaaacacaatgaatcgcatatcaatgcacaatgaaatttcttataagaaaaagaatgtcaagggttcttttctaaatgtatacaaaataggatgaagaatcttatattatttctgttccaactagatttctattcgcaagaaaagagagtcagctaccagactagatatgaagaaattaagatttgaaatataatttcagacaattttttatttttattttatgcatagaccaatcaagtggtgcagcagaccaaacaagtcgagagttacaaattaggtatgtatggccatagaagaatgataaaattacatactccaagaaaatttgtggtataaatgtaacaaaacagaatcattaaggatttacaacacaaaatatgctaacattttatacaaactgttaataatgtgaaaaatacaaagaaatgagatcagatttgatctcagtgcacccgacatttggaacaatttgtgaagcttagttttatcaaaattgaaactataagacaataagaggttttagcacctaaaatgagctaattaaaagtcttgggagctgatgagcttaactcaaattaccaacaagaacagtgatacatattttgcagatcactttaaaacaaaaacaagtatacaatgaaaccaagtgagaagtgagaatcacagacaatttatgcataatgcatagatatatacaattcttcggaaaaaaaattacaaaagtaaacaaaaaccaaacctgcattttggaaaaaagggataatagagactagaaatggggaaattaaaataaagatagaagaatcaagtggaattttatggcaatggatgtccagaactaatgggcagttactcaaatccatgaaatttgaaatttctacaaaatgagtgatcaattaagtctttggtaagaccgggttacatgtaattcttgacactaaaaatagccaccaataaatttacagaagctacttgtttataaaaggattataatctcaagttcaaatttaaaatacatcaaatccacccgatttgatttgatatatattatctttgtttaactcagcagtttttaaataattgcatcaacaatatcgaaaataggttagatacacacaggaaggacatgcacaagcataaacatagcttgtatacagaaaatacagaaaaataactagaaagcatcgagtttagtacagttaactagaaatgcgatgctaaaaatgaaaaacaaatcctaaatgaaataagatacattagcaccaaaactgaatcgattaaagagcaaaggaagaaaacagcatgtaaatgacgccaaaatctaaaaattgattcagaacactaaaaccctagaaagctcattctgataggtagaacagaaagatttttagagagggagatcgaagatacccggaaaggtgggagggagagaataagagagacgaaggcgatggcgatcttggcggtgacgttctgagtctccgccgtagcttcgtggaagggttggattgcgtgctctgctaaagtgcagtgtcttatatgaaaaatgaaatatataacgtaaaataataataaaagagatctgattggacatttctttaataaatctcctattttttttaaaaatggaataatataaataatagtgttaatcataatcaaatattacaatttttaagctcgaaatcatatctaataaaaaaaattaaattgttttaacgctattcattatagttaggggtgtatataaattgatctaatctaataataatttactgatgcaattacaatcgatagttaaacatttgatatttaattgtgatcagatcagattgaatgttatttttgaatatctaattggatcggatttgatgttgaatggggtgctcaaaaattacatccacaactaatcgaactaattagtattttcatttagtttaaataagtaattagattatatattgttatacgtaaaatatatatataaaaatgttaggtttaaaatattgaataaacctaaattaaa

SEQ ID NO: 299313 - DNA, 2788 bp, Cannabis indica
aaatgttcaattagaattgctaagagagatttatgcagtttcaaaattgctaactggttaaacctttcaaatgaccataattcaggtgtaaaaaaagagtgacctatcaaagctagccttcatttcaaagaatctatggcttcaggttaagaatgcttgggtgggagttccaaaagtctggttcgattatattgcaatgttctacgacaactttctttcgataagttccattacatgttccattctcatgttctggagtaatgtcttcctgcatagaaaaacgagtatactaataagattcagtaaagaattctagaaataggaacaaaaacaattcctgaatataatcactatcattttaccaacaattgtagactatttttacatactacaatccccttaactttcaatttgtgtggctacaagtgtaaatagctcttgactatgggagcatatttaagaaaagatcttaaagccttttattacttctcactgggagtgtatctatcattactcgttacaaaaactaaatcggaggcactcattccacatttccacacatagaatatggttagatatagcccaagaaaccttataaactcaagtaaatgattaacccaagtaattatacgacattatatttaaaaggagagaaaagtaaccttgtcccaaaagaccgaggaaccttgccgaaacatcactggtaaggtgttgtagtcactgataccaaattgttttagcagttcatttttctctggcgtttgagtaccctgcaaaataccaatacatgggtgaacatcagtgtacaactaaactaatattatcttaaatacacatttaatctatttcaatgtacagccaacaggaaatgattatctcgacacaaaatgtatagaaaggtctatagttttaaggaaaacattctaacagtgagctctttttctcattttctctctgctaggagtttaattttagcattttcaattactgtagacagcgacacatacaaaatcccatggacaacaaacaaagagcccttaaagggaaaaaaatgtgacaacaagagtgataaagtcttgcaccttcaatatattttgagcctcaattttgctttttccagacttaacaagttcccagaagcaagtattatactggttgtttatgtggcctgcaaaaccccaagaatgaaattataatctcatcttagacaaaaccaactttcattgttgcctaaaacaaacagacacaaggcaatgctcgtgaacattagcttgtttattgtcagagaaccaaaatggtcaagtactcacaatcaacttgtctccatgccaaataatcagtgagaatttcagatgatggataacacactgcacgtccatcaaaagaaggagggtacttcaactctttatgtgggaagaagtctctccattttgttacgtacaacgaagtgaagagtgatacaactgcagttacaatgtcactgcaaaatgaattgcaatatgctaattttcaaggtcaaaatgacattgtaagagaatatataaaatcattaggttatagggattgacaaaatcctaaatgccaaaccattcaagtcagtgctgaacaacatgccatgaatatatctttaggtaatacgtttcattctcttcttctcaccatgacttttttaataagaatataaacttttgtgaatgtttaacagctaaaatacaaaagaaaaaatataaggttcctcgtgaataaaaataaaaaatacaatcctaattatgaaatagagaaaatggcaaacatactaaagaacaataaacaaagtgcttttcaacaagcaatcaaagaagaaagcaagttctaaaattccttcaatgcagaaattcagagagaagcaggagaaaaatcacttgcttcatgcaatgaattcttcatgccacagaaggctcctcaaattctgggtccctaataagcctacttgatattatgatcaaaacaattacgggataatgggaacaatgaaagataccgtaccttgcttgtctttgatataactgagaatccttcttcataataaagctgaaaggaaacaagagggataaacatggttatgatatggtgtatttggcaaaattgaacttgtaaaatccttttttagcgcatttatttgacaaaatattattgcaattgaaacaagcaaacctatggaaaaaaaattgagattttttcaagtatgtacttaaaatacaaactaattacaaaaaaataacttagtaaatcttaattacaataatgtcttgccacataatcaaaaaatatcttaattctaaacttgtatgcctgatatggaaatggtcaatcttatctcagtctaaaattattttaagtcaattgtcttgtactctttgtgactttactcaatcttatctctgggtatagcctcatgtcaaggtgtagactcgtggactaagggtatcctaaccacgttcacaatcttgtgtctttcattcttgtttattttctttttgttcatatattctaatacaatagaaatttctaatatgtcatactatccttctgatctatcaattttataacagtttcaaattttttaaaattttcataaattcagttggtagtctaaaaaatgggtattcaaaactgaaaagatatgaaacacaaatacctgtactcatcactgaccccataggcaaagactaagtcttggaactcctctaacaaacccactgcacatgagttcatgaggttgagagcgcgctcatcattcggcttaaca

SEQ ID NO: 299314 - DNA, 3278 bp, Cannabis indica
ttttacagttacgtaagcttatcaacgttccttaaaaatttcaccatagatctgattcaggagtttatgtattattattattattaagttatgaaatgcagacaaaatgaaggcgaaattcaaatgaaatgaatgaagtgggcctgcgagtgggagtgggcgtggctatatatacacaaccaccccttcataccaaaaactatgccaaaataaggccttaaacccaatggcgtcctgagaactcagtacacaaaccaaacgacgtcccttgctgtcgttttacccattcccattccccaaacccccccaactttttccagattcctgattccgattcttattatgtcataatggcgaagggtcgcaaactcacaactagccgtagcgaaaggtttctcggtagcaacgcctatagctacggtcacagccagggatccagtggtaccgattcatccgagctcggcgaagacgatgtctggtccatggtcgaaacttcaacggatcacatggtcgatcatcactccaacggagattggaacccttccgaagcttcagtctccgccacagccgaggccatggctactatgtcaatccgtagccggcgccgaatccaacccgagggtgggttgtcgttggcttttgactcgagtaagaccacaacgacgtcgtctcgaatcctccaccagttccgtggaaacgacagcgtttcctcttcccctaggggtcaccaattagccacgtcactccccgtgaacgtaccggactggagcaagattctccgagttgactcggtcgactcgcttcacgagttggacgatggggtggaggaatacgagtccgagatggtcccaccgcacgagtacttggcgcgtgagtacgcgtacagccgaaaaccggcggcgacgtcggttttcgaaggcgtgggtcggaccctcaagggacgggacatgagccgggttcgtgatgcggtttggaggcagaccggtttcgatggttaataaattggaaaataataattatattaattaattaaaattgaagagcgagggaatcgtattttataaaatatattattatttataaaattaatttatgaattttgtaagggaatgggttatgggtgggtgtaacaaagagaccatagatgggtcatggaagaggtttgtggaaatgggcaattctttttctagggcaatgattcacctgagttcactcggtcgcaaatgagcccaattatgattctgaatttcgacttgagctccactcttatattaatttgctatggagttttgagaatttttcgattccaattttctcgtttctttctttactgtataaatagttttcttttttattatatttattttctatgtccactacgaatcttaatgttctgtacctatttcaaaaaaagaattggaagtcttgataatcatatatagactatcgagtgagaataaaatttactcctcaatttttgtgatttatttatttttccctttttttatagagttattttgagcatttctcggttaaattattataattttctctttttttattaaccaattaattgtattgtgtttctaaattctaatacgtatttttattacttttgagaaaggtgttaataaatgtgctgcaaaaaagaagagaaaagaaataaggagttaataccataattaataaagacaaagaaagcactatagtaagggaaaaagaaaaaatagaaacaatatttggcatgacgtgacagaataataattattgtacacagagtttacctaattaaacttgattaatgtggaatattagaaggaataataaatattattgagagttcattgagagaagcctaattagaaaaccaacccaagtatatatgtccaaaacaaaagatagagagtatataaaatacaaatgtaaaaagggaccgaggagaagaagagagagcaaaaacaaatgcttttagtagaaggtgacatgcatatatagtggcaaggcaatgccatggtggggtcatactcaactcatgacactaccagtttccagttaacaaggtccaaacaccaacacagaaaatataacaaatgtcaaatagtgtaaggaacagaggaataatggggtgggggaggcatcttatggctctccaaactcctcactttttcaagaaagggaccctatcattatgtactctttctcttatttatcttttattttttttggttccaatttacaaccattgatttaatttatactttgataacaataataataataatgaataaccagacttttgaatagttatgaggccccacttttattataagtgcaattgaaatgacttattaactggtgaccattgcaataatcttctttcatcattctatatgtactttccttgattattattggaatacataaagcatttttagtttgaactttgaactttgaacatgagcaaatttagtaccaaataaaggagctagctagttctaaaattcttttctcttatcctcgtacctctttagtcttcacccttatttttcttaaaaatggggagtaaataagttaattattttgttgaaatgtgtttataataacaaaaaaaataaataattaattagtcgagtttgacttatgactaaatatgataatttatgtataacaaattaagcgttggagaatgtatagtaaacgacataaggaaaaggacaatataagcaaagagataataaagacacttgtaaatacaaaagaacagaagcattaataacacaatactctaaattggcatacatcaatttgaaacgacaataatttgcataaacgacatgaatcagactaaggaactttaaacgacattaacttgaaaatgacaacgcggaaaaacatatgaacatcaccttgagaaaagacaacgatgatgacaataaaaggaagtgaaatggaaaacggaattaaatagtaatttagcaaaaatccaaagtagtatgagtggttgatttcatcaatgaactgactagttttatactttattcaccaatggatttagtgaaatatagatatgtttgaagttaatagttacaaaatgatataattataaaataaataaataatataagatatgtcagactaattaattctcatatggcaatactcaaaacctaatatgaaaatgtgtgttcatcaagtgtcaagtcttaagtaacccacacaagcaggggcggacccacattgtagcgagggggggcagtcgcccccctgaaaaaaaaaaa

SEQ ID NO: 299315 - DNA, 5132 bp, Cannabis indica
attttggattttttttttcttttagcaagtcctgaggaaaataactgttacataaagtattttcttgataagattgagggcttagtatttgtacatttcactactattttaatttgtgtttttttttctatctctaaaggataaatctgtgacagatttgagactatacaatgtattaatgtgagttaccatttgttgtttcttcagtatggaagttatcaacgtcgaatccttgttgaagacttgaccaagaaatggaaacgaatcgtactaaatacctcggtacctaacttaatctagtctttttacttttttatttttcttaatcaaatttgtaatttaatgagctaatttttctatttctgtatatagcctgtaaccccattagagcattgtgagtggctgaatagaatggtaactgaagtatggcccaacttcattagtccaaaactttcaacaaggttccatactattattgaggtaacgtgtgttcccctgcactggatttataaaatcataacaatattgcttagttatagtataggagactaggagcatgttcatgtgaagatctcctcttctatgtagtagtttagcagaaaacatgtttataacaaaacgaatttctgttgcattacatgctgcttccatttcttccgagttttgatcattggtcttcgagtaaatatcatttaactccggaaatatttcttcgtatatctattttcttttttgtatctcatctggaacttacttaaaggtactttagcaaagttttgctaactgtactgtcaattcatatgtcaaagagttgcactctgcttatgctgcacttgatttgttagaataacattttgtttcttcctgcagaaacgtcttaagcacaggaaatcaatgcttattgtaagtaatgcatatgtacttgatctttaaactgatatgtttaaagaaaatcttatttgaatgatttgagctcttcttctttttaactaagtgatgcattttacttaatttatgtaggaaagaatagagctgcaggaattttcattgggttcatgtccacctagcttaggtcttcaagggactcgttggctgacttcaaatgatcaggtttgcttttgttttcctctcttgctttattttaaacatttaagtctttgtatacttattatgtacgtgtatcttgctattattttctcagttatatttatgctgtcttaaatgcaatgatttgttcttgttttcttcgatcttcatatagttttgtgtgtgcctattgacagagattcatgcgtttaggatttgactgggacacaaatgacatgagtattttgttgcttgctaagctggccaagccattcatggggactgctcggattgttataaatagtctacatattaagggtgatgtatgtaaagttgtttccttacaagtattgattatcttcatagatacaagacattcattcactgttcttgaacttgctaattgggtactgactgctgtatttgctgcttgttgcatattagttggcgattcacttttctttcttatgatggaaattacatgcagatattcagccataagcttttttgtttttggatgtgatcatttcatttggtatattaattgtagtggggatactttctcaccatcaaaggcaaacaaataaattttcttttcctataatgccacatttaggactgcattttatatcataaataagtatagaatttttcctttccgtcagatgtttgtttcttgtattagttaaagcattgatgcaatttatatacggatgatctttgtgtttagtttaattcaattaattctgctttctttgaaaaacagcaatagcaatttacctttacttttgtagtttctcacatgcaccttagcatctttaattgtaaagatggtttggtgtttcaatggcattagtagctgtgtattactagaagctgttaatattatttccaatttgttacttatttcaaaattgatcttacagcttctcctgatcccaattcttgatgggaaagcagttttgtactcatttatagcagctcctgaagtgagaattggagttgcctttgggagtggtggaagccaatcattacctgcaactgagctccctggtgtcaattcttggctggtatgattcttatgcatatagaaattaagaacatgctataaaggctatatgattagctgctagttcagaaatactttattagaaatgatgataaagcagctaattatttttaaatttaggttataattttttaaaatacctttaagaaaaatttgtcaacaaaaattcaaataatctcagcccgatgtattattcatgtttgtaacttaccacttattcttactagtttttgctatgcatcaccatggtggtgcacctgccttcaaaaatgatcgtgctttcatatttttctccagtgtttccatattttgattatcaacttgcaaatctagcttctcatatagcatatctcactaaacatttaaacactttctttctttctcttttaggttaagatttttactgaaaccttagtgaaaacaatggttgaacctcgccgtcgttgtttctcattgccagcagtggacttacagaagaaggctgttggtggaattatttatgtaacagttatttcaggaaatagacttttaagaagtagcttgagaggaagcccctcaaaaaagcaagataattgtcatgataaaagttcagaagagcaattagttaatcgagatttgcagacatttgttgaggtagagcttgaagatttgacaaggagaaccagtgcaagatctgggtcatctcctagatgggattcgacgtttaatatggttttacatgaagaatatggaactttacggttccatctttacgagtgtacaccagacaatgtgaagtatgactatttgggtagttgtgaaattaaggtatttctgttaagacttttcacaagatttattatatatatgtgtaaatatttaaaaaaaaaaagtgggtttaaatttttacatatttggtgcactagtttcaaaaaaggcatatgcctgcactccatgttatgcatgtgatattcaattttctagcacagcactagaggaagttgaaaagttggatcaatgcttttcattttcataagctttctctggactaaacctttattttagtacttccacaaatgatctattaactattgatacatgtattatttattttcctttgtcattatattacttccaactaaattggcaatttttccactttgagaaggtaatgtatgtgaaagacgactccacaatattttgggctacaggaacagactccagcgtgatagccaagcaggctgaagtttgtggaaatgaagttgaaatgattgttccatttgagggagtcagttcgggggaggtaacttatttaaaatcttcatggaagttatgcttataaaaacagatgcgcatcttgtgaaattctatgcgcatcttgcttttgttatctaaattagaacaccagttttcagcatgcatgtcttcagattgaaatttctgcttggttctttatttgacaaaaatgacacgtaaaacagaaaaggaagaaataaaaggatagattttctataaagaaataaaaggatagattttctatacaatacggtgtcaatgtcagttacttcagaaatgtgttcatgtctgccatcaagtataaattaatttaaaattttaatatttgtatactgtaatttctttcccagctttatacattttaaccacttatttcatggatcttgcagttgacagtaaagcttgttttaaaagaatggcaattctctgacggttcacacagcttgaacaattttcgtgttaagtcccgacaatcactaaatggctcttcaaattttctgccaagaactggaaggaaaatctacataacggtgatggaagggaaggatcttagtatgaaagacagatctggaaagtgtgatccatatgttaaattgcaatatggaaaggtacatatctttttcctatgtaacaaccccttatgtatcagaatgatttcaagtttttttttttaaaaaaaaacatctgaattgcataacaccatgtatgctcttaacacttgtgttcaggctattcagaaaacaaaaacagctcactctttcaatcctgtttggaatcagaagtttgactttgatgagataggagatggtgactacctaaaaataaaatgttgtaatgaggaaatctttggggatgaaagcattggtaccgcacgtgtgaacttggaaggacttgttgaagggtcactcagggacatttggatccctcttgaaaaagtcagttctggagaactaaggcttcaaatagaagcagtcaaagttgaagaccctgaagggtcaagggtatggaagtattaaatatatatgaataaggtttgcatttatttaattggaataataccaaaaagatacgggaaaccttataagtcatgctgattcaaatgtctaacaaattctagtgagcctggttaatcttttaactttgttatttctgatattctatgctggtaaacaattatttggatgcggctatctccgatttttatttgtacttttttttttgtttctgtatgtcagggttcatcaatgggatcaggaaatggatggattgaactttctctcattgaagcaaaagaccttattgcagctgatcttagaggaacaagtgacccatacgtaagagttcaatatgggaacttaaagaaaagaaccaaggtttgaacatgttgcataatacaatgatgacccccttctgcctttttattaatatttgaatttatctttagcagtaaagccatgactgtacttttcaatcaacattaagtattatgattgtggaacaaagttttatcagctacaattggtaactcaagagcttatatctaggcatctgagcacaagtctttactcttaaccgtcaaattattgttgttcttcgttgttttgatagcaattatcatattattgaagtggctaagaaagaaccatgctctcttttattgatgattttgaaaactaaccaagtagtattttgcattcttttc

SEQ ID NO: 299316 - DNA, 3205 bp, Cannabis indica
tttataaattttccattattttgaggtaaaacttctttagacttgtgaaatgaatcttgatgataatcgcactccaaaccttatttaacgatatacattatttgagtgaaggttggttggagcacataaatatgcctatattttatggtaaatttaatcacaaaatagcatattaagtaaaataattcaaactattacacaattaatttagatatttttatttaaattataaattcccttcaatcaaagcaaatttaaatttgtactttttttttaaaattttttttattcaaattcatataaataaggattacaagtggcttataaataatcgatcaaacaagtatggaatgcaagaaattgaaaaataaatgaagaaatatcaaattgcattagttcatcataaggattcaagacatccaattaacagttcaaaaaataaaattagttcatagtattcattctaaacacagaaattcatagacatacataaaaattcaagatgagatgaaagaaaaactaaagagtagcctccaatggtgttctaaaagaaaaacaaagtgtaacaatgaaagataaaaaacattaaaaatggacgcaaaatagacttaacatagcagtatggatgtccatagagatgcatttagatactgatatctattatctagtgatgctagggggaattgaatagtatgaattaatactaccaatatcaatatgactaaaatactagaattgggttcgtattgtggttaattatactatagatacgaacgttcacatctcagtttaccactagatgcaattattgatttatggtaactgagtgtatgggtgctcaattacaagtcaattatttatgtttctatatgtatatttttcttgctaagtatgttaacttagagttgctttgcaatgtgcaggtaaagagaaagcggaagcaaaacagtaatgagtcgagggttctggtgaaaattttacatacctggtcgtatagatctgcaggtttgagatgtatgggagatcaactagcacaacttttgttttgtcgctagatgactattttgagattcaatatagtatgtgtatcttgcaaataaataacgggatcccggataataaatatttaacgaaatttcttttcaagaaattaacttttaatttaaaatctttttaattagtaaatgttaacacaataattagaaatcacgtaacgtgccttacaataataaaataaaattttgaatttttatgatttttttgtgaagggaggggggagagaatatttttatgtttaatttagctatgtcaaaaatatttaactcaagtttaatcttttttttttatctctttcgatcgataaaaacaaccctagtccatataatatgaaaataatatatatatttttttaattatataacaaaattaagcataaattttcttaatagtacctatatttacgagtaatatatattaataatgcatctatatattgattagcaattgaatacaatagtttgagatgaaatcttctccattgctttgcctttcatttatgagaaatggtaaattaaagccaccaactagcataatctataaggtgctattttgctattggtgcaattaagtatgaagtcccacataatttaatttagtaacttttttataaaatattgctaactattttacaagacatcaccttaaaatagtgttaggcgccactagtgcctaataatattgttctttgtttatctatatgtttaagagagattgtcgtcttacatcacctagaggtgacactttacgattgactagcaatacttcataaaaattattacattaaaatatatgggacctaatatttttttaatccaaattgaaggggatcacgtggtacagatccctttcccaccccttcagtaccttagacaattctgggaactatgagctagctatcagggccttatacatcacccttccttaattgagacattggtatgtactttgaggattcccatttcattaacgatggtactgccacagcaaactagcctcccaaaagaccaagcataatctctctcattagaagatgtactgggatttgaacccttgacttaagaaaagaaggatgccagtaaatgcatgcatctctaccactacaccacataacacatggttatataaaagattcaatacttaattatactaataacaatatcacatcataaaatgtactaaatactattttatttttaatacgagttaaattattattttaatgaaattgtcgtgttatgtgtgttgtctaaataaaggttggagcttttcttataataataataataataataataataatagagttgtgcagtagatattttaatgataagttatattaatggccacttgattgatttattttagattcatacacacgtaaagatccatcaaaatttctattagtagacaaatttattatatattaatgcccttttttatccatattcaaaaagggaaaacaaatcccaccaagatataatattgtaaaataatcttcaaaaatgacataagatcttttctttttgaaaaacaacaaaaacacttgaaaaagatattgtataccactaacccatgcaccgacagaaccacatgattcatgagtattcactcttcttcataccattatttaatcatataattacatgaacaatatgaagtaaaaggatataataaaagaaatatggattttattattattattatattttacaaagtaccactaaaaaaaataacttttagtaacaatcttttaatcataattaatataaaaattttatgactaaatgtaactttagttacaaaaagttacttgtgactaaaacacagtatttagatacaagttgtcgctaatttagttttagtcgcaacacgtattgtaacgttctcgcttaaagtctccattgggcccttacacccacggaatgatgactcttatacatgagtacatcactttggctgcttcatgaaatgacgactgaccctacaaaccaacacgagtgtttccagcatactttttcctcactcgcacgcttcttgggaaaacttctcaggaagtcacccatcttttaccccaggtcaagcacgcttagctgtggagttctttcgtgatgtgctaccgaaagacaagatgcatcttattgatata

SEQ ID NO: 299317 - DNA, 886 bp, Cannabis indica
tgtgatagttgggttaggaaggcgatgagatttgtgaaaactgcgaaatactcatttttgtttaatgggagtattaggggtgaagtggctcctactagaggtttacgacaaggtgatccggtgtcactatacctttttctcttctgtgcagaggcttttttggggttaatccagaaggcaaaagataagggataaattagtggtctagagtttgggaaagatacagtttcgatttctcacatgttccttgttgatgatagtttgattttcatgaatgctaaagaggaagagtgtacaatttttaaagggatttttaagacttattcgagaacttcatgtaaatctaaagaagtttgatttaagtagcaaaaaatgtgtggcatggaatgatataggaaaaacttggcaaaactgttggaggttaatttggtggattctcatggaaaaacttggggatgccctctttggttggaaggagcaagaaagaattgtttgataatattaaagataaggtgcgaaagagactaaaaggatggaggagatctttgttttcatcaccgaggaaggaaatcctcattaaagtaattactcaagctatcccaacctatgtaatgggctgtttcaaactgcccaaaaaaaccatcaaaagtgtccatggtatggctagcaggttctagtggggactaacagaaaagaagggtaaaattcattggtgtaagtgggaggttctttgcaaaccaaaagagaagattggcttgagatttagagatctacatctgttcaataaggcaatattgcagtttctaaagaacccaaattcgttgtgcaccaagccccttaaggcttcttatttcccaaataattcaattttaatatatctaatcaa

SEQ ID NO: 299318 - DNA, 2286 bp, Cannabis indica
gttgatagagagaaaactgtgactgttttctctggtgtgtgtcgagtaccatctgagctgtgattgctctagttattgtaattgtactgttgctctcttattctcatattaatgaagattggtgatgtttctcagctggagtatggccagggatcatattgatctctaggaccggaaccaggataaaatcgtgtgttgttctttgtttgatttcggatttgattcattatggagattaattagtttatgttcattttactgtcaaagttgtgagttcattgcagattttatgattgaatcctcaaggttatttccgctgaaattacaacattagtttattgggaaagtagtactgtgtcaaaaaatacatttgagagatttgtcctattttggaatagcttacttatcattcttcaaatatacatagaaccgaaagcactcataaagtacatgattccatataaaagattggaaagaaaataaatattgccgagttaatgtgtaaaatttgaattaacaaaacattgaaaactttctgctgtaactttttacaacatggatgactcatctatgtttagcttgcacatttttatttacatcattgttatttattgtgtatccagtattggtggtgtcctatgaagagataattaggaattttttacattattatttaaataaaataaataagaaactatattaaattggatcaatagcaacataatagtgttaaaagacccacatttacttttcattatcaagttattgttcctatatattaaagaaattgttctatcatacctacccattaatttttgttcctcaagaacccaatgattctccatttctcctagttataacaaaattattaaaaagtatacatgttattaaaatcaatttgtaataacttttatttttgtcagaagcaagctgtgtctggcagagtttgcaaatactaaagtagacattgaatattaattatgtgatgtcatggagtgcgtgtataaaacttttttgtttttgaaatgggtgtataaataactattttttttttgaaacattataaataactatttatatacacaataaactctttggttgaatgaaattatttgtcacatctggaacaatatcacatgaataatataattatgaaatgtggccaacacgactgtacatgcgctttttgaagcaaattatattcaatttcaattatacatacatgatatcttagagattttgttatatagccatgcacattgattgaatgtacggtccagatgggtaacacgtcttacatgtatatatatatttatagcctttttgtagcttgtattgtctattatttcatctaaataagttgataagaatccaaagattaagaaacaacacactctctctttctctcttttgggatatttttcatttcaaactaaaatccaaattatgggtttcagcgagaagcaagagagcttagtgaaggagtcatgggaggttatgaagctcgacattcctcaccacagtcttcgatttttcactttgtaagaacattaattacctaagttaaataataagtatattatatatatatatatgtttataaacatattaattcataatctttgtacatatatcttgtttataataatttataggatacttgagattgcaccggctgccaagaacatgttttcatttctaaaagattcggatgaagtaccacaaaataatcctaagctcaaggctcatgctgttaaggtttttaaaatggtaactaacaattttttttattcctttaattatttatgtgtataattaatattatacatggacattatcttttacttatttggtagtatattatatgtaatgtgtatagatagaggatgattacataatatggggaacgtgtggcctcaaaaaatttgtgtgtggcaagagtgtgatagaatgaaataagttggtataagaactattttcaatcaaaactaaatcaatccctttatttaatttgtatttgctgtttttcagttaataaacaaattttgaacccccttaatatcaattcccgaataattttacttaattaataatgaattatatttaaaattatgttacatattagacatgtgaagcagccattcagcttagggagaagggagaggtagtagtccctgattcaagtttaaagcatttggggtctgttcatctcaagaatggagtcatccctccacatttcgaggtatatatatatatatatatatataattattgttgttattatta

SEQ ID NO: 299319 - DNA, 1368 bp, Cannabis indica
aaaaaaaaaaaaaaattagatggcctgttgttagatgtctgatactcacaataggtatattaatgtgataatgcagcatttcaactctcaaggagcaccaattaagtcacatcatctggtggactatccttggagtccaagatgggagccgtcactaatggcagcaaggattttgtgagtgcattaacaagcacatgtttttagctcgaacaccacttttttttctttataaaagtttgctgatgtgatttatcttttaattagtgaatatttggtggacgaggctttgaacttcaagagatactgcaatgaggttcacctccagcactaatgtaattggcgggtgttacaatcgtgtaaagaagctatgggccgtggaaaacttttgtttgttgttgaatatgattgtgtttcaaaaaattagccagtcacttgtgtattttgtcctggttttttgatatgttaatatttttagcctagtagaaaagttagcaactgaactcggatactaacttaaaatactctgaagcaaaaatgctaactggaaaccgatgtttgttagtttactacctgctcttttgagttgaaaacttcaaatcgaacaagcctttaggctttagcccaaaatgtttaattaatacatttaaaatgtagggtgtttatacatttggtactttgtgtttatttaaatacaagttaggtattttgtatttttaataatgcttattctgtactgtaatttgaaatcatacatttttggtactttaaattcaattttttttgataaaattttatcaatacaatcaaactgtttaatatgaattctgaattcaaatttaattatttgattacatataattgagaattgtttggttaaatttataaaattgtttttattaaattttactttaaggtattaaatatgtataatttgaaaatataagatactaattaagtattattaaaaatacaaggtaccaaatatgtttttcataaaaataaaaaatactaaataagtatattccctaaaatataacatacacaaactcacaaaattgcagtttctaaaggctaaagtagatgtggttgtagatataatttattggtatttgtcctaataagaagactaaattgtagattattttttatgtcatctttctgggataggcgttgtgggagtaagggctaaggctaggaaataagaacgtagggtagtttggtacaggaggcagttttattgatgttcataaaactaggattgtagttcttgttatcgtattgtatttgtgttaatacgataaatgtaaacacgttagaattattaaggtggtgtttggtaatacttgcttttaaattttttaatcacaa

SEQ ID NO: 299320 - DNA, 1650 bp, Cannabis indica
aataaataaataaataaaagtaacgaatcaatcaatcaattttgccttttcatatttatattcacaactttttcattttcttctctctgtgattttcaccatcaacaacgtcattggtcaccatgtcagcgcgtcgtcgaaccttgctcaaggtcatcgttctcggcgacagtgggtaataataataatctcttcttcttcttcttctcctagggtttgattggaaaatgctgcaatgtttgttaattgttttatttgtttttcgatgtcagggttggcaagacgtcgttgatgaatcagtatcctttttattttaactgttttcaaattggaaggatccattaggatttttattctacatttcgaatttggattgaatttcattcaatttgatttgtgttttcgatttttctttcttttttcttttgtgggtcttgaattgatttcttagatatgttcataagaagtttagtcaacagtataaagcgactataggtgcggattttgtgactaaggaactccagattgatgacagactcgtcactctgcaagtgggttttgtttgtgtaattcaatggtatttttaattttgtttgatttcataatgatgagttgattttgatgggtaatttttgttgatgatgtggaatttgatttgtattcatagatatgggatacagctggtcaagagagatttcagagtcttggagttgcgttttatagaggagctgattgttgtgtcttggtgtatgatgttaatgttatgaagtcattcgatacactcgataattggcatgatgagtttcttaaacaggttttcttcatgacacccgtgatgtttttttcttgttcttttaataaaatttcagcaaagtaagcattatatcaggtgttcctcgtgtttctgaaacatgtgattctaacaaattgttactaataatctaattatataagtttgttcctgtaatttgaattaactttgtagtggggcaagccgcaagtgtgaatttttattagtagtttgttagttaatgaattttcaagtgttattatggaactgtacacaacatcatacagcttttagaaggactgccaaatcgttccttctattcattttattagatgtttcacactggtaaaccagatttggactttggggtaacctggattcatgtattgtgttgattaatgatacgagttctttttctaatgaatacctaaacctctggggtgttcagcatcaatgggataaagtcttaaacttattttttgtatgattagatttcgcttcatctagctgatattgccttttgtttttgccctttattttatatagtcctttaatatgaatctggtgtggtggttaccatttaacaaagaacacttactttgactagaaaaatcacaaggagctattaaaagttcctttggtgtttctgatatttgtttccctgctcggttttgcttgtgcgcgcgcttttctttattgcccaatttgatacattttgggtttatttgagttgttatcttttgacaagaggcctgatcaacatagagataaatgagccgacttgagattttggcattataaccataataaacagtttttgtattctttctttttctttagaaaagagtaaataatacaat

SEQ ID NO: 299321 - DNA, 2334 bp, Cannabis indica
agagagagagagagattgttaattggaaaaatgtagaaaagaacagacagtgatgccataccaaaagaatttcatattagaaaaagccactactactcacaggaaggtgtggaaagacacctgttaatgatcaccaatcttttacacgagtatttaaaaataattgaatcaacgtgaatgcagctaaaggttataatatgatggcacatactgatgttgtgttagagtgatatggagtggtagacttccctcctccaccaaatagaagtagaactgtataatagtgttgccaaaactgtccaaacaacagcaggtagagctagagctttcacagatccataagccttttcgattttagtaaatgtagtagaattagcctgtagttaactcccactaatgacgaatgtacagacaggacagagcccccaagtcaggactagacatgacacgaaccaaaagagtctgaaccttcaggtgctgcattgaagagaggtttatataacttaaaatgcataaactccccctaaagcaaacataaccttttgcaggccagaaaaacttgaacacatccacttgccgatgctgttggtcaagaaacttcctgaagagctagatttaactcctgcgctgatttcgcaattgaaccccctcttctacaaataaataggtgaatagaaggaaaccggtgtcaaatggtgaataataggttcaaatggaacaacaagcagaacccaagcaaactaaagcagttcaaaaagaaaaacctggagaggggaggtagacagcgtttaacttttcaagctccacaaagcaagtgttgcaacgttccaacctgcaagaatgaatgagcttaatatctcccagctttggaacttaactccatatgtaaattatatcattctgccttctagtttaagagattatcaacataaaccctttaaattttaaaactgtatcaagttattcagttcaacttcaaatgggaccaagtaaaattaataacattacaagattatccttgaagccttttggttccatataggggacattaagaataattacaataaggccaatcaattatgaggcttggcacaaaaggcctcctgtatagtttaccctcgtgattagggtgaagaaccaggttcaagatgggttccacaccatcttttgggagaacactaatgttggggcaattctctttgtgcgaatcggactagacaaaagggagtactactaattgccaactgaagttatactaaaacaataaggaaaataatgacagcagtcagtaagtagtctcaaaaggttgcatccaagtcactaggtaatcttttggcaacaaaatcaccaagtagtttaaaatgtttccctcaagtcactacggctatgtttggaagttggattttggtggagaaagaaagaggtaaggaaaatgtaggggaaaaaaagggtgaaaaaataaataaaataaaataaaaaaataatctcatgttttggtatagaaagaatggcattggaaaaaaaaaataattcagttttggtatagaaagaatggcattggaaaaaaaaataattcagcaaaaaatttcatattgaacataaaaaattgatttttttaatattccacgttgtatttttcccacattttccttattattctttccctgctataatccaacttccaaacatagcctaagcatattctttggtagaaaaagtcacattttagaccaatttggtgcagcaaaagtcagtaactaataaattattactgcctttcgtgcactaaaataatgtaaaatgtgattttctgccaaagaaccttattcatttcagactacttactgactccacacagacaccaaaaaagaataacttataactcagtgtaacctttcaaactacttactgaatttctcagcaaattttcttcaatatatttataagcaactagtaatagaacaaagttcattttttttttccttctaggaggttgagtctgctgccatataccctcatatacacctttgacggcggttcaggttctggagagatccacacccacttgaggaaaatgagatttgaggattcatttcgaagaattcatgaagctaaggttatgagagaacttgatggaatagaatttatggggacatgataactttaagagagacagtacaaagaatggaggaaacagaaaatggaaattacatttttaatgtatatgtataatttttgatattactagttaatgatttttcaatttctcatttcttttttttttttttgtacttaagcgtttatatattacaaccatgttttatctgggactcg

SEQ ID NO: 299322 - DNA, 1684 bp, Cannabis indica
gttccctcttgttttctctccgatttcatcgacgtaagtcacattttactttctttatttatttttattatgctccaaatattataaattggattacaatttgatgataataacagttgaacagaccaaaaattgtataaaacatcatcctaattttttaaaaaatttactgtgtttttttaaataagtttaaaggtttttaaagtcccatatattagaatctcatgaatgtgtaaagggagattcatataaaaaaaaatgagaaatgcaatgacaatgataatattggtcttggtgcaattaagtaaatattggacccatataatttaatataatcgctagccaatctcaattcgatatcgagaagatgctaggcactgctgatgtctaatagcaatgttaaaaaaattatatattttttatttgagtgtcattatttctattattaataactataatgttgagttaagaagtacatgtagtgttagaccaatataagtggcacatcacacatgtagtgctacaccaatataagttgtgtagatgtcacatattaatttatattaattcatttatttttaagtaatttatataggttctactcatatctagtttatattatcctaaccaaccaatagtcatacattgacagtactagattgtatatgagcaggtgatgtgtacagagtttgtagaagaaaaaagagaattaattcaagaaatactcaaaggaagaaaactttctaatctccccaaaatcaaacaggtattaacacttttttggtacatatatggatgatgatgattattgtaatatttgtgtatatactattactaattaagaattggaaatttagtgttcgtaataacttgattgatgcagccaacgttgataatatggggagaccaagatcagatattccctttagaactaggttacagattgaaaaggtaaataattgatcatggtttcttatgatgtttatgtctgaaattataataatttggtttttatgtattcatatgtacatataggcatttgggagaaaatgcagaattggtgattattaagaacgcgggacatgctgtgaatttagaaaagcccaaagagttccttaaacacatgaaatcttttcttgtgaattctctttcacctccttcaaaaaattgaatcgtgtaatcatcaattaaattaatatatatgagatgcgagtatatccttttgagtagttcactttgttttcaaattttaacagtaaatatatatatttttggaacaaaaaagtccatttcccattccaccaagaatcgttattttattcacctgggccaccaagtagcatcaaaggctttcaccttatgactactcatactgccaccgggtatatccatccatttgagggtctattagatcccataattactgcaaaatgcaaatgttccttaaaatcttcaacctatacattaaatttggttttacactattacttgtcaaaattattttcactcaaaccataacattaaaaattacactaaaaaattaggtaattaccagtttgaaccttgtattttgcaaaagttgctaactagactctctgttttgttaaatgacaaaatagaccatgtatttttcaaaatggtaaaaataagactatgagcttaattattaacaactttttttttt

SEQ ID NO: 299323 - DNA, 3267 bp, Cannabis indica
tttaaaagctaatttttttttatacagagagtatatttataataaatttaaatagtatttagttttttttaaaaaacactttaatttatttaatcacgcattgtgttaataaattttgatgttttcttataaacaaatttaataaatttatatattactttaaaaaaatttataacaaatttaaatattacttactaaattttgatgtttttatatgtagaagatgaactgatcttaggcaaatattattagcagagaatgatcaccaaaccaagaattcaatgaacaaataaattgaataaaacaataaaagaatgacaaatgagtttgatgagatttgagctatgatcaaagagttacaatactcgataccaagataaattaagaagaagttttattgatgaatttaattacaagataacaagagaagagtattgacaatccaagcctatgatcagtgtaacaccataacaagacaatttcacatggggaaagctatttcaaaaataagcaatcccttttttacatccttccattttctctctcaaaataggcttaatttctaactgttgttctctgtgtatcaatccaagtctcaaccccaaaaaccagtgtgtattgtgttctatttataggagttggttggggttgttcagtagctaacaaagttagttaagggtagttgatgatgtggcagtcacaatgtcctttaagtgtcttaattacaataattttcaccttaattgagacacttagaggagattggacttaagcttcttttatgttgagtaagtttaaatagtgtttaaacttatctagggtaacacattttgtgagcatatctgctgggttctgatcagtgttgatcttccttacttggacttggttgcgagagataatgtctctgatgaaatgcagccttatgtctatgtgttttgacctctcattatgcataggattcttcatgagatggagtgcattttgattgtcacagtgtactgtagtgtcttcagagtttaaccccagttcagtggtgaatccattcagccacagtgcttctttaatggcttcagctgtagccatatactctgcctctgttgaagacagagcaactaccttctgcaatgtttctttccagctgacacagcctccaagtacagtgaacacataacctctgagagacctccttgtgtctagacacccagcatagtctaagtcaacacagctagtgactacttcttttgtaaatgactcatttccaaactttattcccaagtctagagtgccttttatgtacttgagtatccatttaagggcagaccagtgttgctgtccaggatcagccaagtatctacttaccatgctcattgcataccaaatatcaggtcttgagcaaaccatggcatacattaggctccctaccacattagcataaggtatgcatttcagatctttctttctcagttttgggtaattgttcttttgaaagtttgaaatggtgagctaagggagttgagacaggtttggcatgttgcattcaaaacctgtttaacaccatttcaaggtatctcttttgagacagaaaaatggtgttaggtctgtttttcttgatgtcaatccctagaattttcttggcagatccaggttttttatttcgaactcaacattgagcttttctttgagtttgtctatctacatacaataatagatagatgtgcttattaaagtagacacaagggtcatacctgctttgacagaatccaatgttctttatgaactcatcaaatcattgcctaagagcctatttgaagccatatagtcatttgagtagtaggcatacttaattaggatttccattgtcaaaaccttctggttgtgtcatgtagatcttctcatcaagtttgccatgtaaaaatgttgtcctaacatccatttgatctatatatagatcatactttaatgtcttcgccatcatgactcttatggatgtttgtttaatagcaggagaaaatatttctgtgaaatcagtaccttctttttatgggaagcctttggcaacaagcctgactttgtatctgacttctcgtttgtaggtttcatcttctttgtgcttgaacaaccatttgcaccttacaagcttttgaccctttggtttgttaaccataatccatgttttattgatcttcaagaataacatctcatcgtcaatggtttggttccatttcttgctatctttacatgtgattgcctctttgaaggtttcaagttctgagttgtctagcttttgtactgctggaagagcaaaagctgtgaaattaacaaaaccaaatctgacatgggctgtgtgtaccctttttcctctatctctagtgagtagataatcatcagcttcaatgtcagcctctacacccataggctcttcaacttgagcctgatcagcaccctactcattaggtatctgatttgtagagtctgaattcaactcaaacccaacatgtttgacactagagccttcatctaattttgctttagtctttgatttcattgccatctcatcctagacaacatctaggcttaatagacatttcttgtaacctggttccaaacaccacagcttgtagccttttacatcttctgcatagccaagaaatagacatttcaaagctcttggttgaagtttgtcctgttttatgtgagcatatgcagtgcatccatacaccctaaggtgttcatagcttggtgggtgccctttccatttttcttaaggggttttgaatcctatggctgcagatggacacctactgatgagataactggctgtttttacagcttcaccccaggatggtctctcaagaccagcactgtgaagcatgcacctaactctatcagtgagtgtcatgttcatcctcttagccaatccattttgctgtggattcttggggactgttttgtgtctgtcaatgccctcttttctgcaaaactcactgaatttgttagaacaaaactcaagaccattgtcagccctgagtttcttgactatttttcacatttggttttcaacaagctttctccaaggaacaaaagtgttgaaatcttgatccttgaacttgagtaagaacgcccaaacttttctagaaaaatcatcaatgatgcttagaaaaatcatcaatgtgtgttttccccaaaaatgtccaaatgtctcactttacattaaaaaccacatggggaatgtgtaactgtaatacccggaattaagaaatggattag

SEQ ID NO: 299324 - DNA, 1274 bp, Cannabis indica
ttgtgttgttactttgcaggtggagatcaagaaggctgaaccgaagaagccaaacccacctccacccccatcaaaacgttacaatgatcccaggtctgcatttagtggtgggtatgaagacacttatggaggatttggtagtggtacctttggtggtggtggtgggggtggcggttatagatcggctggtggggcctatggtggtagaggtggtagttacggggggtacggtgggtatggtgggtatgggggaaatgaatttggtggctatggagcatacagtggtggaggtgggggtggcggtggtggttttggctcttacaggggggagccctcagtaggatactccggacgttatggaggagtctttagcagaggctacgatctaggaggtggttatggcggtcctggtgagaattatggtggatatggtagtggtggcggcccggctggtggtggtggtggtggtggttatggaagcagctacgatgctggccttggaggtggatatggtggtagtggtagtgcaggttcattccatggaagtagaggtgggtatggtggtggtgcagggaatggtcggtaccatccgtacggaagatagattgttgtactttcttaggacttttaagagaaaatgtagcggcgatatgattttctcaagttgtagcattgagcttttcatcctcaactctcttctctgttaacttatttatgtttttgggttcttgtcgtcaaggcatttggtatttgtcttatttgatttgaggtttaatatttcgatttagtcctacataccaactgatctgattacccttattatttgtctgaccattattgattatgaaagccatccatgagaactagtttttgttgaagacattatttaaactggtccaaacttggaaatcagttattgatatttgtaggagagagaggactggtagtggtagcatttagatttagaatcttttttttattagtgaaagtagtttgaccctctgctttattttatttacataatctgtcttaacaaacaatttaaaaggagtacaactctcaagctctccaatctcatcactacactaatcttcatccttgcgtggttatcttctcaattgattatttttcgatcatgtttgatttgtgacttacatttggaatggaacccaactgtaggggtgttcatccgattcaatccgcacttttttggtcaaacgacattcaatctgcactaagtgcggatttcatattttggatccaatccgatccgc

SEQ ID NO: 299325 - DNA, 1581 bp, Cannabis indica
agtgtccatgcgagggagaaaataacttttaaaacaaaagtcctcgagcctttggtgatcaatatattttgagtattttgattgtaatcctcctattctctcttataaattgtaatgagaacttttctaacaataatatcatatttgtttttaaaaaataataaataattacattaaaaaaaatactattataattttagtaattttattcttttaatatttttgataccaaacaatataccaaagaagtactttccttttctattatcgtcttttcatctttcctactatgaggaaaatttgtaaaaatagaataaagaaaactaaaactacgttttgaatttgtgttttattgcggtgatgttggtcctcttcaaaatgacagtttagtgatttctgtgtatttggccttgaccccctcataaaaataggttctacagtatgagtacgcctgagctttaatttgtatacttcaatattgcaatatgtaacaaaattaaaataataatattaacaaaagatatataataaggttacacataaaataaaagataactagttatcactcgaaaagtctagctagtactccaaagtgatgcgtcagccgtcaatacacaattaatatcctcgattcaacatcatttgcacactcataatcaaacaaaataagcaatccaataatgaaaactcatacccatcgccagagcttcagcttcattaaactgaaaaagatcaacccatataatccattaagaagactatttattgttgtaataatataagtcataaatttgttcaagtttcaattatatatatatatatatatatatatagatatatgattatatgtaactttaagcaatactataagattagtaaatagcagttagcttagctcgacccctaactatttctgttagttacagttggtattcttttaacaatattagttagaataagttagtagaatattagttagaatcatttagtatgtcgctaactactttctgcctctctactttctatttccaattgtatgtataaaaaattgagctatttaataaagctaagattgatcttttgatattcatcctttcacttctctttcttgtctcttttagatttctttactttcttgtttgatcatgtctagtagatttaatatgatatcagagcattcttcgccgttattggcaaattaacatggcaaccactgggactgaaactccggtcaacactaatgttcctgtaaatccatcaattggacaatagtactgtcaatcgtgccaagaacaaagcttcagatgagtatgcccctatctttttttcaatcaaaattctttcaataaagcttaatgatcgtaacttattgttatgtgaaaaatcgagtttttgcaaataatatgtatgaaaatataaaactgtatatgcctgcagaagcagaatgtaattctgttactgcagaaaccagttttgcaacgacaaaacagaacaggcagaataaaaatatttgcagaaatttaaataacttgacagaagagatttgtatgtggtatcagtgtctcccgaacactcctagtc

SEQ ID NO: 299326 - DNA, 2336 bp, Cannabis indica
atatattttatgtataacaatataaaatctaattataccaattcaaactaaataaaaatactaattagtccaattggatgttggatgtattgaatttttggacaccctatccaacatccgattcgatctaattggatattcaaaaataacatctaatccgatccgatcacaattggatattcaaaaataacatctaatccgatccgatcacaattggatattcaatatttggtgatcagttgtaattggatcggtcggttgttattggattggatgatttatgcacacttctgataattttttaaaaatttaatatattaattatgttttgtatttgaataatttttttaaataaaatatcaatattatataattaaaactattagaaagtacattctgatgtggaaaaaaacactcaggtcaatattcagatatagagataatatttcaatattcagatgtttattaaggtttaggtctgatggtttccacatcagaatttattggattggcgatccgatcaatatatttttgtttagttgcattttaaagtattgaaatgtcattccaatggatggtctattccactattttagtagaatgactattccagtttgaaatggaaggaaagaccattccaatgtaacataagaaaatttaatgaatttttatcaatttcttttatgtattttaaattttattctattctcattcctattcttatattttcattcgtcccaactaaacgccacctaaattcttaagtctagtttactagtgagtatgtaagatttttgttaagagtctgtctagacctaagggagataccaagtatctcgaatagcttggaaccatttgtatagaattttgctcaatataaagataacaatctcgtattctttcaagaactgagttggagttttggcagtcgtatgatttcccttagaattgaggattttatttgcttgcagcctatgacaaagtaattgttttcaggttcttgaaccaaactggcatgtgatgcataatagacttcagtcggcaaagagtatagatgaggtcttccttcacagaatttacttttcctttggatttccctcttttgatttttacgttgaaggggagaacattattttatttgacatccttttagatgatgcgccgcatgtttctcacatggttcttttttaaacaggttatccagcaccatgacttttttcttgacaagtgtctgagagaatgtttgcttcttttgcctgagttactcaaggttagctatgtatctaattttacttttgagtgctgatataattcctcaataaattcatagccttgtgctttcagataaccagttggacatacgtaaagaaaaacaagcaaagatttctctcatttctttgcttagattgaaatcttctttaagtggaacctttttaacaaatatacaaatgacctttacatagtttgagaaacctaataagcaaaaatgaaatcatccttgtggagaaagtgcaagcatattagtgcctttatgttttcttcctttaatttgataaagtataacaaattcttaaaatgcagaaagtggagaaacttaaatctctatgcgtacagtatgctgcagcaacacagtggctaattacatcgtctatcgatattcccagcatagaggaatcatttgataattcaaaagtgacagaaaattccaagcaattgaagtcacggagcccatctcgtgcactaaagttaagttccagcaatacaagtgtcacagaagccatactgtaagttcaaaatttttggctgacttccataccctcctaaattaagatttcccttacactaagaaattgaattgcagcaactttgagagagaattcaacacggaacttcagagccttggaccaatactcagcagtagttcccaagcagagccacatctgacccacctagcacagtggatcttaggcgttggaaatgagcaatgaattttgaagatcatttattacctttaacaaatgtatatattttttatctataaactgcgctggacttgcctgtgtctagaatgctagagtgataatcctggataaaacaaaatgattttttttttattgtgcggttgatatgagaaatgttcttattttattctcatttggttaccagtataattcaaaccgtttcacttttttatctcctttcattagcaggaagtttgaatcctaaaactaagagcatctccaatatggaggtgtaaataagagatgaacagttaaaatataactcatttaccaaaaaatgtgctttaattgtgtgccaaaaagtgatgtaaattt

SEQ ID NO: 299327 - DNA, 1223 bp, Cannabis indica
tattccattttattacctccgattagtgacggacccagaaattttacttcgtgggggcttatttattattaaaaaatatttatacatatattataattactcttactaaatttatttaattttgtgggtttttttttattattttagtctataattatcaaattaaaaataattaatttaaatttttaaaagacaatatttttattagtgggagctataacccccacaataactcaactgggtctgtccctacctccgactaaatgttaccttactcattaattatatgtataaaaaatagtaattttaaattttacttttttgcaatataaattattttgaatgttttgaaaacatacaaataaatttaaataagtgctacttacctaattacccaaaaaaaaaaagaaataataaactaaaatttattcctcaatactaaattatatataaaaaaaaatgccaccattataaaatatataatttaacatctaaaaatggataagattaaattggagtattgtttagctcaatgctaaaatttatgcctaaaatttatgtaaaagaaggtggagatggaaagagagtgacatcatatttggagttgagcaatgtgaggggttggccccaccacgtggaatgaaagttgttcccgcgtgcgtcaaacaaaaacggaccttgatcatatcattccaaatccggcgcattccgtcattacacgccacgtggttcagatagtgaaattgccaccttcatgatgacgtcacctacgtcatttattagtttacagctacgtcattgactcatcatcctctttggcccacaatcccaatcgccaacgtgtttcgactgtacgtcatgacgatcctaccttgaataatctcttataataaactcttccaaattgtaatatttaaggccccaaatttgacaatttggatatatattttacaaagctactcaatttagtcttgttattcagccatcttcacataaataattagataaatcggaccatattgtaaatttttacaagtatatcatcaaattaaattcaaaatacaggcatgtctctatacatagacttgtgttagggtctacctagtctaataactcaaattttttttctttttaaataatgtatattttttattgattttaaaaaatactatatatatatttttcttttaaaataaggttctaaaaataattttttttcctat

SEQ ID NO: 299328 - DNA, 4480 bp, Cannabis indica
ttagcatataatatacattatactaactaagtgttacagcttaaaggacatggataacaaatagcgagacatccatctcgccatgggaaggcatactcctggtaccttcactaatcagctccaatcatctttcaatgggctccactgctctgtcacatcaaccctttgataaggaagctgacattcaaatgatgttgaatactgaagttcaccgtgcgattgtcagatggagcgttatgtcttcacatgcaaaaacgacatgatttacattatcaatctcggaaagacatggaaaaagctccagctcgctgtcagggttattgttgttattgagtgttcaagcacctagtgaggtaccctgacaagatacattttgcagcatgtattaatccacatcagcgttgactcattaaaagcagtttaaatcatagctgtaagatattcagataataactgcatttatttatgtggagcgtaattaaggcccacaattttggaaaaatattgttgtgggattcatatctgaatgtaattaactgccaccccatgttagtataaataggggcagaatgtacagaaaaagagacgaaaaatcctggggagaaaagaaccctagtttgcattagaaaaatctaaataagattgactcgtagactatgcagagttaactgcaaaactacataaaaacttggtgttatttttgctttattattctttcttagatttctactaaattctgtggtgattctatcactaaaataggcttattatcgttaacgaaaatctatgttaacaattacaaatataaaaaattatgttttataaaatttttattttctatatacttttaattattttacccttatattacaaatatttaccgaaatttttaaaaattgattatgtagagcttaaggaaataaaagatactaaacaataaacagacaggtttttttacgtggttcggcgttaatgacccttagtctacgagtcaatagtattagcctctttgggcaagtgtttaggtattacaagtgtttacagtaatgatttcactttcctcttgttcctcttaatgggagaaagctctctaggaattttagcagagtgtttgtagatgaaaaattattcacctctttactcaaagaaaataatagtatttaaaggcacacatggggtaaagcgcataccctttacccacctaggattttgtactccacacgctgctaaggctggtacttctaaatgacgatctgaccattggtgggtaagaaccttcttcatcgtgtcgcttacaactgcagcgagggatttcatacaaactaggacacgggtcacgcgaaggttcttcctttggaatatgctctctaattagactattggggaaaaggtataaccagaagtgcgtacgcacactaccatggcttggcatcggggacaagatctgatctggtgtcagaaaaaggtgtaaccatctatatagtaatttttatatgatgttaacgtggtcattgcctataagacagttatcgcgtcccgatttcattacttaaggaagttccatctgggagtcatctgtttcaattaccttccgggttcggaaaatgttccttgctcgcaaatgactcgttctgtcagacgtctagtacacacttctaggattaccgagatgttatctttgagataccttataagttattttgattaatcctttctactgatacactttgtcctttaatcatgccacgtgtctcatgcgcgaaaacttgaataacaataaatatatatgcatttgataaaaataatttttaatattcttgaactatattttcatcacttgtgaaaaatagtatataaaaactttaagttgatgtggtttgttactaataaaaatataaaatcttttaaaaaacaaaatgaaaaataaaaaattaatattatttattttaaatattttttccaacaaaataatacttttttttaatctataataaataatcaaatatatatttagtacaaaataatttattatagattcttttaatcaaaatcgttttttttttctttaaaaaaaaaaaatttgggttgtatcaactttataaattctttaataaacttttttaactgcttactaaatatttttagttacttttacaatgtacctccttaaaatggatatactgatgcatcatttatttatttcagtacccaaaagaattttttagtccaattgtttttcatattcttgaatgttatagtcttttgagatattttacaaaattttgagaaattttgaataatttataatatagaaaatagtgtttaaacagtctatgtcatacgcgtataaaataaaatagtcacgcatacaatacgcggtttaaaccttgctttcagtatattaaattttctgaattttttaaaattttgtagaatgtcttaaataactataacgtatatgaccatgaaaaaaaaaattaactaaaaaataattttaaataaatgtgtaccaatacatctcttttaaaagaatatgttgtaaaattttctaatatttttttatcacaaatttttttaaacataatttttaacttttcaaaaaactgtgtcaaatagacctccatgcttcaaattttgaacgagtttggatacacacaaatctttattaaataagaaagtattttagcctccttttgaaaaacaaaataaaataaagtactttagtactttagccaatacgaacgggccacgtaagaagatgtaagtccaattgcatgcaaagtgttacttgggtgatagagatgtctcccatcgttacttcagtccatgtgccaaaggaaccaactcactcgttgtctgtctcgtccaagttgggcccacggcccatttccaccgacatatcctatttattacacttattttttcttttaatttattttcatgtaagcaattgaattttatcaacataacagagtcactgcaatagtttgtagtaacatttcttctttttcagtgtacaatttgggtaagagcttgggctgggctgttgagtttcagggcatgcttgattattttttctcttttcctttttactatgttctttagtgtgatttttgtactagggttgaaaaaggaagcttgcagtctatttccaaccctattaaattcaccttccaactatctcaccatattattactattattaaaagaccagaaataaataaataagacaaatctcttttccaaaagttaataataagagagaatatgggaattgtaaatcaccgaaaatattaaaatggtgatgcttaatgtgcacatgatgagggcacgtgcttagctgatactttgggatcaccaattttatctgtcttgtcacgtgattcgaggtctttcccaccaatgccaagaaaaaaaaagaccatagtaattaaatgatagttgtggtagcactctcttatgtgttaatattgctttagttcaagtaagtatcgggttctatataatttaatataataacttttagagagtatcactagtcaatcacaacgcgatatatcgagaaaatactaaatactactggtgcttaatagtaatgctcatttctcactataagcgatcttcatagctccatttccctttcttttattaattgtaaaggaagacctccaccaatgtcattaacatcaactacatacattattattataataactataaacaattaaggtaattctttaacctgaaatatgttatggctctttcttatattttattattcgttttccaacatctttacagcagcatcatgctcttttaatcggagccgcttcagagctaagcagcctagccaatccccttgagccaaggcctctaaaccaataaatttggttaataaattagaagctaaggctttaatataatacagtatcggatcaaatcatcaaacacctaatataggggaaaaaaaaaaaagataacaagtgatttgggatttaagaagataattcctccacttataactagaaacctttaattatatccatcaactttctttaatcgaacatattgtgtcccatttatttgtaggtaataatgtttcaaatacaaattactcttgttttaaaaaaaaaaaaacgaactcttattaatttcaacacgatggctactcttatttactatattcaatcataaaccacttcttttcgtaagatacaactataaagaacaatatcaaactccatagttcagtggtacatattactaaatattgaggaaatctcatttagaacaggattaaagttatataacttaaaaataattagtgttaagtggtgttaggattagtctgttaggattagtctgttattttcagttatagtcggttagttggttgtacccttagctaagcatattatatatatgccattccttcactctgtacataattcaatttactcaatataataaaaacagagtt
